United States Patent Application Publication US 2014/0057251 A1 - sequence listing, part 161

SEQ ID NO: 308439 - DNA, 1339 bp, Cannabis indica
gctacacatgaaacacaatatatcaatagcatatatacatataatagatgtgagagcaatctcaacaccacatacaccataaatctataataggagaatcaccaaacttgaacaaggtcttacacctttatccaaaagcttagtgtgtgtgatatagggtttcgatatcacggttgtcgaaaaatccacagtgattttttaaaaatcacgcacaacgctcaaaatttggtgacatgaaatggtggtgattgaaaataatgttgtttaatgattttgattttagggttttttgggttgggggcttggcggtgacgatattaaatggtggcgtcgatttatggtatagatatcatttttttatataaatataaatacttatgtctttggtggcctatgtcttctcttatttgaaataaatgaagatataggcccctcgtacgtctttggtgtttttaggacctacgtctttgcctgaattgtcttcgatagtgttatcccttacaaaattaaaggctaatggtattaattttttatatggatacgggacagttcgtgttgtctcaaattccattttagggaccttgctcagagcttcatgcgccctcatcttgacctcactctctcactgtcatcgccacactcatcgtaccttcatctcggcctaaaatttacaccatcatctagaacctaggtaggaaggtccacacaaccatcatcttagctcaacttggatttcaacatgtcctttcattttggcccaagaagactccaagatgttcatctcagctcaaggagatgatactcatcttagaccaatttgaacctcaatctctcatcatcatctcgacccaaataggggcctcacactcttataatttcgacctaagatgagcctcagtgtgcttgttctctcagcccaaaatgaagagcatctcgcattcttctcgcgatctaccgacaacatggacttagcctatgttcctcgtgatggaaatatttcaacaagggaagtttgaagatattttaatattttatcattttttagatatctaatttgaaatatgacttttgtattttaaacctaacacggccatagttatgggaaggtgcttttgaggttaagagattttaagctataaagagagtcctctagataaaaacccttataaggggattgaagtcacttgtaaagtgactccgattttgattctcacgaaatcattctcttgagctcccactctatcattctaaaacttacttgagaattaaactcttagagaacataactcttgagaactctcctcaagaattgagatcaataacactctaagtggactag

SEQ ID NO: 308440 - DNA, 1388 bp, Cannabis indica
aaattttataaaaagataaatatacactttttttcttttaatctttaaaatgatttttattaaaaaaaaatagtttgttaatttttttagtgtgttttattttttaaataacaattccatttataaattttttatttctattaatagttttatctattttaggaatatagagaataacaaaataggaaatattaattttttaatatttaattaatgattataaatatcaaccattagatatttgatccaatggtcaagaataaaatacccatacatgggcaatacccattaaaagcatacccatatatatatgtaactaatgatctatctaagactattttcccccacttcatatccaatatagttggctaggctctggattttgaagtgctttagtttttattttttaaaaaaccatcaatatatatccaatagtaacacccatattcatatataagtttgtcgtaaaaacaaggctattaattatgtacccccataatttgttgttaaaatggcgttcaatttaaaattgcaaggatattttcttaaaaaatgttaaaatatattattagtggctaacacttttttaagtactatattgttgttgattagattctatataatttaatataataattttaaaaaatttcactaatcaattataatttatcacttatatttctaacaacccacatggtataagatattcacagcagctacctaaaatatctacatgagaatcaaccaaggattgtcttcctgtctaaatctttataagcaaatctatcgttctgtctatctctgtgttaaatgatttgatccaaatcatgtctgagaaagaaaacagcaatgaagtttgaaaactacaacagctgtagttatggcctttgacaagacattgatgatgatgatgatgaggagtctcagaaatgctttctttcctttggttaataaataatgtctcaatcaatgaaacatttcaatagaaaccaaaatgggaggaatataatttaagttgctattctggcacactacactaaccaaaatttctgctgccctaaaatctatatttattcaactatgtatgtaaaactgtgtttgaaagcctattttttatttttgttttttaattttctttttggggtgtaactttcctactttctatttttgggatgaaacaaagggtgcagagcatgatgatgagatatcaattccagctaccaccataggcattacagacccattcaggaacatcaccaccttggggaactacaaagcacaagaagaagaaagtttcagtgataaaaacaaaacttgaattgtaaatcacatgaaaagaaagaaaactgcctttttacatattcatttatttatttatttatctatta

SEQ ID NO: 308441 - DNA, 1165 bp, Cannabis indica
ccgacgaagtacccttatttaacctagctagccatagttcgacattcgtacctgcaaaggaaacttcataagatagctttataatccaaccaaaataaataaagtaaataattaataaaagagatcataggtctcgtctttatatgtatacaaagtgtattttcttgactatttcaaagtgaagaagacaatcttgttcgctttagaaacccaaattctttgatacttcctctgtcaacttcaattaatagttagtcctttcttctttattaataacccaaaaaaaaaaaaaaaaagaaaagttgtaatcatcctcttttattttttacgtattagttgtacgtatatatatatagattgattgttgagcaatacaataaggaacatacatatagaaccaaaataaacttaaattgtctccaaaccctcaaaggaaaatggatcctaacttcctcaaaagatactgtcctaattcaaaaagacattttgctgccttaagtggattagtgggacccatctttcatatatagactacaaatatatattatgataatgtttatacgtgggggccatatatacataatattattatatttatatatgtcttacgtacaaggcaatggacgaacctgattttatggagtcaaagttagtcttttaggtcattaatatttcatgcatattattaggttttttagtactaaaccatagtagtatagtagtgtagtgtattatatatgtggcattgggcttgggtcggttgatatagtcaaagtctttgtctttaagtctaaccaccatatccaacagctagaggtgtattataatgttggcaaacttatagctaattccctataaaaaatattatatattgtattgatgcataatttggatgatcatattgtataattataatttgtcatgtaatgagagtttggacacacatatatagtttagtgaatcaaacctcaattgagttggttataataaagtcacactaaatgggctattaagaaaaagcccaattgaataaccctaacctatatagaatgttctttttttaggctatgtttggtacagtgaaagtagggctgtcctaaaatttaatggaccataaaaaaaaagggttaatttcacaaatgcacaaaaacaaaaaaaaaaaaaa

SEQ ID NO: 308442 - DNA, 1660 bp, Cannabis indica
taattttatttaaattgtatatagacaaaaaaatacatatataaatgaaatataaatttgatctattaaattttgaaatatatttatattatatgtgttagaattttaaattactaatacttttacattaaaataagaattgtatataattttttaaaatgttatataaatatgtatggattaaattaaaatggttatttttacatgtcaattaaatttaatttgtataaatataaatttttaatttttcaatttacacaaattgcaggtatctatcatttacaaattaaattaaattaaatggtataaattatattaaattagttattttataaacactcataataaaaactataaaatttgtaatttcttcttatcttaatcccaaacttacaaacttattagcgtgaataattaatcaatacattttaataattcaagccaattatattgcagcacgtggaaattagaaaggacaagttggtcattaaagtggtcttggttaggtgacccagtcttccccaccctgttctaatccacatgcctaggctaagcctttaactcagactgacgtggcagcttcagtaggggaaggtgagatctggtgatgagagttacaggttaattgttacgtggcatcatcgtattggtagttcaaaaattatgttattataaaataaagggatgcaaatctcgccaaaatcttttcggtttttggtatttcaaaccatgtagtagtcttatgtgttgaatcgttttttttttatctgattgcaacgataaaatgataaagagatatcgaaattcttataagtttaatttgattcatacttcattttgtttattaggttatgggtaaatttctcaataaatcaacaatatatatctaaactaaatatatttttattactaaattacatgacaggcactaatttttcaaaaaatactaactatttttggcatgttattgaaaaaaataatcgatattaatatactgaaatctatcaattgtaataaatttgatattgattaaaagaaaaaaattattaaattattcaaaattttaaatataaaatagatttttcttatagtgaatatctttcatctacacttaaaaaaaataatatcttaatgttcttatgacggccatgtgaaggggattctgccacgtggaatggtaccataaattattattttctaattttaagacatatatattatgttggtagagtattgttattagatttataccgcggggatgggtaactgtggggatccgcccttaatggggtggggattctccgtcttggtggttaatggggcggtggtggaagacaatttcaatacccgaagcggggatagggcgggagcgaggataatactatccgcaccatatccgaccctgatatagatatatataatttcttttttactcttaacatatatatatagtatatatatatgattaataatcaaaattattttgattatcgtccataattatatatcatgtgcttaaattatgaagatctaatgatgatagtgaagtgatgttcattgtggattacatatgtaaatatattttcttctcgattcttaatttcatctttgtttactttttaatttgttgggaggcttgagaggtatgagactatgatcc

SEQ ID NO: 308443 - DNA, 1432 bp, Cannabis indica
agatccctttccaacatgaaatatttaaggaaaataggagtgaaaatagaaagaaaatagggagtttctggttgggtgggtcagtcagtggagagagagtaaagagtaaagatctgtgcccaaaacaaaaatcgattcatggcggacttggcaatggcgccaccaccgccccttaaggctgctcctcctgcctctccccttccccttccccttcctcctccagctccggttccggctccggctccgtcgtcttccttgttctctttccctaaaaggccgaccattcgtgtgacttcggagttggatagcgacagctccgttttctcccacaaagtatcgtgcaagttgttagaaggccttgcgaaggtgaagttgtcgttccaaaacgaccgtaagggtcagctgttccaaccgcagctcgcttttgtctccaagcacctctccattcactacgaccttgacgaccgcaacgccctcctgagaggctcttttgatctcgctcccggcttgcagctccgcgcttcccacgatgtcaaggtacgtacctaatacctattttggactggattaatctctaattaattacctatttctttccatttcttttaatttttcattctcattaggctcaggaaggggagatttcgatggttactaggcttgctgagcctaactatgccttggagctttcatcacctgttccaaccatcggtttggtcagtaatatagtactcgactctactgtatgtagtatctttacttatttttaaaaattctattgttcattcttgaaccattcatttcccaattcccagccaagggcaacctttaaattccctcgtggccaagtctctttggaggagaaagtggagagggaagaggaggaggaagctcacagggttttgtccattaatggcattgttaaaggcaatcttttgaatggcatctgtactgctcagtatgctgatgaagaattgagactcagatactcctttaaggttatcaatgatacatacttttacctttatcctttctgtaccttgaaatagcactatgttccaatatacctaacctaaccttatctatctgactgtctagatgagtgagtactcttgacttctcaactctttttctgcactgcaggatgaacaaatgtcctttatcccagctatttccttgccttcaaatgcattatcatttgcctttaaacgtcggtttggtccttcagacaaattgaggtaacaataatggatcctggaattctgtatacacgtagtgacatgacttacatgcttgatgatattttacagtccaaaggaatatgtatatgcactcactcatgttgatatgtacatgttgcccggtctcagtgacttgttgctattttaatttcgtccataataattcgtatgctgctcgacattaatgatct

SEQ ID NO: 308444 - DNA, 1970 bp, Cannabis indica
ttggataataagtttataaaaatatggcatatcaaataccataaaaaatcttaaatatgaaaaaatatcataaaagagtgacaaacctataaataccatatttttctaattttttttgggtatgaaatcttatattttattttatgtaattttcacattactcaattccactctagagcaagattctgccacaattgggacccacttgctatgcacacagtcaacgccgactaatattgcgccactcatcttacccgacccgatgcaatttcacccatgttttcccattttatctcaacattttgagccactaaactactattctcatgcacgaaatatatgaatcttagaacaaagataatgtaaacatcatcagattttagagtaacaattatacttctttcattacttcttatttctaaattagttttacttgtgacaaaagtgaactatttataaaatattggtgagattagaatgtagctattgtattttttattcataaaattgatattgattcttttatgcttcatctatatatatctcatttattaaattatttttcatcttttaattattcttccaaaatttaatagtatattttatatatgttcagtttagattttttatgtaagttagactattaattattttagtatatttattatatggtatgtcgtttactgcattctactaacagttgtattttgtcaatttataatacataatataatatgctatcaagttagaagtgagattcaatttatatatgcaagattgattattttagcttttattatatacatcttccagttataattaatagtgtagagttgcaactgtgtttcgaattaatatcggtattagaataagatttacataactacatttcgaccttacctttatctaatcatcatctttctcactcatcattttattatttttaattcattctaacttctatcatattctatttatactaatctttaggggtaatttgcctccctatggatacgacatagcccgtttactaacacggtcgcagtgtaatatgttgggcaacatcaacgattattcaagatatgatcatacttacctaatggccaagaaaaatgtgaaacttttgcaaagtttatgagttcaaagcttagctgaaaagcaattacgtaagattagattgaggtagagagtatttagacaatgaattcaaagacttcctgatgtagcatgggattctatcccaactcacagcacttgcaacaccaaatcagaacgacgtttgagagagaaaaaagcaaaccttgtcaaacatagttaggtcaatattgagttactcttcacttccactcaacttttggcactattaaaaacatggcctttagaggcggttttggtaaaattcgtaactcttggtgttccagggatcacgtaaaggggttgaaaattagaggcggttgttagcaaataactgcctccataggtggttttttttattttattttttatattttttattttaatggcagtaaaatggagaataatgaatagagtgagactaactaagaaattgcagatctaaacgtaacaatccataataacacctttttttcttaaaaaatgcatcacaaatctaagttagccgcgagaaccacctaaaaacaaaaataaaatggtaaagaaaatacaaaatgaaaaatatggcaaaaaaagaaagagatgggaccttcggtggtggttgggttgttggaattggtttcttcgtggttgaggcaccgccggtactagagatagatttttttgctggtggtggtgagttcttaatggttgaggcaccgctggtgctagggtcgacagtggctcaactaagagacacatagaaagagtgggagagaaaaagaagaaaaaaaaatatacctttcatggcggccagtgtggtggttggtgagccaaacaaagagagagagagagag

SEQ ID NO: 308445 - DNA, 1968 bp, Cannabis indica
ctcatatgtgttttttcttctctttttttcattaactatcataataaatggtaaaacgatcaaactaattctcaaatatggtaaaattaaaacaaaaatataacctgattatattattattacgtgggtattaattacctgctccgcgtacttatcgatctccatggagacgtcagagatggcacgatgaacggtttggatcttggcgtttttacgcctctcgatgaaacgtttctcaatgctagttggatcttcaattaggatgactttcgatccatctttgactccgcacgtgtctaaatactcaccattttctctctctttccctctaaatatcaacttctgttcacctggttctaacccactctccgccgaaacaagcttcttcacctcccctgccacccaaccacgtcatttttactcttttacccctcattaaacactacttgcattgcagtttggaggttagtttcgtcattttcaattataacaagaaaaaaacaaatattactcaaattttctcgggaaagagacagaaaaattgactgagaaaagaaaaatattatattaccgaaggtagcttgagagttgaccgagatctcgtaccggagcgcgccaaaagcgattcggagacgcaaattcggaactgtagctgtaatggttgaggttccgattcttttctgaactaacattcctccaggtctcatttcccattcaaattcttcgtctctcgatgctgctgaagacgacgtcgtattgtcggaattgttgtagcttaatctaccgtacgacgcattatttttgtgattattgttatttgatttgatcatcattctcttcatcgttgtaatacgcagtgtggataaaatattttctcgagaaaatgtggttatagtagtaactaataattttctgccgacacaaacaggaggagaggggttaactgattttttgggttgtatacaagagtggtgatttgtagtaaaattacggaccaatgggaagcttgacacgtgttggatgctgtgacgtagtgtggagtaacagctaagcgcaatgagagaaagagatagtttgccgacaatatgtgacaactgagtgtaagattttgtttgcttagggtgtaatgttgctgtgttagttaaaaaaaggaagaaattagggattaacaaacactttgtagtgtgatttaatcaaaagtgattaataagtaaagatgacattaattcaataaacaaattgttataagactaattacaaaatggaagacaagcatatatctcgagacaatagatctactaatatatgttgcaactgcataaattatagggacgtcaaaaagatttatttagttggatcgggttggagctctgatctgacggatcacttctcatccgaaatattcggagacttattagatctcggatcaaatttgctctggcccgtctaattattttctggatcaaatttgatccgatttggtttcaatatattaaaaaaacttaattcaagactcagaatcggacccaacccactcgtgaacccaaacctgaacctaggacacatgacctggacccggactcggacccagacccaaacctggacacccaaacctgaacttggaacccgacactcggacccggacacccagacccaaacctggacctgaacccgggacccaaacctggacctgagttttgggaccctgacctggactcgagttctgggacctagacccgaactcgagactaaacttgggacctggacccaagatccacacccgggacctggacccgaaaccagggacctggacccaagacccacacccgggacctcgacccggaacctggacccgtgacccaagaccccgaaactcggactcgaacccgacccgtaattggtgttaaggtcgagtttattgaaaatatattataattttacacaatctattaatacaagtcaatatca

SEQ ID NO: 308446 - DNA, 1415 bp, Cannabis indica
ctccaaaatgtgtggttggttttggaaattaggtggggaggtgtctgtgtcataatactctcctctacttgtttgtttttcacttgagatatctgaggggacatatatgtagtagtatgaattgtgtttgtgtgatgtccacatgagtttccattgctcaattctctttctctttctctcttgttttagcaattataatttatttatttttggataaactactcctcattcgttcgtacaatcttattatgtgttagtgtgaaaatggataaagtcttcttcaccaagaataaatgtcattgtaacaagaaaaagagcccatgttgtacagattctagaccaacaaaatctttattaattccaaatccaaaacttttgttgctttcacgtgcctgagtaaaaaacaacaagaaaagactatggtgtcccaccatgaaacgatttttagcatggggggccgcctcaccttttttaattgccaccaaaacaacataaatttaattctctcaagattggaacttctttatactcgaatcaaaaaaagatttaaatcctttacttgatgggaaagatcacattcactcttatctttttcttctttttcttttcccaccctaacaccaataatcaaagcaaagcttagtttggcttgtatttatttatctttccctccaacattagcgctttattttatggaatctcattcgaggcctagtgatcagaaccacaaacactgatatgcacttggttctatctttattactaaatttatcaataaaaattccaagaaaaaagtggagttttcccactatataaaatagattaaagagtaaggaacaaccgttcaatgatgggccgagccgatgccctataatgataattttcctccaggtttacatcaagctcttgctgatgttaaaactctcaaaaattcaaaatcagctagtaatattctttatccactaacccacaattggtatagtgataaatatacacgcaattgaaacgaagggggtctagattgacaggtgtgggttcctaagtgaggtggcaagaatttctctccctgtcaattttttttcctctatgtatttgtgctctatgtttcattcattatttcttaaaaggttcggttacataccatgaaatgatgacgataaccatttacaagagaaaaccataaactagaaccaaaaaacttgcctcgtcactacatacacattagtttggaattgtatacaaacgtcaaaaatacaaaataaattattttgtcgtgaaataaattgttacaaaactagctctaaattatttaaaatttcacaagaattgatgcattaaataactataatctatactatcgtaaaacagaaatgatcacatttcaaaaaaaaaaaaaaaaacgaaaaacaaaagaa

SEQ ID NO: 308447 - DNA, 1677 bp, Cannabis indica
gataagtgacacaaattaatgtgcctgattcaccaaaacaggagatgaatgccaaaggagatttgcccaacaaggacgatggaagccaaccgaggacttccaataatgccaaaggagatttagcccaaaggaaatcttgatttgaagtttccaactgcagataaccaaatgataatgcaactgcagaatgagataagtcccaaaggaatgagtgaacttaaccgctcgatatcaaggagatttttccaaacgataaagggatgtgtcactcaaacaaaagggataaataaagtaagtaactttgccaaaggagatttgcccaaaagagctgaatccagaagtaacaacaatatttagaccgaaatctaatgccaaaggagatttgccccaaaaaagaaccaaagattctttcttggttcattcactgccaagaggagatttgccctgtataaggaacttaaccaatcaaaaactactcagaagttagacagatatgtatgtatgaaggagttcaaacaatgcttttcgaactatcaaggatcatgagtcttgtctcaacaaccaactgacattgccaaagttcaaatcaaaagagttctatgaatgctttaatttctctgaaaaaacaacaattggctgctgtttccctgatggttctaaaagtcatatgtaacaacactaaacccctttcaaactcaaaatatcaactcagattttccaccagtctaacactcttgagagcctgcatatcaatattaaacaaaaatataaatatcaacatgaaaagatgagagtgtctatagtttttcctttataagcaattgaagagaagatatttagaaaaatcaagaacaaatactaacacaaggaaagttaagagatcataaacagttttaaattaagtatgcagagtgaaaataaggatcttgggaatgttctaggaactgttctagaaatgatttttaatccatggaagcactaaagcacattcaacttagtattgtattatgaattatcattcacataagggattatattataatttctccagctaatcattttatatcataattcacataatattttcatattcttattatattagttactaaaaaagctccaaccttgatattttctacccccaaatgtttttgtattcaaatgcaaacccaataaagattacatttttttcacaaccaatctccaaaactatttcattcaaacatataaaaatccaaactttttacttctctaatcttatttcaatattacaaaaacatcaatacaaaacctttaattacacacccaattgatattcatgtaaaaaacataaacaaaaacaacatattaataatcaaaaatacctcttgggttgctcagaaaatctgttgaagaacttgatttgatgaaaggagatgaacccagaacacaaaaaagaaagcttttttctcttgaaagcttcttcacattcactcaaaagtcaaaacccaacttttatcccagctaagaaaagagctccaaagcttgaaacaatgaaaaaattgggaattcagagaggcccagttcctccctgaatcctggtcctcatgccactaccataactggaaaccattgcacaatgaagaaaaactctcacaaacacaaaacacaaacacacaaagctctctctttctctct

SEQ ID NO: 308448 - DNA, 2719 bp, Cannabis indica
attctcatctttaaaattcgtgaaattacgaaactgcccaaaaatcccgtcataagggtccccgtcgcgactggcaaattccccgtcgcgacgggaacaggcagcgacaccaatcttggtttttcttctcgattctttcaccatttttcctcaattcttgtacatactttctttaaatgcccgaggacctgaaacaaaagaatcaagcgtaatatagccctaaaactagaaacaaagagtgaaaactaaccgaaatatgacccgaatcttagactaattttagcctaacattggacttgcatcaattatttctacatctcgttcttccatctcaaaaatgcttggttcttgtaacttttcaattgaaactaagtcaaggtcattagattcaaattttgatgccaaagcctcagtattagaatttcattctcttagtaattgtttaattttgtaataatcgaatttttccaagtttttccaaactttttcctagtatttggctattttaattctttttgcttgatattcaccaagcacttgatttataatcaattgagagtcgctaaaacaatgtattattttagcatttacaactttaaccatccttaaacttgctagaagcgcctcgtagttagaagttggaaattgaaaccttaatgcataatgaaacttaaagttttctcgtgatactagcattatgcctaccccgagctatttttgttagatgagccatcgacgaataatttctagattttctgatttggaatcttttctatattttcttcaatatttatcccttcgatcaaaaaatttgacaaggcttgtcctttgatggctactcgcggatgataaggtatatcaaactgtcccaatttagttgaccattttatcaatcgtcccgaggcattgggttttgagaggaattgcctcaatgcttgatttgttaaaacatgagttgggcgtgcttaaaaatatggccttagtctccttgaggcacgaatcaatcttaatgtgagtttttctaggggtggatatatatattcttccctcaataaatgcttactaacgtaatatactagtgattgggcttttccctctacacgcactaacacggcactaactgcatttttatatgttgataagtacaaaataagatctcgccagtaactagttttgatagtatgggtggggttgataaagtatctcttaatgatttgaaatgtctccttgcattctactgtccattcaaatcttttgttgcatcacaatatgttataaatggcaagcacctgtctattgacttcgagataaatctgtttaatgcaaccaattttctagtttctttggggaaagcatgtcgagtagatcttttatcttctaggaatttgcttcaattcctctcgcattcactataaaacccagaaatttcccagaagataccccaaatgaaaactttctttattcaatttcatattatattctcttagaattgagaaacattctgcaagattgataacatggtcttttcttttcatagattttaccagcatatcatccacataaacttcaacattttgaccaatctgatgttcaaacattccatttacaagacactggtaagtagcacctgtattttttaatccaaatggcatgaatttataacaatagaatcccatgttagtaaaaaagcttgtatgctctcgatcattggcgtgcattcttatttggttatatctagaaaatgcatccataaacgacataagctcgtgcccggatgtggcattgacaagctgatcaatcccgggcaagggggaaaccatcttttgggcatgctttgttcaggtcagagaagtttatacaagttcttcatatgtcattcgactttgggaccaatactggatttgaaacccacagaaggtaaaatgcttctcttatgaagtcgttggttaatagtatgttaatgtaatgccctgttccacaggaacgccatgtgtgtgcttttcacaaaattacttttccattaaactatataaatatatgaaaagtgtgggtaattaaaattttgtaatcaaagcaaacgcataatttttgtaaaagataagtattaatatctatggggacccttattttttaaaaaatatttacaatcagttttaaaatgacattacgacagaagtttacatttcaaaatgcatccaaaaagggtaatcctgcccactagagtcgtgacaccgcgactgatatgtacactgctgcagagacctcagactcatggctgctcaaccttgcccttccctttacctgcaccatttagcacccgtgagtcacagagactcaacaacaaaagcgattaattccataagcagtataaaaactatttagtcacactataacaaaaatgtactcaattacaacacatcacatattaacatgcttaatcaatttcacaacatcgtaaccacacaatctcggtacttcataaagtacccttaccgcttgttaaccacgagctacgtatgtcactatagttgcccggtacagcaaatgataagtaagaaacctatctgcgatttcaagagtaattactcgtgtaatgtccccgcttcaagcctccattgggtccttacaaccacggaatgaatggctcttatacacgagtatgtcactctaggtgcttcatggactaatgactgaccctacagactaacacgagtatttt

SEQ ID NO: 308449 - DNA, 822 bp, Cannabis indica
tatttaaaattttgtgtttttttgatatgttttggggtttgatttgttttttaggattaaattttaaggaaatttgtttcaatttcgattatttgtgttttaaggttgattttttattgatggttgatgtttctctgaaattgtcaatgttttgtgatatttagcaaagactaacagtattaacaacatcaaaatggaaatggggttatttagtgtttttgtgatatctcgcgacttgtttgcgacattgcgatttcatgggctttatgccgcttggtttataagttaggacttttttcattgtctctttgcaattttagcaacatcttgcgatattctttgtgacatttcacgatattattgatgatggtgtattatcgttagacatcgttaaaaatatcataagacatcgataaatcaagcacactacaacaaaaattgttcaaacaaagaaattaaatatagatatcgtgacatgtcgcaaacatatcgtaagatgtctcaaatttctgttgctgctatcacaagcaagtttattttgtttgcaacattttgtgatttctactgctgatatcaagttgaaaccttcaacaactcaaacaccatcatataataaaatcacgagcacatttgaatctgcaaacaaaaatgaaacaaaaaaattaattcaaatttcactatcttatcgtgaaaaattgcattttatcgtgacatattgaaaaaatagccttacattgcattatatcacataacgtaaaaaacaacatcgtgcgatatcgtgaaacatctgttgggttttatgccctaaataaaactcttcac

SEQ ID NO: 308450 - DNA, 2092 bp, Cannabis indica
atttaaatattttaatctatattatattataacaaataatataacattccccccactagcttcttggtacttgagcaccctggagagttttcttcttcttcctctttagagcctcttggttggttgtaacctcctcagtcacttgttcgggctcctaaacttcatcagatggatagagtttgtacttaatgaaactagccttagtggccaagagggaaatatttcgagtaaactctaggagttggagtattttttttgggctcttgatctaagacccaaggtaaaaggaggacaacaataaggtagaatgtgctagaaattgacgtggttggtatccatgtccttggcaaagtagtaatcctctacaacccaacaatgttagacacattcgtgtccgtagtactagttagccgcttacactcattctgggaaaagtaaaaatacccaaacccattctgcttgggctagactttagatgaaatagctaactaatgttgtgggtggatggctgaccccatccttggaaggcgtataacacaaacaatgcggccagatactttatgcccttgggggtgagctgggtcggacatatgtgataataattggctctctttgaaataggaatacaaaggtagcattgcaccttgtttgacatgtggtcccgaccacacacaaaatctgcctccaggatttgttgccagctttctaggactaggaaggaatgcttccaccttaccaaggagactttcttcatagagagtagtcaatctcttaaaggttagcagagatagtggtgagacccacctagcacccttcagacctcaattatttaaaggtcgggcttctgtatattcctcctcaacgtaatctcgccctgccaccaagacatctccctcctcggagataggctctccagccttgttgtagccaccaaaaggaagtacttgagcttactcctcttcttcttcttcttcctcttcgtcaacttcaaaaggattagcaaggtggacctcaactttttcgaaggacttatagacactatgtcttcagttatttcaaaaaaactaaagacataggtctccacgtgtgtgtgataaggggttaggttagtggagatttatgtttttggttatatctatattttcggttatttcgaaataatcaacgataaaggtttcaatgactgaagataagttcgtgattttttttctttctttttctatttacttttatcttttagttttatatttcgtatcataaaaaacagaagatatagaccatttatctagtagtggtaatttggtcatatgtcaattgcgatttgttgattagcaaattgtattctcactctttatatttttttttgctaaataattaatttattaactctaaatatgcaaatactctttttttttctttcttttgttgtgattgattttacttaggattaaaaaattgtgttattgtgtcgtgtttgtgttaacacgtttatgacactacattcataataaatacaaacacgagtgtcaagaccaaaaccacgaacatgccatgatttcttaacaggtcacatgacacggagcacgtttcataaatgtatcatgacacaaactcgaaataacgtttatcgggcaattgaacatgttatggcatgatgcaaatttgacacaattaacataattatgtatataaatacatatattactaataaaatttaaaataataatctactattattattattattattattattattattattattttgataaagaaaactaaaaaaaaagttttatgatattttttagttttattttatttgtattctataaaaaatatttatatatgcttatacatattataattatgtcatttttaaattaagcgtgttgatctaaaaatgatattataaacctgaatttgatacgaaaataaatgtatcacttagccccaatttcactttgtatatttatttgaaaaataaaataaaaacaaattatcctaatattatatgtataatacaatatttttttcaaaaatatatttatacgaaactacttttaataggtattacccattaataggtact

SEQ ID NO: 308451 - DNA, 569 bp, Cannabis indica
aaaaaaaaaaaaaagcaaagaaagcgcagaagaagctctgcatgaaactgtgttatttcttgaaatagataaagtggaggtgtggtctgcatgagggtgtttgtgggctaagtttggcaactacagctgcatccttttgttttatatacttaattgtctctctattaagtaattggttttcttggagagaggactgctagtgtagtgtgtagtgtctgaaagttttgatttttaaggtacaaagaataagtctctgtcataccaaataaaagaacccaattagaagatacacatcataatcacatgcattttgctctacttttttttctttcataacaaacccatttatttattctttactactactctataccctctcttctccttcatttccctagtatacaaaaacccacatttctctcatcttcttcacacacctgaagaaaaaatatcaaaggagaaaacatctccaaccctccaatccaagtttagtttatagtgtgctttgaaaggtaatgttttaattcttttaaagtttaaaccttttttttcccttctctctctctctc

SEQ ID NO: 308452 - DNA, 1049 bp, Cannabis indica
aaagatatatatgcctgttattggttgagattatgtacgtttcagcaaaatatcggttccaatttttttcaccaaacaaaaattaatatataatatgcataacatttggttgacatacggatgatttcgtgatcaatgtggataaactataaagcgagatctcatcgtgtacgaaaacgggatcgagatgattaattaggagaatatatgtgaacaattaatgacgttgatgaaataattaatagctgaatatataaacattatgagatttttacaagtactatatatatatgtttgtgagtattttatcctaataaccctaaacataagaggttaacaagtgttttggctgaagagaatatgatcattattacttttacttttacttttatttggtacgaatgataatcacattactaatttatatttataaaataatgtaaagcaacgaaaagaataatgattattgttttattccaacgctgattccacccaattataaaatatgcttttacaaattttatttactactcattcagtacgtttaaagagaaaaaacacttaggaccccgccggatccgggttttgcccggaactatgattgagaatcattcatttgtttcttcgctcttacatattccctgtcacagtgtaaaaactatcatttgtaaatattgcaacatctttcctttcctgtaaagctgtatacaaagagttatatatacgaaggaggattatggagaagaaagatattatatatccatggtatcattaaatgttaaacaaatttcgcttccttcaaacgatctcctgcataggtaatatgtgacatttagggctcgtttggtacgccgggtagtattgtaataaataataaaacactatgtttggattaagcaatgtattgtattaattattacgaccaaattttttaatacaatgtatgttgtattatttaatacataataactggtcagtattagcttgtattataaaatttacaaagaatttggggtcaacaccattctccgacccggacgcgaacccgg

SEQ ID NO: 308453 - DNA, 1736 bp, Cannabis indica
ctctctctctctagatatatatatatatataaacagagagaaaattaaaaatgtataattaagagttctgacttgtgggtggtgcaggtgataggaggaagtgcccctttgggttcattgcttcattgattgctctgatagtatcccaatgcgcatttcgaataaatgcacgcccaactcaatcctacaacattgtaatatattgaatggtcaattagtccaagacatgggaagatcgagaaaagtcaagagtggagttagttactagttagaccgcagtagcttcatatcatgaatgaagccctgaaaataattgataggctgtggctctattctatgactactaccccctcaaaaaccaaaatggactttattaattcaattatgttatctctctaaacaatatgatttgtcaagttcaaatgatcattacagggatttctctatctggagcttaattgtgatagaagaatattcattctctttttatcatattgttccctggtgctctgttttaaaaagactattgaaatttcggtcattaaactaatatttgccaaccaaattattggctgtgtctcttagggcaaatccaatgcaagctaccttctacttactttggtggatctcatttttcattttttaattataatacttttaaactaaccaatcaaaatagaaaagaagctactgtccaatagctctcaaatgtttatatttgaaaagtcaaaattttttttgacaataggtcttatttttctgagagccacatccaatagcaactccattagagttgttgcacttgcttctcttatgttacacttattttagtattattaactaagggtggacattcggactaatccaatattttttttctcatccgttccaattcaattaataattaaataaaatatcaccctttctatttaaatttattactccataaacatatcattgttacaagtgtaatataaccaaatatttcaaataattaaaacaatatttctaagtaaatagaacaaaacatcatgaaaatgaatacataaaacaaccaagtgttacaaattcaaaaagaaaaaaaattctaataaaaatataattaatatatattatatttttcaatattttttacaatatatataattggattagattgatttttaattagattttgagattgatattcaataactgatctaatccaattagaatataatttttaacatctaattcaatctcattgtaattggatatctaatttttttataattgaattaaattaaatcgatttaattggattagattggatgttacccacccctaatctattaaccactcaacaaaattaaaggattcatttcaccttgaggaatgctacgcatctttcataaataatcatgaaattgtatcttcaataatatgataatacttatgtttaaaaatattcactcaaaaagttaaaacacaaatttataaaataataattataatatttcatattttaattaaattacgggaaacatatatttttaggtttgtttggtatatcatattacaccgtattgtattgtattgtatagtattatattgaattgtatttcattttatatttttatgtaaaactatatgtggtattgacttttatgcgtacctaaatatataatattttagtataaattaaaggtgtacatagtattacataaaaatatgatatataattcaatttaatataa

SEQ ID NO: 308454 - DNA, 1681 bp, Cannabis indica
actccttggtcaaagatggttctacattgtacgaactcttaacctcctccaactacatttaggtttgcggtcaaagatggttctacattgcacgtataataagttttatattagcttacccaattcttaacataaaattaaatgttcctatatggatgagttagtcttagaagatacattcatgtaacatgatcaatgtttcttaagtgccaccattaaaaaataattgaaaatgtttcaaaatagtaaaagcaaaatgacataattatttatgttgaatcaaaatacttgagaaagaatcaaatataagactgacatatataatagttttacaatctaatgcaaacgatagcatatctaaataaaataaggtattttagaaaaagcttttagttttaaaaattaaaagtaacactaataccgattactctttactccctcaagacttacttctttcaactcggtgcattgaaagagagaacatgaatacttattcttgacaattatgcatcagtatatagaggaagaaataattcttaatcttactcgtccccaatagccaattgaaatgcctttttagttgcaatagttctccacaatttgatcatatacatggggaaagaaaagtaagaaaattgcacatcttcgtgtgaagttgtaattgaaaaatatgatgtttaccactttgtctgtagataatatttcttccatgatggcaatgtttaccaaatgaaaatgtaatcactgaagagaaaaaaaatagcaaatacctctaataattttgctagtgacaaaggcaaatggaatcgaaatcctttctgttttcaaggatcaaagtcgtagaggccaatggtggtgcgatgtgggattttgagtctgaaagggagcatgataggtgaaatattctgatttgggacattgagaggtattaatttgagctcaaaatcctttccctcattcatagaaacgttatttgcaaggttcagtgatgaagttccaagaagaggggccctgtttttcaacccttggttcacaccctgttgtattataaaaataaataagtgacattatcaaagaaagtaataaggacaaataagtgatactgtcattcctattaaacaaaaagattggtgagcaggtccattcgaacattaaaagaagtttataatcgacaagaggctaattaaagcagaaaaatatgccaaccgttactctctcaaacaggggcaggaaactatagaaaatataaataaaataattaactacagtaagcattgaccaattacagatagcgattttaaacatgctaacctcatctaagtcttcttgatattggatagagaatggagtgtcttttaacatggatttcatcaattccaaactctttagggataaaatccatttttgagttgaagcttgtttacaatatttggtaaattgtcactgtttagcatactcggagattctctgtaaagagcaaagcataggaaatgttgtcgagaatcatattccaaccatatctctaatcatcttgatatgtaacccaaagctgccctgctcaaaattttctataaaaaataaagaaatcccatcatcaatagctaatatcatgactatattagataaaaaatagataataagaacaatcatatatgggcaagaaatcagaaaaccaatatca

SEQ ID NO: 308455 - DNA, 2044 bp, Cannabis indica
agtggagaaagtattttttctatgaatattttgaaaagtagattgcacaattgaatgggagatcaatggatgaatgatcatttacttgtgtatattgagaaatacatcttcaatagtcttgataatgaagtcatcatgcaacgattttaaaacatgaaaaatcgtcgaggcaaattgtattttttatgaccatgttttattctattttgttgaacatgaaaatttacaaggatatatttatcaactatttttattgcttttgactcaatatttattcaagctcttattcagccaaatttctggcttcattactacctacagactaacgagattctcgagcatgaggactattactgcaatttttcgaagttaggaacttatctacatcaaagtgaattttttagaaacttataaatatcaacacgtgatatttttaagagtaattaacagacatgttaaaatagggaccaaccgacttataagaatctcaaaagactattactataatttttcaagattaaaaacttattcgtataaagtgaactttttgagacttatactgcaattaaagctataatcataaaaataaaaacaaagaacatatacacacatgtcgtttcttctaatttggtccactgcaaacaaacgacaggtcgtttctattaaaatctcgttgtcgtttggaagagatgcgacatgtcatgaaacactaaggtagacacgtcatcacattctcagtctaaaaccctaacccaaaaccaaaaccttctcctcttgttcttcttcctcattctgccaaaatacagaacacaaaactcttccagccatggcgatgtctgccgaagcactgcatcgtctgaaagcaactgaccctccccaatggctggcaccgagccccacgctttcccagacggctcgggaagcgtcgcagaacctattctcctccctccggccgtacactccaaaatctccttttgataagctgttagttgagggtttcgacgctgagcagatatggcaacaaatagatctccaatcacagcctcttctattgaccattcgtcgagaattaaagcggttcgagaaagatcccgctgagatcaagaagctgaagctggttgtagaaggtgaggagaatgggttggaagatgggagggagaaattggaggaggaaagcgatgaatttgatgaagacttagatggtattgacgaggaactcgatgatgatgaggagatggaggagaatgaggatgaagaagaagagagtggagatgaggatgagaaagtgaaagagaaagatgaagaggatgataacagtggcggtgagtttgaagacgagtttctgaaaataaaggacttggaagagtttatggaggaggatgaagcaagggaatatgggctaaagaagaaagataagaagaagaagaagaagaagaaagttgataatgaagaagaagaagaagacgaagaagaaaaagaagatgacgatgatagtgatagtgatgaggtatgtatgtaggaaaggcatttccattgtttattgatactattgatgatttttttttctttctttaaatgaaatcttttcgggtctctaataattcttatttcattaatctagattggagattttgggcttggcgatgatgatgatgacgaagatggagaaacagataagttggaaggggcaaggtacatttttctcctgtcttgattatttggtttgcatatttatttggttgttctaaatggttgtggaactcaattttgtatctgttttcagtgataatgaacatttgggttgtatattgatcgggctaaatgctcatgaaacttaagtttgaatctctccttaatgctggactgtttgtatttgactgcataggcatgcaatgtatgaattgattttgttaccatatgcagacacactgtatatgttcataataatgattttatgtgcttaacccgtgcacatttggttatttagatatgaagacttctttgttggtaaaaagaaaaaactcttctaaagaaaataactaaa

SEQ ID NO: 308456 - DNA, 1439 bp, Cannabis indica
taatatttcaatgaaaagtgctgttaaggaaaaccaaagccatagcaaatgttcattgattctacttcaatcaagaaaaaaaaaacttatcacatttggcatcgcagggaacattcgtgtcttttgccgaattagacccattgcagttccagagaactttggccagttaaaagcagttgcagctttggattcaagtaatgttgttttaaaactagcagagaacaaaagtaaaacttacagctttgacaaggttttccatccaggttcatcacaaggtacttcattgtttttctatatgatactctcaacggaccatcaacttttcctatgatcatctcaaactatagtacttatctcttgttactgaatttgatgtgaaatttcagatgaagtctttgcagaagtagagccagttattaaatcagccttggatggctacaacgcatgtatatttgcgtacggacagactggcacaggaaaaagcttcaccatggtgtgtatctcctacttatgccattacagcattagtcgcttatgacatattattaagatggatgaataaacaagaaagaggggtgctggcaagaaactaatcctctcttactgtaatatgctctccgtcaattgttttaacacatggaataacaatgaaaatataaactcattaactttattctcttctccaaggtaaaaaataagagggcatggaaatgtgaggaaaaataacagtgctggtgcttgcacccatttaaaaagtcatgttagactagttgaagatcttagtaacctcagtctgaaagtctactatatgacccagattggcctagatatcacacaatcaaattatgtgcttgggtgttctaactaatgttgttttatatcatctatattgtaggaaggtattccacagtctccgggagtggtagctcgttcaatggaggcaatttttaaacaggcagtggatagcaaccacgtatatgtcttcacattcagtatgcttgagatttacctgggaaacctaaaagatttacttgttcctcagccaacaaaagtaatggatcctacgccaccatggtatgtgtagatttataataacatgagattgtaaacacacatccacgcttacacaaatacaaggtcacagtcatacgtatttattaacatctcaggtagcacacatgcatgaaaaattcagataatgaccttatttccataagcttccacaatctacctttataattacattttgaaccttaaacttaaaagggatacatgtgtaagaaatatataggccaatgcttaatttcatatcttacttctatgtgtagaaactgaggcataactggaatgtaattttcataagtaactaataccctttaaatgcaatgttgagaatcatgaggttccatctcaaaaccaattggcaatgagtggagtag

SEQ ID NO: 308457 - DNA, 2806 bp, Cannabis indica
ccatgaagcagctagagtgacgtactcgtgtataagagtcattcattttgtgggtgtaaggacctaatggaggcttgaagcggggatgttataggtttctggggacatacttggacctcggctcctcatatccatcaaggaacaatgtcaagacttgatatttcatcaacttcatcccgaagagcccattcacagctatggacccccatgttgacattccaacttgcgcaccgatttcatttcaccaagcaacgcctgtgaaatttgacgaaactaaaatgtgtggagcatttttcaccaaaaagaaggtcgagcatcaataaaaccaattttgaagatgtcgtccccacctgagcgcccaatgcatgcctcgaggccactatgggcacctaagttaatgtatctcaacctagggcactccaagacctctttctagagaagttttacgggaatttcccttatttttgtccccagatgaaaagttgggggcccacggtgacaacactccagtcactaggcacccaagttgatgtagcctcgcttctagtggttctgccgatttgattgggattccgtctcagacattctttttattttgcttaaaaataatacatgagacttagaatcaagagaaaatatctttagagtagtgagttagcccccatgcatcaccaagcgccagtgtgcaagcacactgggcgcttaggttgacattggcctggggctcaatgttctgtccttcaagcaatagttttgctctaagtattagtcttattttgccccccaaaataagattttaatgcttctgcaagtcaatatctcatgtatatgtgtcacgcgtaagtccatcgacacctatgtgcactagtgatcatatgggtatcacctagtcatcattagtgattcacctagcatcacccgtgcatatcaagtaaaattgccaagagaattttcctaagatcaaagaatgaactaaggatagttatcacatcatttaagcatctcaaaatatgcctaaagcccaagacaccaagttttggcgcccaagttgacgtttatgtcaatcttggtgctcaaaagtcagcctaacctcctagtcactttttcaacagtgcacactgcttagtaaaatggccataactctctcattttgatccaaatgacacgattcaagtgaaaaatttaagctattttcaaggcagatataagtatgtctcatgcccctaccgcaattttgaagtttcgagcttcaaaattagctcgcaaattattgtaagatttctcaacgaattttgtgggaattttctattattttattgtaatttaattggacttccttccctataaaaggtgagctcccttagttcattatttacactttctattattctctctcttcacacattctctctcaagaaattgtgaagtaaaactagacttagttattttttttttgagttcccttgtaagacaattagatttttgtgataataaaagctttgagtagatgtagctccattaccatcgcgatatagtgagtgaaatactaaaaattatagtgttctttctttagttattattatttttttttttgcctttattgcttatcagacgatatgaagttgaccattttttagcgtcaacaaaagtattttaaaaataataaatgtatgtaaattcttacaggatccaattaaaaaaaaattcaaatactaatttaagagttaccatgagcatcaaaaaataaaattagggtttctcattcctaaatttatagctataggaggttattttttttctccagccaggcccgccagccctccctgggcataggtgcggcttggtcggggttgtgttttgctgttgcgattcgattttttctattgcgattagtctggtctttgtgacatgattttcagtgttttagtcttatctatgtgacataattttaagtgttttagtcttgtttgtgtgacatgtttttgttttgttttgtttcgtttcattgttggctcttctttgttattcgacaactcgccatcaaatcgttgttattggttggaaataacaagttctctatgtctgaaggggttgttagtagtgcaactacttaccttgcataacagtgttgttgtatattctgagtggtagatgaaacttaatatacgtgttcttaagattatctatgatgctgcaatctttttgatattattttatttttaattttttagtcaaacaatctgagaattaagcgactgattatttgattcgttattctaattctaattctgatcatgtttttaatagagagatgtctcgattaaattacatattattttacttgattattattaaattgtataatttattcaaaaaatctatataaatttttattttgaaaaataaaacaaaataaataaagatataaaaaaagaaaactttgtataacttaatatatttgtgtttataataatcaaattataatattattataattatcattaaaattttaaatgacatgtttagtttagtgtaatgggaattataatgcaatcattattatcattacattgtttgttttcaatcttaaatctttgtaatgactttatattgtaatggtcattacattatgtattgtaatccccatcaatatatcaatataaaggaaagaataagagagattatgtgacaacttataagagttgaaattccgtattttaatattcccagtttgattatttaattaaatgattaattaaatgcggaataataaaactggtactgaaaacagttttctgtagttaca

SEQ ID NO: 308458 - DNA, 2025 bp, Cannabis indica
ggttgttcgcgtgttgaataacaggatagcatgaacgaaagaaaccccatccttgcaaccgtcaggcctttcaaaatatttgctttttccttcgtagcaatggacttgaatgaaaaccttcttgcaagcacgaccatatctatcgaaggcaaatctatcttgtatgtcgaaagatctttggtgagacgagatcaaactgagactcgtgtggtaacatttcaacctaaggaggccttggacacgattctagaaaatgaacccaccgctgagagagaccttcctgtggagattagaagaagtgaaggggtcaaaactcctctgcccgcgtaggcccataatgagtccatttgggaaatggattagaaagccaactgctttcaatcttatgggatgttgcaagcttattctgaagttgctgacctctacaatgtccctggactaatgtggcacagactttccatcatgggggaatctgcatctgttagtgtagaagggtttagtgcacggagttggtcccacatttcaagtggtgctcatctccccttgagaacttattttacaaatctaattgcaaaaattgggaatgccccttttatgctaatcccttcatcatataggctcttggatgggtgtgttctataaaataaacaagcaagaggtcccctctccaaaggagatccgttacttctacagtgtcaaggctaatcccatgaggatagataggacaaagctggggttcttccgactagataagtgctcggattcttactgccccgtatgtcaaacagatcgcacccacgacctctaggaatattggttcttttctttcgaatttcctactagcagggtaccatctcgttagttaagcttttaacttccaggtattctaatgatttaccttgagttttgcctactttttaaactctactaatttctgtactcccactaacatacttgatttggagcagagcttccccctcagagtattaggattgaggagacagtcaagaaagaagccctaaatagggcctttttggaagagcaatcaaaggttggggatctggtgacaactaaactcctccgtaggtttggcttgattacaaaattctatagtattgacatagtcagccttcgaggacagcgccaaacccctaggaaagtgaaggagaagattaccactgacttggcaattataatcattaatgcggccaacaatgatgatgccctaaactttgattgggtgttgcatcgttggtcataagagcattttagcttttgctcgcgagcagccctatagcacttcactaaatcgttgcacccatgtacaagtttctttactagattcctcttcttgccgtttctattttccttataattgtatgacctataattgttcctcttattcactcttattactatttcaagtgcagatacaccagagtccgtgatgttgaagtcttggagtaaccagatctcagcggctatggacaaagccagggaatcccaagaaaaaggtaaggggaaaattaagaccagggcttctaggactcgaaaaccgcacccccttaacttcctcatcatcagatgtctaggagatcgctcctcccacaaagactggaccaacaacttcaggcctttctactttggctggtggggagaaggactctgacacctctcgcaaggcttctgaggctctctccactctgggagagcaggccccacagtacgttccccctctaaaaagaacgatcccaaatactacatcaaacacggggggttctgatgacagctgtaggaaatcaagctagcaattagttgtaaatttacatttaatgtattttccatttactctagtattactaggtgttcacattgtattatatataccctttgtatacactaaaagagatcatcagaaaataaaaatcatttctctcatttttctcatttttctacatggtatcagagcatgtaaaagctcctcaaaagaattttttttcattccttcccttcttaaaattaggg

SEQ ID NO: 308459 - DNA, 2038 bp, Cannabis indica
ggtctctgatttttttgccatacacttagacttgttaaacaaaataaagtgatcaaataaaaaagaaaaaatcaatcagctcaactcaagttcatagtcattcatcattagtgttagtgttaaaaacattacaagttacaagcccaaactgcaattgaactaaaattgttgcaagtacatacatatatggggctttacaagtgacataagaacttagtttcctcaatttctaaggctctttcttaatgatcccttagccaagcatagcattgtcttcttatgtgaccctccataccacaatggtagcatttcctttcatctttcgcttgtgatctgctctgaaatttcattccactacttggacttctacctattttttttcgctactatctgaccttgatcctccactagatgagcccaaagctgcaattttcctcctagtatcttcctcaaacagtttgcttttgaccaaatacaaacaaagctcaccattatcactaggaacacaattacatactgactttattagctcatctggcaaagaagccaaacgcatatgggcttttagatcatcatctagtgccacattcatagcacaatataccctttttgtatttcatgttgaataagattttaactgaaaaagtcttagtagccgcggttctcttcttgaacaaagaatttaatttcagccagagttctagcatttgtttctagagctacatgatgaattaaactctcatccatacacagcctaatctttccaaccgcctttcgattcagaacataccattcttcatctgacatctctttgggcctagcatcatccccttcgatgggttttttgtgcaaatcttcacagtaaagataatcctccattctcattttccaagacacccaatttggattattaagtttaatcatgatattaccaacactataaccaaatattttctagacaactgaaaaaacaaaagaaaaaggaaaggataaaagatcagtactttgtttcgacgttacctcttacgaatttgaaaccaaaccccaccaccgtactggaacgcttccaaaagagatcatagaatttccagccccagaaatagtgagagcaaattacaaaatgttaaatatgaatgggccgggctgaaacttttaattgggcccaggcccaaaataccatctaatggcaatgcaaaatcgtggtctgtcagttattctcttcgtcgtctccatccactctccactactcttccctctaccttaactagttacttatgaccattgtcagaatttgtaagagatttctcattgttatggcttgattcgaccttgcagagaatgggaacgaattctagaaactgaatcaacaggtattcaatttcttttacggcatttctgttaaaaatttcgagcattctgtttcaaatacgattatatttatatatgatcaaagttaagtagcatatgaaacaaataaaacaaaaatagtgtcgcatactgtgttttaagtagcatgtttgttatgagattacttttctggatattttgatcatttctttttatattatttgagatgtttatctacatgaacagaatggatcctgctgagcaatctataaaaattgggggaaagaaacatcaatggactgcatttgaggattcaaagttagtggagtgtttattgtgtctaatcaataatgggaattggaaatccaacaatggtagtaccttcaagaatggctacctacagcaattagagaaattgttgcatgagaagattcctcgatgtgaacttaaagcacatccacatattgattctcgcatcaagatattgaaaaaaacaatgtcatgcaatttctgacatgttgggggattctgctaatagatttgaatggaatgcagaggaaaagtgtattgtgtctgacaaaaatgtgtttgatgaatgggttaaggttaatatatttatttgttgaattctttgtttaagtactttgacttctcatgtagttgtttcaatttttttttgtctttctatcta

SEQ ID NO: 308460 - DNA, 1386 bp, Cannabis indica
cgcctaagatagttagggtgttacatatttagtccctataaatagtggcataatctcactatgaaagggaacaaaagaattgattcagaaatacactcatgggagaaagtagtgatttaagagagaaaataactcacagatcaattgtaagagcttttgaaaggaagaacgctttattccttctctcaagtcaatacaattacaaggggagtaggctatttccattctcatggggccaaatctcgttaaaatctagtgttcactttactttactatttttactttcttttatttgtcttatttattcgctttttatttttgactcattgtcgttggctaaaagttaggtcaacagatagcatttaaaccttgacgatttgaccgttggtagacagggaacttcctcattgtgtggtgcacgactattgctaccctacttgtcgggctaaagacacgtattgtctaaaggtttcaccttgcaaagctggtgtatacacaacccattggacaaaatggagctacagagcacgtacaaacactaccaaggtttgacgccgggaataagatctgatttattgtcagaaggtatgcagccattgggtttcacttcgaatattgtataagagaattccaggaacatttagctaaggctttcccagtttatactaccctgctaccatccttgagcacttgtgacttctgttccttcttggtagcagttttactaatgaagatcacggagtcctttccgtctatgctagaggggagggcctccgaataacttttgattgtctacatgtacgcagtgtatacgtggcacaatcttattgtacacatagtacaatcttattagtaaatgtaattaattatttaaaaaaatatgaaaatgtattttaaaattaaaaataagtaaaaaaaattaatcattttaaaattaaaaaataatgaataatttcctttatttttccttcttttcttttcatttcacttcttttctgcttcttcttcttccacgagtgaacccttcaccttctcctccttaaccaagttggaacctgtcctcctccagaaccaggtgtgaacatgaacctcctccgctaagtgaaaagccccacaacacgcagcaaactcgaagtcccaaaacgcactactacaaattaagcttttagtgacactatatagtgacacacataaaagtgtgggtcactaaaaaattaaaagtagtttttagtgacacagaacatttgattgtgttgcggtggtataaggatgaaaacttattgtgtgtttgttgaattgtttaaattattaatttactataacagatggttagggtaatattataggggaaatgctgtccaattttttttagaattttatttgtta

SEQ ID NO: 308461 - DNA, 1875 bp, Cannabis indica
aagtagttattcaagatattttataaaattaataaattaaaaataatttataatataaaaaaataaaattaaagcaatatatttcataagtaatataaaattaaaaaaaaaaatacgacgtgtaacatattgtttaaattttatttttagtattattcaaaaaaaaaaaaaactttatttttagtatatcttaaaataaccacaactatacaaagtcctttaaaaaaaaaataataataaactaaaaaaattcttcaatgcagataaaggtatatcaaatttttaaggaattatatttttaatattatcttggtataaaatctattctttttttgttcatcctaaactctaagatccaaataaagagcaagtcaaagcaatatatgttttttttattatttttattgagtatttgactttgttttgtatggttccaattttctctatttctatattaatatatatatatataaatatatatataacaagtataataaaataaatcacgtataaaaacaaatttaggtttgtaagtagggctgaactcatttattataggatcaattcttgtttcagaatatttatttatcaaaatctttagttctgagatttgattgagtttgagaaaacaatgaataataataatatggaagaagagcaaagagcaaggcttttaccaaaacctgtttcatcatcaatcagtgaacaagtgaacacaacccatttgagaaaagacctgaacgaggatgatcatgatattgtttctgaagtgaagcagcagcttcaattggcaggtcccttgatatgtgttaatgtcttaacatattgtttacaggttatttcagtcatgtttgtgggtcatcttggggaattatcattagctggagcttctatggccacttcttttgcttcagtaactggtttcagcttgttggtaatttataagcctcattttccttatcttttatggctttaactttgttcatttcttttcttaaattagaaacctcatctgagttttgttccatttagagtattgcacatagaacactatgagtaattgaatgatatagaaattgctctatagaaataatatagttggtaatgcaatgctaacctacttaattttccttcctagatctctaaaatagaagatcaatagattaaccaaagaatacaactgtaacgaggcaatatgtatttattgagtttgagaaacctattcaaaagcttcggttaacttaaaaaactcacacttctgcttcaacttgactttacacaaatgctaaacatattaactattgatcgctaacaatatgaacaaaaatgataaaaaactattcatcaacccgtattttaacaaaacaatacaagcccaaataaaagtctaacagtacatgtatatatgtatatgatgatagttctctgtttgttagtgatagaagaaagtcttaacaccatttgatgaatacccttttgtccctttttcctggctgtgaatcatagccctgttttactattagatatttatttatgcaaaagaaggtaacaaaaacatgacaaattctgtatgtataggcctgaacatgccataatactatttaattgtgttttgatagattggaatggggagtgccttggaaactttctgtgggcagtcttatggagcaaaacaatatcacatgcttggtattcacatgcagagaggaatgattgttcttctagttgttagcattcccttggctattatatggttcaatgcaggccaaatccttttgtttttgggtcaagatccagagatatctgcagaggctggtcgctatgctcggttcatgataccgagcattttcgcttatgctgttactcaatgccaca

SEQ ID NO: 308462 - DNA, 2642 bp, Cannabis indica
cacaacctccccacttgaattccacactgctacactgatcccaattttatttctgctattgtccactgcagcatccacacttaatttaaataaaccttcagcaaaagactgactcactgaattttccaccatttggccttgaacctgaactggtgttgcactctaaccctcacggactgcaatacaatctcgagcttcataaaagtcatttaacaatgtattcacctgaaattcagcagtagacaagatatacttattcttattaaataaaaccatatttctcctgttccaaatttcccaaataatacataagaaaattcttagctcctccttagacaaaatatcaaaccccctaagaatatactctcttatatcataacatacatttattatgtaagtagaaagatttaaatcgagactcactccactccaaagaagccctggaacactctataagggcatgggaaactgtttcagcatgtccagaacaaagggaacaatgagaggagggaagaactttcctatgaaaaagattaagggcaacaagaagagcatgatagaaagccctccaaataaaatgtttaactttttgagggatcttaagattctagagggctttccaccaacgaatgaaagaatgattatcagaagaagtaggaagagaagcagagaacttagctaaatggtaagcagaattcacagtgaaggatcctgaagtatgacgctcccaaataaggctatccggaagagtaggatcaccaattgggacaacaagaatagctaagactaactcatgatcaaaaaattccaacaaccaatccttattccaacaaccattatcatcaataaaataagagagaaggatctgggggttgaacattacctttataagagatgaatctccaaccagggatccaataggagtgcataggggagatagtttcaccattgcctactttccacagaagacctcttttaagaagatcccttccccaaagtaaattttgccatgtaaaagaagcacaatgacctttgaatgcattaagaaaagaattgtgtctaaaatatttagctctaaatagtctgaacacaagagaatcaggcatcataagaatacgccatgcttgtttagcaagcaaagcttggttatgatgaacaaaagaacaaaaacccaacccaccagaaaatttagactaacacatattaccccaatttttccaatgaatcttccttttatctcccaccgacccgcaccaaaactgagccataagactttcaatctttctacagacagaccctgggattttaaagcaagacatagcataagaagggagagcttggaccactgctttaaggaggacttctttcccatcttttgaaaacaaacatctattccaactgttcaacttagaactcactttttgaacaagaaagttaaaatgagagcttttagacctaccaatacattgtggaatcccaaaatacttactcacaaaaggtttattatccaggcccaaattgttataaaaaaaaagtcagaatcagcaggattggtgttaggagaaaataaaacagaggatttcgagaagttaacatgttgtccagtggcttgatgataaagatctaaagcctatttaatagctaaacaagattgggtagaagtagtagtaaagagcagactgtcatctgcaaaaagaagatgagaaatagaaggggcaatacgacaaatagaaattccatgaaaattattaagagattcctgatatctaatagcagcagacaaaccttcagaaataagcaaaaaaaggtaaggagaaagggtttccttgtctaatgccacagctagacttgaaacaatcagacattacaccattaacaagcaatctaaaagaagcagtagagatgcatttaattacaagtgaaacaaaattaataggaaaataacaacgaagcataatattttgcacaaaattccactcaacttgatcaaaagccttttctatattcaactttattgtcgcccaaccaaccttaccagattttctatgattagtagcattaaggaattcattagcaataaaattattaccaaaaataactctattctggattaaagcactttgattcaaagaaaagatactattaggaacaccattcaaacgattagctaaaaccttagaaaccactttataaagagtagaacaaagactaataggcctaaaattcctaactttatttgcattctttttctttggaattaaaactactatagtttcattaattaaagaaagatcagcattattattcaaaacagaaagcacaacagcacacaaatcaaggcccaacatagaccaatttttttgataaaaaagcgcattcataccatcaaagcctggagctttatcaacaaccaactgaaagagggcctgcttgacttcatcagcagtaaaagccttattatcccattttttttactctgacgttgttgggttttatgccctaaataaaaccccatttcaatgtaatccagattattcaatatcaataaagtaacagaagtacatttcattcatttgtgtatattttggttcaccttatcaatagcttgtctatttgatttataaattcattcaaaccctttt

SEQ ID NO: 308463 - DNA, 761 bp, Cannabis indica
aaaaataataaaatgaaattaaccttatatatttatgtgtgtcttgcatataattaatgttaggccgtgtggacttttagtcatcacgagtttctttcaatcatcacttctttttatttattttttcaattattattattattattattataatatattattattattattatataaatagatatgatctttattattaaccctttttttttggtctaagatgcgtgcatgaaattattaattgcacttcgatactttcacgtgaaaatgcaaattttggttttgtttctcgatcaatcttttgagtttgacaataaatattcaagagttttctaaaagcagtctcttggttctatattttagtaattaaaataataattatattgttttagaaatatgtactatatatatttaccaaagagtcattttcaactgtttatataaacttttgttttttggttttggttgtccaaatatatatataaatatatatatatatatatatttatatactaaagaagcactttggtaattgttttgtttttcgatcttgaaatgatattgatgatgagtacgtagaataataagctcaaaccacttttcccaccacgaacccaccacataacattattattatataatgctgttcgatcacaaacacatcatctcttctaatatataaatatacatatatatatatatatatattagtaaaaagttacgtgctaggcacgtatactaaattttatgttaggtatttt

SEQ ID NO: 308464 - DNA, 1616 bp, Cannabis indica
aattactgacattgattgaaggtgccagagctaccccaaaggcttgagtgtaagcatcctccatattgataaaaccttgggacctttttaagaagtttgacaaagtttaagaccattgcctttgcaattcattccaatataaggatcctactgaaatccctaactgcaaggccactagcttcatgtcattattgacttttgtcttggcgactgcctttctcacccgttgggtataggccttgagcctctccccagattgttgcttgatgttggtaagtgagttgacctctatatcgaagtccttagcaactataaattgcttctagaacatggattgtaaatccttccaatttcggatagagtcagatgataaccttttccactagtcttctacaaatttggaaaatatcgaagagaagcacaaacaattcttgttatcacttacttgtgccacttgcattaaccttattttacttggacagataggccctggggtccgtcttgccttcatatgactccatttgtggtagccaattttttttggcaactgtgcctcaatgattctttttccacatggctctgattctcatctttcgagtcaaatacaactccactttattttagggccaactggtccgtgagttttgttaaagcgactatttggtcctctagctgcctggtgtgatcatttgggaggtcatgtccctagatcctatcattgatgtaatttcttaaattgcctccactaggccttgctttctcacccttcactttttctcatttcgcatccacacgatccctgaggtctgttgttgacatgctatcttctaggtctagatgtggcccatcatttcacatgactctgccttgtggattgatctgttgggctagccctgggccttgattgtccctttctttctacttggtttggtcaacttctcttctgttattctgtggaacattgtgtgtgggttttctcggagggtcgcccattacaccttttactttgtcatttaatggagcaaacgacctagctccaagatagttaaaatttttagcatgagggttttcttcagggagattatcctgtggttatagctgtgcaagggcttcttggatttgtctccaaaccacttcttgatcttctaacctctttttgagatgctaacatcttttgggtatcttcaagctcttattgtagtcatagtacttcaaggtcttgcttgtagtactcttcttcataatcctcgttgtgatttttattgtggccatcctcagggtcatccttatgaccttgctacatcatcatccatgagttccctgcagtgttggtcttctcagcttgggcggctacccacttcaaacgcttccctgtcccccgtgacacctgcctaagcgtttttttgggggatctggttctcatcgacattggctggattatccctacaatctcgagcaggtggtttgaccactacttttcgagttgcaaccattgttgtagatgaaaactatggcaaaactttctccaagctctcaatgaaagcactaaaatatttaccaagatttttggaaactgattataaaataaataagcttaagaaagaaataaattaaag

SEQ ID NO: 308465 - DNA, 870 bp, Cannabis indica
taataataataatatatatatatatatatagtagagagagagagagagagagagagagaggggaagcagggagggaactaaccatagctcgtggaagacatgaccgcaaatggagatagcttgaagatcttcaacaataggcttcagatcttcgtagcagattgagcaaatggttttcccaaaggcgttgttgccattggccatctctgttgtttgattttctccgtctggttctccgatgtgttgtagagtacgtcaacatagaaaatggagccaaattttcaaaatggggagggagagataacgaatcttggcgggattacacagaatgaaatatttttattattattattattattattttcaacttatcacactccatcaatggactggggatcctttgccttagaaatagaatcccacatcacttgtatgtggatttgatgaggtattacatcacatattaccattaaatctctagaattttggcaaatcattattttgtttttatttatttatatatttcttttaacaataataaatatcactcaaccatttaaaaaaaaagtgagtattatgaagaaacaacgttttggctttgatgatatctttaatatatttgtaaattgtataaagctggcttgaaacaagcacataaaaaggatttaaagtatcaaatagattttctttgtttatatatggttcaagtagttctcaaattgtttggttggtctatatagattataggcaaccgattttgtgcccatcttgtaaaattacggattgtattccgttgtactgtatagtgggtcctacgtactttattattttttaatattttttgtaaccggttgttctaagtttataaga

SEQ ID NO: 308466 - DNA, 1617 bp, Cannabis indica
aaaaaagtatagttttgaatgtatttcgaagaaattaatatatagtgtgatgtaaaagtttgatataaaataaagaaagtaaagttttgataatatattttaagggattgaatagctgagaaactaattatcttaattattttcaaaactaaagaataaactgcctttcacgaaaaagaaaaactaaacaatataaaggataaatactatttcggagcttgtatttatcacaattatagatttgattatttgttttattaaatgacgatctgtattttttaaaatagtattaccttgagctcaatttttgtcattttattaatataattaatctgaagccaaattctagcacgaacggatgaaaaaaaatgtaactagttaggtcaaaacattttcaggtcatgttattattaaattttattttgtactatcttgaaaaatacagagtaaattattattttaatacaatagaagatcacatcgataatttttacgaaataaagagtctgaaatactattatccaataataaactacatttttctaattagtgtaggtatcaaaatataatatttgtgtcgtgtaatattaatacatgtcaatttggacatcaactaattttttaatgaatcaacaaagatttcattaatccaacaataattttacaaacgaacagcatcttcaattcaatcgaaaaacctataaatatagccgctatacaagtatactttcaaattacacagttttccttgtacaaattagaaaattaatttgtatgtatagcactaacttttttaggccaaaagcaactaattcattatttaacatcatttttaatcttatttacaattaattttccctgacaatataccaaattctacactgcttcgtttctggcatgctaaatttggtaaaccagcgttgccattgcagcagaaaatactagcttaagaaatttgctacatttagctttttctatccaccgaattaagttgcgcagctacttcgagtcagccctccaagaaagccaaaccttcacttgctgaagataattaagagacaaagaacaacattcaaagaataaatgttctacagtttcattttgacagttgcagaaaacacattttccattaacaataatgtgaaacttcaacaacctatctttatctttagttctcaaacaattttgtatggcaatccacaacgcaaaattatgcttagacacattaagtcttccctagactttttggctccaacagaccttgttttgaattagacataacattttatatcctcgagaaatctagtaaatttctcttgtaaactgttgagtgtcagtgagttttttaagtttgtctttgacagtaatcaaccttccctattaccaactcccatgagtactagaggtgtttattggatcacatctaatgggtttagacctaacccaaccgatccgatccaattagttattggatattaaattttgtgatctgatccaatccaatcgaattgagtcatccgatccgatccgatccaatagatgtattggattggatcggttgcaaccattggatgtattgactggtttttttattggattggattggatctatccaat

SEQ ID NO: 308467 - DNA, 1429 bp, Cannabis indica
tcccgaactgcatatgccatgtattcatctctgcatatgctattccaaagatctccttgtgtatctttacaatccatggctaaatcaatagccaacgaaatctaatgcaaagaaaacaaaaatgacgtccgagtatgggactgaaatgtgtagtcataatctttgccaagtaaaatcagattaaacttccaccttactactgagaaggaacaaaggccactgcactaatccaagacttcctgcgttgcttggacaagaaagcaagtccatctccctgaataatgcatagaaatcattaagaatccatcatataatcacaaaacataaacacggttttataaaaataaaaaaacataaaacataaacacgatcagtacccatatttttagtctttgataaaaattgaaatttgtttacctattactaatataatcttcttcacgcaaacttttgataatttcattccaaaatggagaaaacatcgcagcatatttcttgtccgtatcctgagagtcctgaatagaccaagtaataattacagctcgagctcattttgtaattcagaacaagaagcagcagatagtcaagtgatacaagtaaactatccaagccacaaaaaacagaagaatacagatacctcctagaaatctgaagtactgcatgctatagcaagaaataaatttaagaatctcacctgagataattgtctgttgaagggcagcctaaaagagcaaacattgaacaatacaattaataaaattattaggtaacaattaagtagttccaaaactctttctgttaatcacctttttgtttgtggatagacaagattctttacaaaggcttctggaaaactttcaaaacgcttacgcaccatttccattgagcgtatctgaaacaaaccaacaaacaagatgttggaaagtcattttaatttattatatgataaatagtcgatttttggctaacctgtgaatgagaaattgatagcataaatgtgttctattgatagctgctaataaatgcatatttgattaaggatgcaatcaccatattaatattctaattaatatcagaaattgtggaaattgatcctctaaaccaacttattatccaactcatttaaaccaactaacttaactaactttgggttgtgttagttagttagttggtgatccttgtttgagttgggggtatatatataagtctagtatttttattttagaaaggtgagagaacagaaggtagaagagagagaataagagagaggattgaagagagaattgcttagggttctaagctgagagttctgttcttgaagagggtcaagaacaaaggggtgtacacgggttgatagagagaaaactgtgactgttttctctggtgtgtatcgagtgccatctaagctgtgattgctctggttattgta

SEQ ID NO: 308468 - DNA, 1589 bp, Cannabis indica
atctaaggtagaaggtgagtaactctcattttcaatttcatccatttttttgaccttcaaaatacaaaacctatatgcaaacacatcacattaagcatcctaaatgcattaataatcgtataagtaatacaagtggagtggcaaacaagaaaaaatacagccaaaaattataatcaacggcattctttcattattgtgtaaacctatattactcaaaccatgacacaaagtatagccaatttagagaacaacccatcttcaaattcaaatataaaaatccttacaaacaaactaagcaagtaccttatttcgcctaactttgtgagagctcttccgagatgttcttcgaagctctgcactgcattttaagactaaacaatcataatccaaacatttgaaaagggggtaaaacagtttgtataaagagtggcatacatatttcatttccaaaataattcatacttttcaaatcaaacatgtattttttcaagacataaaaaactgaaacgttcaagaaagaatttctcatttaataagaaaaaaaaatctggtatcagtcatcaccaaaaaagaatcaaaaattggaatctactctacaaaaaattgttgtgttcattcctcttaaagagaatcctacaaaagagttcattttcatggacaagggtttaagcccattaaatttattcgcaaaccaaatgcagaaaatattatatgcgtagaagtataaatcaaaacataaaacacctagtagcgataaatggtagagaatcagcaaagtgagtttggggattttgggtaagaacaagatgataaacaagtgagaagcctacatatatgggtgagactagtaacaaaacagaaccatatctacaaccaaacccaactgatagaactataatgacaacaagtttgatttcatgagaaatatcctactgcaatggaaacgtagataggattaagattgtggaccattaacacattcacagagattgaggtttcaagaacgaagcacaaacctattgacaatggcagagcttttcagggacgaagacaacagtggtggcggaggattttttttggatttgggggtaagggttttggaggtaaaatctggctattttttttttttttgaaaattagagtatatataaataaaattagaacaccccattattataaattgggtatattgcgtaaaacccctaatactattattttacttgcaattaactttcaaaattaatttcttgcggtaaaactcctaaaaccacgataacgttagcaatttacagttttcatccaaatttagctgttaaatgccatgttggattatctacgtgaacataatgtatttttttttcctttttctttctttttcgttcgtttttattttccagttctcgttacacttcttctctctcaaatggatgcaagtacatgctagggccgtcgtcgttgccgaggaccattaagccagctccgtcgtcgttgccgaggaccactaagccagcactgtcatcgtcgtcattgcagaccgacctaggcagggccggccctgaaaatatatgggcccaagacgaaataaattt

SEQ ID NO: 308469 - DNA, 1444 bp, Cannabis indica
ttaacaatgaatgtgatccttatgtaaccgattggacgcctgctttgtatataaaggggtgatccaccatgaaatggcacctacgaatcctttgctacagtggactaagcagaacacaatctgactgaaccactataattctttgtcttattgatattttccagctttgttgattgttctcacattcccagtcgagtactcgccattctaggtcgaatactcgcacttgtcgtttctctgaaaattctcttttatattaattaaataatatattttggtgttgcgaaattcactcgacaacagttatcgttaagtgtatattaattttttaatcattgttttaacacttgttatgtcaatatcacgttaaaatggaatggaagtgtaacataaaattaaattgtaagaaatgaaattaatgttcatagtttttgacataacttgaaaattaattttgaaagagaataatgaacaagtagtcgaagtaattattttggaacaagtgttttgttgatagagaattcggtacatacgcatctgtgaactcattatccgtctccattccttgttgattgttgcttgtttcaactccttgagaagcgttgttttggttgttacggtttggacacctagtcatgggttgaggagcaacacacgtgacaatgactcgagtttcttgggacatgttctccacttactccttctctagcattacatgtgccttttgttatcacaacttcagggtctcttaaaatgttagggttttcccggtacctaccaggttgtggcgtgtttcctttcgggttggagctcaacttgaagtcctcctttaaatatgttgttagtcttgctatttcttcctttgcttgttaaaataagctttcaaatatggcagcatagaaattcatagtgtttgtttgtatgtctagagactcgtaccttgatagctcataaaggctttcttgttgtggtgttgattggttgaattgtaggtgtacacatgccttggcaagcatgctccatctcttcatgagtagtgaacttgggatcttcctgatgtctagtcgattcagggttgcctatatgtgtctacacgagatcccttgactctcaaacatcatacaactgcattgtaaggtcgtttgaggttgtgaataataaacttgatatttgttctgaaaattggaattttccaatcatgaacaccctctactcatcttgttcctgctcgccacagataaagtaatcattttcaagatctaattattacacagctttttagtacatgtttcttgtgtataattttgcacattgttcatattacataatcaataatcttgcgtgagatcgtggttatggtgaaaagaaaaatgttttatattttgaattaaggggcattataaccaaatttaaagcgaaagtaatcttcatattcatgtcttag

SEQ ID NO: 308470 - DNA, 1987 bp, Cannabis indica
gtcattaatatatatgtatctacagttaatttttttaatcttctaaaacgatatttacatatagtgaaattgaaacatgttgtttttcttcaagtttggtaggtacaataatgcaatttatattgtgtcttagtctattactgatgcaatttcaaagcgcgcacgtacgactggaaccaaataatgtataatatatagtcaatctgctgcaaagagggatttctttccctacatgctcttactattttttttcttttattttaatggaaaggcactttgctccacatgtttggaaaatgtataaataaatattaattgataaattttaccctactgttgttttttttttaaaaaaaaaaatactcagagaaacttcattaaacagataaaatagtgatgatcacattggattcacctcccaaaacttcaaaaaactagaaaaaacattagatagactccatttggcaataatatgggcagctacattagaatctataggaaatcaatgcacgttgcagtcaacactgagctaaggaacatagacaaggaagaggcaatagaccagctcatcaacccatttagctaataataaaatctccttaggcttgtaaggaaatttctaatgttaatccttaaatataaactagctcatcaatctatttagggccagtttagtactgtaaggaaaatagagttatacctgtattgtgaggaaaatagtgtggaaaaaattagattgagtgtttgataaattataaaatatattataaattagtatattaatgtattataattacaatgaattattaatattttaattataatgataataataagtattttataaattaatgtattataattataaatatataaaacttatgcacaattttattttttatgttgttatttgttattgtttgtcttctaaaatatgaatttacatgtatttagtattttttaaattattattatttttttttgaaatagaaattttattactaaacaacactaggcacatctgctattaaaaaagcagcagcacaagaaggtaaactatcagtccatacttcgcacttttgagtcatacgactccacttagctaaactgttagcaactttattacaatttctggtaaaaaataaaaaatgaatcgactgaaaatgggtcttcaattgaatgattgtttgcaccaaatgcccccaatcggttggagaagaagcaccattaataatagcagaaatcattgttttgctgtccgaggctacccacacgtttgagatggaccatttaatggctagcttaagtcccaaaagaatagcagcagcttcggctaagttgacagccatacaaccaggtgtgtatacagtttcagcaacaattaatccgccagcttcgttacgaattatcgcacttattccacagccttcctgcccgtgaaccagtgaagcatccgtattgattatgaaaaaatccttgggagggggctgccagagaataataggctttgaaggaggagggcctggactggttttttgctgtcccaattgatgttctatggtctctatcaaggaatccaaaagttaatgtccgggtccctatgttgaaaaatgaactggtttcgtcgttgccaaatcaaccaagtataacccacaaaacggatgaactcctcctttgagagatgttcccattgccaccaaaggaaggccgaggcattaaggccaatgagatctgtaaacttggaataacccagttgcttccatattttttgaaccttaggacagccccataatgcatgaggtatatcctcctcttgttgcaagcacctgtcacagttggctaataaagacattcctctctttctcaattgcatcttagttgggatccaatggttaaacactttccaaatgaaatttttcattttcggagttaatcttgacccccaaatgaacttccaccatgcttttaatttggagttgttagaaca

SEQ ID NO: 308471 - DNA, 2893 bp, Cannabis indica
aaaaataaaaacaaaaaatattacagtagaccacataagtgtatatacacgtttataaatgtaaaaaaaagaaaaaaagaagaatttgataacttctgcttaaaaaaaataaagtaataaacaaatatggtagcttatatatgtgggtttaattaaacaatttaatgatcatcagattcatataagaacattggtaatatagtgtttaaatatagctcaaattggaagaaacttgatccaatagcatgtgctgccaaaaacttcaatttgatacatttcccaacatatgatctaaaagtacttttgttgaaaacttgaaatgcctaagcataaaaattagtcaagaaaaaagccaatacacaaaaacataagctctttgagcgatcatctatacataaaagagagtgatcatcattatgatcaccattcaactgaaatcttaaaacacacgcagtaaaccgactttttattatttaacttacttattaaaaaacaaaaggcttccaagttccaactccaactcattctctccaatgaatatatatagagtattgctattgggtaccagtgacgcctagtacccttaaggcatgtcgccttgtgattagttagcgatactctttaaaagctattatattaaactatatgggacccgatacttaattagaccaatagcgatattgacacgtaggaaggtgcttaacactagtggtaccttttaacatttctgtaaaaatatatttatatatatatatatctcatgtcttgtcggatagtgtatataaataattaatcatcaataatatagatatataacaatgtaaataaaatgtgtttttaggataagaaattggttgcgtggttgttagtaatggtatttttttatacttagtcaaagttataggtaatcaaatccacatttttaataattttgggtttataaaagtaataatagtaattgggctggtgacccacgcagggctaagcatgcaaagtgttacgcacagtaggcatggagaaataatagcaggtaaagctactgaaaaagttctaacaattatatatcattattgggtatgataataattaattgaaaatgttactctctctatatatgaaaatagtacatgaatgtaattaataaaacttttttcctaataacttcttcttgacaatgtgtgaaatcattagtccacaccactccattctggtgccaaacttataaaattattatctctttttctgtttgtttcatgcgaatataatagtatatatagggctcgtttgtaatgttgtattgtatggtattatattgtgttggattgtgttgtattgtattgtattgaatctttttaatacaatactgtttggtattaacttttttttaataagttgtgtaaagttataatatattttcaatacactcgaccccaacaccaactacgggtccaggtccggggactaggtttgggttccgggtccgggtcccaagtctgggtcccgggtcaacgtccggggcccaggtttaggtccgggttcgggtcccgggtctcatgttggggtcccgaatctaggtctcagtctgggttcgggtcccgagtccaggtccgggttcgggtctcgggtctcaggtcagggtccgggtctgggtcccgggtttgggtccgagttcgagttccggtcccggtcccgggtccgggtgtgggtctcgagtctgggtttgggtccgggtccgggtccgggtccgggtccgggtccgggtcctaggtcccgatctggtcccgggttcgagtccaggtttggggtccaggtttgagtccgggtttggggtccaggtttgagtctgggtccaagtctgggtcccgggtcccgagtcagggtccgggtttgagttcgaatctgggtctgggtttgggtccgggtcccagtcttggtccgggtcccgagtttgggttcgggttcgggtttaggtcccgagtccgggttcgggtcgaagactggtgttgaccccgaatcctttgtaaatattataatacaagctaatacggacaatttgttatgtattaaataatacaacatacattgtattaaaaattttagttgtaataattaatacaatacattactttatctaaacatagtgttatctattatttaatacaatacaacccttatacggcgtaccaattaaacgagcccataaagcatctctaggtacaaccattcctattagtattagtacctttaggtgcttaacattatattaatgtggcgcgttataagtaggatttcatatattatttatttatttaaaatgtgtggaatacaacattaataattgtatcaacactacagcaaaaagagctttttattctggtttttaggggtattttatcccaatttttgttaaaataaaaaccaggatatatgccagtgagacaaaaggtcttatagaaaccaggataaaaagatattttttttatttttatctcgatttttatgtaaaaattgggattaaatgtcaaaaaataaatatcaaaaaaaaaaaataaaaaaaatataacaaaaaataatcagacctaaaagcttattatcaatccattatttacattatttattcatatgttttttagataaaagaaaattattactttacaattttttttttccgtttataacatatacaaattaatacagtaaaattcaaaataatcatgactacgtacaataaaaaccacaaacactcaacaaccacgaaccaccgtcgacgccacaataagtaaaacaatatcaacccctcaatatatttttgtatcgtgagtttagatacaacttgatttatctttttgtagtgttacattatttttttttatatagaatttgttgttacaac

SEQ ID NO: 308472 - DNA, 2041 bp, Cannabis indica
tttatgaataattttatgaagttttatgaaacttaatgtgctaaataaaatatttaacctatcttaatgtttgaatatttttcttaaaaaattctagcactatatatgaaatttatgtatagcatataaatcatacaaatactaaattaactgtactaacaataaatttgtcaaataaaattaattaaatgcaaattcctaaatatgtaattaatggaagatttcttaaaatttattaatttagacaataaattacataaatttgataatatataataaatccacaattataaaaattagtacgattattacatgcctaaagaaatcatgtaataaactatcaaattaaaaaaatttcacatttaatttataccaaataacatataaattctaaatatatgtattaaataaaaatagaaaaattgaatacatgtaatttattgactaaaataacacaaattaagaatataattaatatatcaaataaataataaaatttttacaaaaaagaaattttttcttttatttttttttgaaaaatttcaccgccttaaacgacatgtcgtttttcatgaggagaagactgttttaaaacaataaaaaatgacacctcgtttatgagccttcaacaacctccagccaggtcgaaaatgatccaattttctcccgtggttccgacgggcccgacccaaaacccaatcgtaaaaaagaattttgacgacgaaattgcatgttttttaaatctaaaattttctatatacaataataaagagatccatatagattttatgcaacaaagatacgaaaaaaggggactttactttcataaaattaagatgggtccgaaaaaagttttatagagaattttttacatttctaagtttttcaaaaagttttctcatgcttagattgatatccagtgtcatataaacgtggtgatgtatataagtttcgaaataaacaccacaaaataaaaatcaaaaaattcaactaacggaccaaaaactaaacttttatatttatatatatattcgtatatacatattaaactatataaaaatattataaatatatataataaattataataatcaattatatagaataaaattaataatggaatgaatataatatataaatatatataagaaaatatatatattctaaatgtatatatataatatgaataaatataaaagtatatatataaagagaatatttgaatatgaatatatataaatagaataattctgaataagtattatctattaatgggtactgaacaaatttaactataaatattaattttaaaaatattaaaccattagattttggtccgatagggaataataaaaaagaaatttgaatttctatgctcaacttagctacttaattaaaaaaaattatcaaaaactaactcttttagtttttacactatattatatttatatgaaaaatatttaagtcaaatttaactttttttatcacttttttgccgaaagcttttttttattttttttttccagctgatgggtcaatcccaacccataaaatgtaaaaaatgagaaatttttctaattaaatagaaaaattaatcataaaaactcaaaattttctagtattacccattcatgggtaatacccattaagaatgcgcccatatttatagaatttaaatcataaacaaaaatattcagacacaccgtgtatacataatatatatacaaatgaaactcaaatataaatcaagacagagattaaaacggttctgatgctaagttttagacaaaaaatcatatgaaaatgaagcatatatgaacgttatgtaaagtgaaataactacagacatatcgaaatcttatatgcaatgaaaggaccgaaacacgtctacccttgatgtttgagctttaatccctgtgatagcgtcagtataggaattcgggcttcctcgctttctcaattctctttagatagaattttactgtttgcacagaatgagagaagaacttgggaccgagaccctatatttataggtgagata

SEQ ID NO: 308473 - DNA, 1439 bp, Cannabis indica
gagaatattgtgaggggtattttgaaaaaaaagaatagtttttaggttttaaattttggtttagggaaaattttttttgattttctaagtatagtacttagaaaatcaaatttcccttttaaaaggtgttattatatcattggtgtgtttttaaaaataaaggtgccaaaaatgatgtaaaagaaaataaaataaaatattatatatttgaatgatgtgtagatatataacattttcaaaaatgctattattggagatactcttaaaaactatttatttggtatttattggtactgatgtggcatgtcaggtcatatcatgtgtgtaattcacttaaataattttattaattaatttgttatttttaattacttttagtttattgaactttttaataattatttaattcataattaattttaaattgtatttatacaagtagagatgacatggcaatgccacattagcccttatagttccaattcaattttttgctagctaggggcatcttcaatgaaagaaaatctgttgtctttaaattagtgtattttctctattctgttaattattttaatatacattatttatacttatttaacatataataaattatttattaacaaattctaaatctaaattaatacatataaataggtatagataatattagtagagacaaaagagagcacagggtctttcaaaaaaaaaaaaaacagagagagagcagagggactggagattcttttcatctcaacgggtcaatgtttttgttgttcaaatgtacccacttcactaacttttaaatttttagtcaattatagaaattttcttaattaaaaattaaaatagtaaggatcacaggtgctttgttttagaccacatgttttatctttctttttaatgccacatcatctagggtggcccactaattttgttggcagcaactgcagttaatagaaagaacataactcagtaagaaaaataattaattatgagagattttttacaagcaaataaaaaattcaacatagtattgttcatgaagataaatcttatttgttctatatataatatatatgtttgttatataagttataagttaactagaacagaaagctatcacatgtgacaaagctatggttgttaaggtttcgtcatttcctagcaaccaattagtgttctcacgtggaaaaaaaaatataaggaaattaacgttgtgttctcactacttgttctattataaactatacagtatagtatagtatagtatagtatagtataatttttaagttagtgaaaattacaagatctaccactcctcctaaaaaaaatactataaatagaagtaaatctctcatgtatatccagagtaaactagctatcgaaacaaacatatataacactcctctccaatttagtttcttacaaaaaaaaaaaaa

SEQ ID NO: 308474 - DNA, 1356 bp, Cannabis indica
ttgatgttgaataaaatagattacattgaaatggagttttatttaggacataaaacccaacaggagtgaccatcaaaggggttgaggaggaaatttattgaggaaaaaaatccttctaaatctaagcaacaagactcatgtctcattgttctaagacttaactaaattttctaatgattcccacactatgagcatgagctatagtgaaggataaaccaaaggaatatacgataagagaaaatttcatcaaggcaagaacgcctctgagaggtaggtaaatatacaacaggtacgataggtaccagtagtgaaaacaccacttgtcccactcggagtacaaactgacactcgacacccacttctccactacccttctgacgtgctgatcttcatggtacagacagagttttttcccctaaattttgggaccacctgtattttggagccattagagctccctataaatacccttctctttcattgaagaggaggttggaaaattaccatttgcaagagaacttagatattcaacataacatgaatttactccattgatgctcttaacttctcttaagtttttcattgttatccttacatttgattttctaactaaagtttagttgacaagttcttaccatcaacaactggccttacaaaaccaaaactagtgatattggctgtacaaaacaaaaactagtcatactagccatacaaaattaaaaacaaaccatacaaacaaaacaaaaccaatacataccattctcaattatagtagttgttatacccatatttcaaacagtaaatagcagctcatgacacgtgtaaaacaaagggaataaattaactcggtgaattcaagaggaggtataatagcatcctcgcaatatgaagctcatgcacattcttctcggagtaaactgatatctacaacattaaatgcgaagacactcaacatgttcctaaggatgctaagcttgtcatggcatttaggaatattcctggtgttgacattgttaacgatgagaggcttaatttgctcctattcatcacctcggaaatacaattagtatgttatccgaggaatatgtacccgaggcatgcatccaaaggttgatgaatctcccaagaaccctcaatcaaaacaatcaagttcctcgatcaccatacgttatagagaataaagatcaagtcaaatttgacagttatattatttaaaataaaagcaattccatgttatttcatattagataaaatatatgaaacatgggaaatgcccatgtttcataaactgttgtttagattagataaaataattgttatcctactcctataaatagcagtgatcacattgtaaaa

SEQ ID NO: 308475 - DNA, 1422 bp, Cannabis indica
aaaacggaagtgttattatttaccaatcgtaaagcgacacctctaaataatgttaggtattattggtgtccaatagaatgctctttagatatatgattttgatgtacttaccacctaggagaacacaaatataacaagcatagttattcgttactaaaacgaaataagtctcactcaaatttaagctccaaaatggcttatcatgatttcacaagatgattttcatcattgcccacattgttatttcctttatggtttattttacatgatgtagttatctacttactcgtattttatttgtgatagtttcactttttgtacatcatttaagcaactttgttttgctctgcaataatgttttttttttccttcttttttggggtcaaatagccaaaggtggtgggactaacaggtgctatagcttttgcaaatccaaattctcctgtttatccacgtttagcacaaggaaaaatgtggaacgaagtaagtttgctttgtttttaaattttgtttagtaggtgcgtatatcataaatgggacatgtcacttatttggacttacatgtataaaagatgtcatctctcgtttaactaatctaaatgttaagcactttaacggcaagctttcccctttaatattttagtgtagttttgttctattatgggttgttttgttgaatgagaggaatgcatattaggattttcaaaggagctgactctctttacttgatacttagatgacagtaacatggacaagtggatatgggattgatgaagctgagccatttgttgaatggggtaaaaaaggaggagaccacgtgagatcccctgctgggacattgacctttgaccgtaacagcatgtgtggtgtgtaaacttttcttcattgctagatacttacatttggtattgtttaagttatataggtgcatgactgtatgaataagaacaaagtcattgatattagagaaacggagtaatatgcataaattacagtattttcaattttttgataggtaattcaaataggcaagaaaaatttgcaatgttcttatagaactgtcagtgaatatttttcttcttgtattgatcatcctgaaaaaccttccaagcaatgataacatttcttgttatccgttgtatacatgcaggtgcgccagcaagaacagttggatggcgagatcctggatttatacacacaagttttctcaaggaactgtggcctaatacaatgtattgtgttcatttctaacatagtttttgtatgggagcattctaggttcccatattttattttcttttatatatttagtattgaagtcaaatttcacagaagattaacaattggtttaggtttaagtttttcatagaaagattttcctcattttttttcggtggggggggggtggggggggtggggtta

SEQ ID NO: 308476 - DNA, 1672 bp, Cannabis indica
ttcattcttcatcttcctcatctccatctccaccagaagccttcttagcaactgctttctggttctttcgcttcacttggatagggcagccacctctaaagggacttgtgatagagaagtcaatgagcttttgagagtcaattctcaccataaatgatggaatattgagtacctacctcctaaccctgagaaaagcaaaagtaactagtatgtgtaagatttattattatgtattatgaatgaaaatgcaactaactgaaacacataattaatttcaagattcaataaaccatttcattctaagagaaaaaataaccatcattctaagttaataataatttatataaaagtaagattttcttacacatggaagcctcagtgacatagaccactaactacagtaatacaataattatatgcaatccacaaaatataaagcacacaaaaaaagttttataaggcaacaattttttctaaaattatcacaataaaaaaagaataataataataataatccctttaacctaatacaacttcacttgttctgaattagacaagtatttaggatagaagaaacaaagcaatatatgaaaaaacataaatggatggtgaaatagatacataatgtttctttttcctgatgagaactcgagcatcgtggatagacttagccatgctagacttgaaaaacgtttgagatcccttgattaattcctgggcaagcacatgcttcaaactttttggggcacaagggcgtaatttgtccattgtcgttgatacaatggttgccaaacacagagagaatagtcaattcaatcaatcctattcatccatggtgttgtaacaaaattaaaataaagtagagcactacccgggtttaacatttcatatcaacctaataattgcattagtaaacatgaaaaatagagtagctattgtatcagtttagtttaatactattatatctttctgtatctcctatagattaggaataaattattttcttttgtattaacatggaaaaacattaacttcatttttatactcaatcatcaattataaaatcctacgtttgctaggagttagctaaataattcaacaccataagaaataactaccattggcaaaagaaatctacattgacaatacagagacacaactaatggaagcttgcctcaaaaatctagtccaacccaaccaaaggcccatcgaacaatactaataatagttaaaaaaaaactaacaatgtcaaaataaatatcattttataacagaatagttacataatgctatatatgcaaatatacaaaaagcacacatatataatagttgcatatatacacatacataccattaagaatagtgtttccaccaaaatagaggactccctctttacagttaacagctccaatgagctagaaccagaagaaagcaaaatagagaaaacagagcaattgtattgaatgatcaaaccattacaagacaccaatgtttgctacttataccaagtaacagagaagcaaaaagatacaacaaactaactaaaagtgacaactaagctaaccaacatttaactaacatcctaactgaatcccaactaactcacaactaactttaactaatcttgatactccccctcaagatcgagaaaatatgttcttcaatcccatct

SEQ ID NO: 308477 - DNA, 832 bp, Cannabis indica
tttttttttttttttatagatttgatcacaaatttcattgtattttgttttagtgtgtttttttcctcttatttttatagtaaaactccacacaaatttacactttttctaaacaagttcaaattaaaacacacataaggttatatttgtaaattattaattaaatatagaaaggtgcatgaggggaaaaaaatagaaaaggtatggtaatagaagcattattttatttttctcatgttttttgaagtctaagcaaaatcacctttccaatcaattacaaagtcacattctaattcttttgggtcaataatcaacaataaaactcaagacaaagaaaatgagaggaattaggagaagaaagaataacctattcccaaccccctccacaaaatatatataaatataattaaatataattataacggtttaatctaacattttaacttgaattgagtttaatctaggtaattaactaataattaaatataattataacggtttatttttatgtccttgtgaaaaggagcaatataagggtgttttagtccatatatgagtaaaagagtataatatttgtagttatatgatttattttatgtgtaatattaataatgtgattgttatgtttgtattttattattacatctattataataaataagtcttatgaggcaaggcaaggaaggtgagataagggttttctatcttcaatgtgagagagatatctaccaaatcaagcaaaaaaaagtttgccaccctcaaactcaattagagtttggtgatgaagaaaacttcaatctcactccattttttttttttttttttttagttt

SEQ ID NO: 308478 - DNA, 1289 bp, Cannabis indica
ctgaccggcacacctgagcacggaacaagataagatagcataataacgtatatatgaatatatgcttgtttttactatttacactactaacacttattgtttatgtgattttaagggtgttagtatagtgtaaaatagcataaaaaaactattttttttaaaaaatttaaaaaaggccaattccaatgcaaatatttttttttatcaatttttgatacattttaaattttattccatgtcattgttatttctacttttattcttatattttcataataaattccaggcttctttaaaaaataagttgaaataagctggagtgatgctagtcaatcagctatctaacatgtttagaagttgttaagatgtagctcactttaaatccaatatagaccattgaagaaataataaaaacaaatacaaaaatattaaaacacataaattaacaaactacccacctcataagaggctgaggggggaagattgtttggaattaacataattattaatggtttaccttttttggtattttaaattaaaaacaggtgagaagcacaaatagtctattccatattttaagaggaacacaagaattgtgttgatgtgtcttatggctttgaaactttacaaagtaacaaactaaactagtactacttttaccatatttaaacctactcatccattcctttgttttgtacaaattaacttttatatcattgcacattctttgcacctcttttaggatcaactttttattaaagacactcaagttttcaggtcctttatagcttttatagataaacctcaaaagtaggtgatcctttttagtgattgcaggaaattttgatgatgaaagggttatttgaggagcaagagcaaccatctcctgacctgtcgaattatgcatcgacaagtggtgaatgtaaagatgatcaagaaatgggaactgatcatcatgccatgtcaaaaagtgttgtgttgaatagccctacctttagctgcttatcaaggggaatggatgcaaatttcgcacgtgcggtaagaatttaagaactaatatataatatgaccgttttattagccttaaattaatgaaaaaaaaatcagctgttcctatttttcctatcctactcctgccctccaataaaggattgacacttaattcatttttttttttttgaaaaaattgatgcctgttaggtatcatttattctcaagatcttcaccaacataattaagggtaaatactattttgaaccctgtgttttgcaaaagttacagattggacc

SEQ ID NO: 308479 - DNA, 3104 bp, Cannabis indica
tgtaataatatctactaataatttttaaatgtttttttttataatttttataatatttaagcaattaatattatgtggattactaaaagttgttatgtctaggtatgtcatgagtgttttcttgctcccaattgatgtgtctaaagattaggaaggaattatgagtaagttttggtgacattcaaattcttctcatggcgatagtattcactagatgagttgggaaagaatgagtagacataaaactatgggtggaatggactttcgtaatcttcgtgactttaatttggcaatattgggaaagcaagggtgcatggcgtttactgacaaaaccaaatattttggtgagtaggttatataaggctcgttattttctcagtggtaattttctttcagcatcccttgggaataatccaagttttgtgtgaaagagtgtcttcgaatcgcaagagcttctcaagtctggggttcgttgggcaataggttctggtgtgaaggttgatattttgcatcagtcatggcttctggatgatgtgtgtccttttgttacttcagatgctcaatgtttggtgggccataagatgaacttgctgatgtgtactaataagagggaatgggatttagatatcattaaagatctttttaacgagcgtgatcaacaacatattttggcgtggttccattgaatctgaatgtagctaatgatcattttttttttggtctaaggagcatcatagtttctactcggtgcatagtgcatacaagatactagctcaaaaaaaaattggattgcagttgattcttctggatggtgcaagctctggaatttgaaggtaccaccgaaagttctcaatttggtatggcgggctgcttcaaattgtttgtcaccttgactcaattagtggttagagggtctgagttcaaattatgtcaaaaaggtgaggaaactattttccatatgcttatttcatgttcattcgttgctcaatgctggcaaatagttttggttagagttaggccgattgttgctgctaattttagcagctggtttgatcaaattttgtgaaggtgcagtaagaaaagtgtggggaggttgttatgttatgttggaggttatgaaaggctcaaaacgagctggtttagaaccaaaagtatgttacggtggatggtgttattatctcatctatgacttgtcgtgtgcaatggaagtcatcccaaaatagaggttcagaggcttctttttcagtttttgaagctggtgatggagcagaattttgggttaagtcgtaggagaatacaatcaaggtaacttttgatgtcaccattttttgtgatcgagcaacatttggttatggcatagtcgctcaagactctcaataagaattagtgatgactaagtcgggcagttttggtagtatatgcgctctagatttggctaaagcatttggtataaaggaaggactaagttggattaaaactcaaccatggaaaaaagtggagatggagtcagatttcttggtagcagtccaagctattcgaaatttattacctatgtttttttcttttagggttattatagatgattgacgtaaatttatagtatctttaaataatattttcttattttttattaaacgattggctaacgtggttgctcatagtcttgctagagcatcttaatctatatcaaatcgagtatttaataggggtgatgttcttgttgaggtacagttttctcttttggatgatttgataaattaataaaaattctatatttgttttttttttaaaaaaaaggttgttatgtttactattgtatatatttgagcagttcacctatctatgtaatagaaaatttttaagagaaaagtaaataacaaaatagaactcaagtgtaacaaagtgtaacaaattaatatagtataattgaggtagtattactgttaaaatctcttataaaaatgaaaaatataaaaaggtttagctattaattaatttttagagtagtgtgtggaaagaaaaaagaatagtatattgcacttttatatttggaacttgtctttatttagtgctatgtctcttatattatttgttctccccacttcataaagaatgtattaatagtttcatagtgtggtgtaaaatggtagtgcttatatgtggaaaaattccaaacccacatataaatataagttaaaatacttttataaaaattatatataaatacatatagataacaataataataaaaaaaaattgatgaataagattacaataaaattactacatatagttattttttatatcttacacataagttagatgtaattctattttttttattacttgatgatatacatgaatgaactcatatagagatgaatggcctttaaaaaaaataagaaaagaaatatatatattttgattaattacgatatatatttataaataaaggtgacaaatataaatataataataattttaacatatatacttaatagttgttttacacatattatagaggttaaagattgtaaatctgtcactgataatataatgtagctaaacagatctttcataaatttttcaaaaatcataattaataattatatttaggataattaaatcatgattgaaattatttattgtatggatatacatgtataaatatcaaattcaaataaacacgtgtacaattagctgtttaaaaattttaattttagcatcctaaattatatgtaattctctaaaaatttatgagaggttcctatattatagaatattatgtaatatatctatcatatattaaatatgaatatacaataaaggtattattcttttttaaataaaaacattacaatttaaatttaaactcaatacacatatttcttttatcttttactttatattaaatgtgtctatacaatataaagttttttaaaatattacaattcaaatctaattattattattttttttaaatatatttattctatataaaatgtggctatataacagaattcttggtttatgagaaattattaggtgacctttttttcaaataaaaaaataacaaattattagatgttgccacggtcagcatc

SEQ ID NO: 308480 - DNA, 3988 bp, Cannabis indica
gggcataaaacccaacacaaaatacctctccgctgctgcatttcatcacaggacttattctagtcattagttccctgcttcatttgtccttttgtcatgacagtttgctgtttcttcttccaagtcacatgtttgcctttgttacaattagcaactgtgtgccccaagagagcacaagctttgcattttgatggtaaccattcatattcaacacttttctccattagttgctttctctcatttacaaacgtaatagttttaggagggcagtctaatatctccacatcaactaggactcttgcaaacttgatcatagacctctcaagtgttactttatccaccatgttgggtttgcctattgtgctcaccaaagcactcaaagaattcttaccccaatattgaagccccagtatatttagcctaatacagataggtacataacgcaccaattgattagtatccaaatttgatgattgcggcctaagaacaacaagttttttgtcaaaatgaatcactcccgtttcaagaatgatatctctagtcagctcatccctgaagcttactaatgtgaaaccagaatgcatccttacaatcttttccactcccaatttcccccatattctcctaataaaacccttaaaaaattttgaatggtggattcacacctaaaacaatacagacaatagatgatttccaaaaggaagcctccacttctacttcctctaggtcaagttttgccacaatttgatccccaattttcataggttcagtataatcaagccttgaagaagaagttttaacctggtttacattgaaattgctccatatatccttggttgaagcttggaaatctgttgccgcaacctcatcagcccagcaagtaggtcaatttggttcgaacacattcagatcttcatcttcttcctttagaacattctccagttcatcgcacgggtccggaaaatctctacagcttgttccttttagtgtgaaggtcactcgttctcactatggttagcttcaatattagctcctgaatcaacactcacagatcaaatggtaggctttcgaattgttcttctcttctttgccatggaagaacagagagagaacacgcacaccctttttttattttgatgtaaatgaagagtttcttcttcttcttctcttttattttcaaaaatataaaagctattttctcttgagtttcttcatgaaatttcgtgctccttagtgttaagagctttcccacacatgtcaaagcaatactcagcatagtgaggaagactgtgatggacaccatcgaaggaggagaagatccaagttcagatcttgataatgctctactacatacaagaatcaatggctagagatctgaatggaaggagccatattattctactgccatcattgaagggattttttaatctcttatgtgtttatttctcattttaggaattttatatttacgatgttagattataaaattataatcatcatacatgttagtaaagttagatcttggtaaaataagtttccgacagcttcctccacctttctattcctcttgagtactttgaccaatgatatgatctctttcgaagaactttatccttcttatcaaggatttgaattggttattcctcataggataagtatgaatgtaattctagggcttcataatataagacatgattcgaatatgatacatacttccccagcatcgatacatgaaaaatattgtgtacagttgacaatgcaagtggtaaggctagccgatatcctacctgtccaaacttcttaagtatttcaaatgaccctataaacctagggctcaatttgcccctcttttcgaagcgcctaacacccttcattggtgagactcgtaggaaaacatgttcacctacctaaaactctacatctctacacttaggatcaacataacttttctattacctcactgatccgctaatctaactctggacccaaatactttctttctctgatttcatcctaatgaatcagagaatgacatttcctaccatataacatcaataaggagccatccctatcgtactctgatagctgttattgcgagaaaattctatcaaatgcaaatattttccacaaaccctcaaagtctatcacacaggctcgtcacatgtgttctagtatctgaatcatcctctcagactgaccatttgtctgaggttggaaagctgtaatgaatttcaactttgtacgcatggtcctctggagcttttcccaaaacatataggtaaactttagatccatatctaaaataatggatttcagagctccatggagatgaactatctccttcacatataacttcgcatattgatccaccataatgttgtccttaccagaaaaaagtgtgctgattttgtaaaatgatccactataaccaagatcgaatcatacattcatgtgtaactaggcaaaccaaccacaaaatccatagtaatatcctcccatttccatttgggaagtgccaaagtttgtagtaaccctgcatgtttctgatgttcatctttgatttactgacaagttaagcacttggatacataatccaccatgtgttcgttcatattgcatcaccaatagtagagtttcaaatcttgatacatcttggtggtacctaggtgcgaagagtatggtgttgtgtgagcttcatctaaaatttattttctaagctcaaagttattcggaacacatacccgagtcttgtaaagtgacatcccactatctgagactgagaagtatttagcctgactagctaacacctcctcccaaaacatgattaactcagaatcttccaattgcatacatctgattctttctaaaaaattagactgaagtgtcaaattattatctgtcaaacataaatcaatacctgccttgaccatgtcccttgctaattgagaagagatcatcgtagcactaaaaacctttttgggacctttcctactcaaggcatcgaccaccacattggtcttctcaggttgataaagaatctcaaattcatagtctttaactaattctaaccattatctctgtctcatattccatctctgacttagaaccttggaagtttctgaagaagaaaggtgtttggcagctctagaacaaggaattaagcttgttgatgcaaattaattagtcttcctctcttttaatttcattaaattatgtgcttgaaggtaagaattcagtatattattgagtctatcttgctgaattagttggtgaagaaaagtttacagattttaagttaaggccctgattgtcaatggtgtatttttaattctttgtttgacggtgttttaagattataattatgtttattatgctatataaaactgctctggaaaatttggttgcatttagtgaagttttgtaacaccatactggtttaggcatgttaacatgattttttaactgaactgtacagttcgttgctaatcaacgagtttattgaaaatcttaaataactaaaactttatttaagtaaatataaatatcaaatgaacatacttgtattaaaccaggatcccatttacaaaaatatttataaaagttttactgtgcatattacaaatgtttgtcgcccaacaactatacaaaatgagcccaactgccccaaagaccgtgcgctccaggcctaaccaccccgacatgtacaatcttcatttgctcgctctcacggctgctcaaccttagctttgcccttacctacacatgcaaacaatatctgtgagtcaacagacttagtaagaacagcataaataataacatagcaataactcggattataatctggtgcccatacacccaaccataaccctatccccttgtccaacacggcgctgagtcaagaacgatcctacaacggtactactaaccataatatcagcctatactcgatacaccagtcatactctagtcataccgatgtgatactatc

SEQ ID NO: 308481 - DNA, 2058 bp, Cannabis indica
caatttgatattaataataatattaattagcattaattaataaaagcttgtacgaaaactaagtcagcgaaaagatgagttttaaatttttttgacaatgacctcctcaaaaaatagatgggtattgtatttaataaaattattggtctaaaaattatttaaatatgtttttgtgttatagttagcttttgtttgcatcccaattgtataaacaatttttaaaacaagaatcgttttacaaattgttagcctcatgataattataacattaattagttatataatatacaattaattaagttaagcacagattctcacaagtgatcgaatattcttaattaactactctattcacttgactgagatttcgggtacattaattatgggagccattagttagttgggtatctaaattagcatattttataaaataaaatatttatatatatattatactttcctttagtatttttttttttagttaaaaaaaaatagaaactagttaggctctattatattattttaaagcaagcccgaccatataggcgggttaagcctgtgtctagagctcactttaatctaagaatttttttcttttagaattacacattttttttattaatttttaaaaatattaaatttttttaaataagggtttcaattttttttttcctatgacacactgtattttagggtcggcctgtccctaagatttctccaattcatactcttaatttgtttggtgtgtttaatttgtttgtgtaattctactataaactatactcatggaatttgtggtttttgcctttcgtgacggtttttcataatatggatccttgagttagggaggaaggcagctccatctaggggggccaaaatgccaaaaacaaattatagataattatgaaatgatagaaaaaaaattaggagctaggccctccttggattgcacttaagaatttaggtgaagtttatgtgaacatttataatccctttcaatatatatatatatatatatatatatattacatatatgttatatggccaaatgttaaacgagtttattttgattatttctaaaattgttgttaaaattttagattacacatgtacattattctttttattagttcttgtatggtgttcttgaattggtctctaatcaaaatctttgtattattttattgaaagtgagggtgcattaaacgagtttaattagttcatcaattagagtatttaagctatattttacatttatattatatagaaacaaatgtttcaactaattttgccatgaaagaatgtagagtgatgccttattgttgatattgaaaattccaacgacaatgtttgtaggaagatgatgatggtgttctcaccaatagaaaaaaatgcaataaagctcttaattctatatggttcaaaagtagagatgaaaatttaaaagttgtttgacatttgaaaaagaaaaagtgaaaaaaaggagaaagaatagaatagagaataacgaagaagaaagattcatcttatattgattgagctatacacaagaggcaagagaactatttgatgcttttagtaacaaaatcacagctaatcaactaacaaaatgactaattgtaatgctaattctaatagtaaacactaaccaacttctaattgtgctttaatatcctccctcaatctcataaataaaagtcataattgaagcgcatatcttttaattgtgagattggatttgaaattggcaaacctactactgaaaattgcttttgtaaaaccatctcccactcactagaaatgatcttacttttagtcacaacaaaacttataattaaaagtaagaaaatcataactaattataaattattatttttatgttatgactaaaatgttcgtgactaaaaatattagttataaaaataacaatttattgtgactaaattagtaacaatttgtatctaaatattatgttttagtcacaattaatttgttgttgtgactgaaagtcacatttagtcacaaaatttaggttgtaactaaaaagttgtcactaaa

SEQ ID NO: 308482 - DNA, 1530 bp, Cannabis indica
aaatattttaaaaatatcttaaataattaaaaaaaaattagactaaaaaaaattttctgaaacaccaccacatagataaaaatacataaaggtattgtaaaatttttcaacatatatttacaaacattttttactataaaaataaataaataaataaacaaactttcttcaccaaaagaaaaaagaaaataattttttactacttacagtgtggttccaacccatttgtcagccaattttccgctgtcaaataaagacgaaaaacaacattatttttcattggcatgtcttcttctgtagtgatatattaaaatttattttcaatttttttttttaaaaaaatgaacatcagaaacattatccattttcaaatttcatataataaaagtataatatagttattattaaatttaaaagtggcatattaaaattaattctctaaaaattattttaataatttgatacttaattatattaataataatataatattaaaaaaaatattaaacacaccatcacttataatctcttttagtaattctgtattataataagcgaagggttccattatggattaatttatttttattggattggaagtatatcgaggtaatcaatgagctaagaaggagggaaaaggtgtacgtacgattcacataaagacatccatggttgtaaaggtaatgctatatatcacaattcataaaatcacatgtacacagcctaataaagccgatacagagactcacaggcctacctatatatatatagctatacatttttgtttttcataaaaataaagatatatattctgaaaaaagaaaaaaaggtaatttatatatgttattaatttgtatttgcaggtgctaaacatataataggcttatgtaagctaagtagtcgttattatgtcttaattaataaatgctttgtgcatgggtatcagaatacactttaataataattaataaaagttggaggaaaaagattgatcaatgatgatgatgatgatgtacatgattaggttagatacaaattaaagaaaataataataatgcatgcacgtgtaacgccagccaagtttaattgcgcacacatgcagttacttctgccacacacactgccctagctagctaagctagtaagtaatgactaaagacaataatagaagagaagaggaaaaccagcctccatgtttgtatgcattattattcttattttcacactatgttaggatgagagagagagagagacagggagagggagagagagacacagagagagagagagaggcaaggaatgaaatggtagaagtggaaaaatatgagaaaatagaacacgaagaaggatattaacaaattaaggaaaaaaaatgataaaagacactaatggtgtctagtttcttcctcagtgttacattgttattaatataattaaatatcaaattatatataacttaaggtaataattttttaaaaaaatattgctcattaataaagcgtaacaatagtgttagataccacttatacc

SEQ ID NO: 308483 - DNA, 1310 bp, Cannabis indica
taaaataaacagataaaccaaaaacaatcgttaaaccaagaattggcgttagataggtacttttaatatataaagatatttgacttgatccgtggtgtttaataataatttgcattgagtgatcgagctataataactaaaagctaaaaaagttaaatagtcagctaaaatagttcaaaaaaatttagctaaacactttcattttctaaatttaactacacattatttaattattttccaaacttattttattattatttttatattcttatattcttccgttcttttaattatttcctctctcatattttttatttatataaatacataatatttaaatacataatattttatgatataaagtaaaaatataaaaaattatatatggtgtaatataaaaattaaaataaaaaaaaaaaaattttaataaatagagtagaaaaaactcgagagtgccttaattaatataatattttattatattaaatagttcaatatgtggatttagcaacattggatttggaatgcaatgatttgtttatggctcaaattgagggtctaaggaatatattttgtgccatgaggaggctcgaggccaatttaaaactaattatttatctccatcaagaggtttttctccgcacgttctctgactctgtttaagtttttatattttttagaattagagtggttacatatataataaattgattagatatcttacctctacatgtcgaatttttaatggcttagctcataaaagttcctagatgtacatatatacaccttttttttttttaatcttaaaatagaataaaaaaaatcgcatagagtcatgtatttgattggttacaaaatataggggaccacttatgataccatacgtctagattttgtatgcagctatttctatttttgactactcatgtgataagttgtttaggaaaaaatgtaattgccgtacgtttgtggaaaactaaaatcaaaaaaatttgaactatgtgtattaaaactttaaagctatataatcctttctattaaaaaaaaacaaatgtattagtgtttgctagtttataataagatacgttaataagtaagtgccaacactaattaactaataacattatttaaaataaatgagacatgtagttttaaatcaaataatgtatatagattatactatagataaaacttataaatttttaaaccttttttaattatagaattccataacatacatttttacacaaaaaatcacacgaactaattcacatatgataataaatcaaaatattgcttaatatattgtg

SEQ ID NO: 308484 - DNA, 2183 bp, Cannabis indica
atatatatatatatagctaggttataaatataaaataatatatgaaccgtagaaaaatattcagtaaagtcatgtgataatatataaataaagagagggagaggtatatatatgttctcttttaatttattattatatatatctatatataaatatatgtgtttaaattctgtatcgatcagagaccatcccaactgaaatctgtttttttagccaattaatttatataacaaaaattatatggggatcgacaaattttttctaattcatcatatcatctatatatattgtcagatccatatacgtgttgttctacatatacatgtgaatatttacgtatatgcatatgtatacgtgtcggtactatagtatgatatatacaatattatttttattttaatatatatatttaaagtgtattattatgacatatatggggtgaagaattaataccaaagtcgatttttttttagcaacgaatatttcattaaacataattaggtaatacatcttgaataattagaatatgaaaatgaaaaccatacaagtcatcataaacaggctatgaattaggcacgttttaagaaaaatttgataacaaaacaacttatgtttcataattagggctcgtttaatacgttgtattaagtcgtattttattgtattatattgaattagattatatatcatatttttatataatgctaaattaaatttaaatttatactaaactattatatatttaagaatctataaaagtcaaaatcacatatagttttatataaaaatattacataaaatataatttaatatataatgttatacaatacaatacgatataatacggcgtatcaaacaagcccttagctaaatacttaatacactctatgaaaatagcgccaaattaattgacattggaaaaatagtacttatttatatttttatatatatatattggaaaattaacaattaatgtcaactgtcgtattttgttgtgttatatattgtctcaattttttatcttaatatatatatacatatttttcatgctatacaatatacattacactaaaatatatggaatggcataataaaaccaatgtgaataattaatgacattagttgattataaagcaatagacatattctaatttttctaatacattattatgtacgtttgaacaattattctaaaggatgtgagatgaggaaatataattatatttaacacattaaatcgatttttcattttagatagtgtatatttttatcagatatataattaacagccaattcaggattactacttagttcataataaattttaattaataataaacatgtaaagaaaacatttaataaaagtgtaacatcattgagcatcatttgactttgtagttttgaagaaaaatgagtgtttttattctgaataaattttattttgtcagagaaaaggccttagtttgggcccacaaaaacatcattattgggcccatgagataggaccatgggcagtactgctgtacccgacccattgacacccattaattgggtctaagttgtcttatttacccaaaagggacccaattttgttgcccaatcttgatgcatgtgtcatggtatctttatcagtattaatacaaataaattaataatcaaaaaaaaatatatatatatatatatattatttacaaatatataacttataagcataacatgttcaccacatgtgccttgggacacatcaaatactatatgtatatacatatatatatatatatattagtacaaaatctatagtaccttatatgaatccaatccaatctaatcttccccactttcaaaatcacttttactttctttcattttaaaatacccttttcctattaatacctctctccctcataaatatatttataataaattatacataggtggcatatatatatacgtgtaaaaatcatttgtcttcatgtgttgagatacggatatatatactagcttagtgggacgatgatgatgaagagaatgtgagaagtgttataatcaattcaacatttttttgtatagttggaaaattaggtcatataaccctcttagtagatatatataacacatatatatatatatgcacatgccatgccacaatggtatatgtatacatatacatatattatacactc

SEQ ID NO: 308485 - DNA, 1089 bp, Cannabis indica
gccagtagttaatagtttttgatagtggtaataatttaaatatatcggatcttagattgaattgcaccaaatgttgggcaccttagcatttctcatattttacatatgagcatactcccttacttaaattcaggtggattttgccaaaaagtttatgataattgttatttacattgtacattatacttgcaggtctacaattgtacactcaaacactgtccctgccaaggaccaacacaactatacatcgtcgagagatcgtcaaaatacagaagaggcatacaagaatttaaaagatacagatacagttcatgtgaatgtagcaaggaacatgcagggacctcaaagaattccattgggtacatattccagtctgtgtagtcacattttcaagtaccctattttcttgttttcatttacttgctttactgatttttggttgtgcgttcagccaaaccaggaagagttgttggaccagtcggagcatatgataatgtaaacattatgaaagattcttatgatcctagagcactgaatagaagctcggtccttcctcctcaggctgtccctccgactgcctactatcgaaaacctgcaataggccatcaagagaggtctgcaactgaagcctccagggacatgtcatcacaggtaaaacaatccgttcaatgtggcatggcagccaaattagcaccagagattgccatcaacatcgacaccaacccattttttatgacacgggcaggagtcaataaggtgcaacaacataacgatagagtcgctattgattccaacttgttacagggaaaaacttcgtatggtggtattagtgctgctgccgccaccaccactactaccaccaccgcaactggagctccccatcggaaagttgcaactgttcagactgttcagtatggtatgacaagaatgtattagaaagaaaaaatggattacgggtatttttagctaaaggagcaggttatgatgaggcatagaggccccctatgaaagaaaatatccagcccctttgtcattttatgttacaaagaaacatttcatgaaatattatacgttctctctcgctctctc

SEQ ID NO: 308486 - DNA, 1275 bp, Cannabis indica
aaacataaaaaaaaaaaaaattggtagcagatctggtccgatgggatccgatagtggtccgatggtcacctgatgctttttttttatgtataaaaacataaaaaaaaaaaaatttaggtagcagatatagtccgatgggtctgatggtggtccgatgagtccgatgggtagtccgatggatggtccgatgggtggcccgatgggtggtctgatgggtgtccgatgtggggtctgatggggggtccgattgtgtaaatggggggtattttagggatattataaaagttgtcatatcctacaattattagttattatttgtttaagaaattttttttaaccaaatgtaaggataagaaatcaaatttcccaaaacaaatccctacacttatgtcatggcatgccaccatatatacataatatacatataattcatacatgtttaacacaattaatttaaaccctaatgctagaaattaaagattaggtcagcaatattggaacacaagttggccaattatttgagaggaaaagaagttcaaagaagattgacttaaattaggggaggcttccctaacattaacacttttcatttatattgaaaatatataacaaagaaaagataagactaattataagtgtattaaattagatcacataatgctttctctttatactccaccaatgttctcttagtggtatttggtgtgttgttcttgtcgttttggataattgaagccacttagtatagctagtcttccattaaaactattttatatatatatatatgctaacctaataataaactttgtttattaattacttttgaggacaaattatcctactaacaagcatgcttttgatgatagttttcattggttttgagttgataaaagaaacccaacaaatactatattccatcaatcactttttaccctatattgaattttgtgtcaattttattttctttctttgagtcaatgaattgacctttataacacccactaaaattatcatacttagagggctttgaaatttttagcttaattaattaaaccaattgaatgaggccaagaaataaaacattcctttaattgtgattataaatgtgtccaaaccaatagttttatgacattatttttctttgtttttgcttagtgaggggtattataataatttccacttagaattggagggttaatcgaatgagaagttttattttcaccccataaaattataaatacaccccattattaaaaaaatataaacttaattttt

SEQ ID NO: 308487 - DNA, 2287 bp, Cannabis indica
tgcagtatgaaaacttataaaaaaacataaataaaaaagtaaaaaataccgcctgacaatatttttgtaaaaagatgacaaaaattagtataccatgtaaatttcccaaatctaaattagcttatagttatatgggcttgaaaatataagcccaattttaaggaaccatctttcatttgggccctatacaaaaacgacaccaataacaaacgacaaaaaaaaataaagaaattcataaacgacatgtcgttcgtacacaaaacgacaccaataacacagtataaaaaagcttcgttctttaacttcaattaattctttaccaaaaacagtatcgaagttctgcaattcaaccatggcttcttcttcttcttcatcgatttcatcgtccttcaaattagtcacagcaagaatcccaacctctatattctactccacgaaaacaccatcatcatcaacaactagaagaactctcttaatttctccaaagcctctaaatttctcatttttcagacccatttcattcgaacgaatcccatcactatctccagcttcagcttcttcaagttctatgtcacttcaacccattgaagaactccctccaaagcttcaagaaatcgtgagacttttccagtccgtacaggaaccgaaggccaagtacgagcaattgttgttttacggtaaaaaccttaaacccttagatatccatttcaaaactaagcaaaataaggtcgagggttgtgtttcccaagtttgggttagggcttatcttgattctgataagaatgtggtttatgaggctgattctgattctgtacttactaaaggactcgctgctttgcttgttaatggtttatctggtcgacctgttgatgaggttgttagggtttctcctgattttgttgtgcttcttgggcttcaacagagtttgactccttccaggaataatgggtttttgaatatgttgaagttgatgcaaaagaaagcgcttgagctgtttgtggaagctgaaaagggggttgggagctcgaatttggaatcgaaaatcgatggcaatggtgaaagtttgagtcttggattggaatctgaactgggtgttgaaaataaacaggagaaagttgttgaatcaaaaccagaaccagctttgagtgtgagtgataaggattcgaattcaggtactttagggagcaggggaatgagaattaaggagagattgaagaaagagcttagtcctgttgatttggaggttgaagatgtgtcttatcagcatgctgggcatgctggtgtgagaggaagtgatggagagactcatttcaatgtgagaattgtttctaatgagtttgaggggaagagtatggttaagagacatagactcatttacaatttgttgcaagaagagttgcagagtggattacatgctttgtcaattgtagcaaagacaccatctgaagtttagtggaggatgagctcagacaaaagaggttcatttttttaaaaaggaaatatatatatatttcttaatagttaaataaaattattgagtttattgctttgtaccacaattaaatgtgttgtatgcatagttttttagattatgaaaagattgtgtctatgtttgggcatcattgttgtgaattgctttgatttttatcctaacattcatgtaatgtgtgtcttgggatttatgttatgcaagattgaaaacaaggaatcggggatctttttgtaattacagagaaactagaaagaaatcaattgtgtattttcataaatctgaaagaatgaatccaaagcttatatacaagctaagctcttcatcagctgattaactaacagagttagttacaagaagtgtaaaaactaactaactgaattggtttgatttgagctgattatgacagctcagctagattagtatcactaaaactttttactttgtttatgagtaaagatgatcattgttgaaaacaagaaagagggtaatttgtatcattagaaaatggagttatgaacttctgaaacattaatttagtaagtaaaaattgaagctttagtcttggtgtggtaatttcctgtttgaattatctagcttgtagtgataggattcttttgtgagaatctaataattagtattacagattatgtcattgattaggatgacaaccatatgttgatgtttgtataacaacttcatttttttgggaatactaataataataagaataatgagaaaaaaaaaaaagaaactgaatttcttgtaactgtttagagcttctcattttcacaactc

SEQ ID NO: 308488 - DNA, 1660 bp, Cannabis indica
ggatcaccaatacaatcatcaacatcatctcaaaagatggatacacaaaaggaaaaagttttagggctcaccaagtgggtattatagaagagcaccttagagaggacaatcgccaaatcaaaaccgctagatttgaaaagcaccttggaaggatttaccacccaaaatttgagctaaaatggatgagaatccaccacttgatcttcaatgcaaaatggcaaacccttttctctctctagctttctttctcttatttccctctctttctctttcttttcttttcttttttagcttgctgctcacaaagctcttactacctttcttttttttttttcttttaattcaaaaaagatgggccttaagcccttgttggcccaagcccaccaataaaggggcggacccaacacattaaacatctagctgagatgtttagtcttgtatagcccttgattaagtcttgaaggattaaaatattatgcattagcaatctctttataataagccctccttgattgtgtggatgagattaggcaaaacaatattcaaatgggaacataacatctttgaaatatgcttatataaagtattacaacaaccaataggacggtaatcaacagctgaagaaggggcattaacttttggtataaaagaaacatccatcttgttaagatcatcaacaatcaagccatcttaaaaaggagagaatagtcgaaaaaaaattattactgatatcattccaaactacattgaagaagccagcaccgaacccatctggaccaaggctcttagacgaatgaatactgaaaaagtgcatccttcacatctttcttagtaaaatctttaactcgaagctgctgagttaagttcaacttcgagccaaaatcaagacatgctaacaacagcgctcaaggtgttcctaccctaatattggagacctaaaccattcaaccaaatccaaatcaaaacaaatttcacgagattgatggagtttaaatcaattaaccaaggtctaatcactactacctttttgtcgaattgaatcacactagtttcaagaaccaaatcatagtctctccatcatgaaaacagaacattgtaaactcagagtgcatccttactattctctcaacacccaaattatcccacattctctttataaagcctttgaaacttctacaagagggattagaaccaagaaaacacatatcacagagtttttccacagtgaagcttcagcttcaacctcatctaaatcaatttgggaaattaattgatcaccatgtttcaatggttcagtagatttcagcttagtagagggtgttcttacttgattagccttaaatttgttccaggtttccttagccgaagcttgaaaatccacctcctccatttccatagcccacgaacccttctgcaccgactctgcctgttggagcatttcagcacctcgacccggctgggtatcatgaaagtcctcaatagcttcttcactcaccatctagatcgaagggatctccttttcaacatgcccaatgacttgtatacccagcttctagatctctttcttcctccaccccatggagagaaacagagagaacctcatgcctttttaaatatgcatcttgataaaattggacaatttattattattagaaaaaaa

SEQ ID NO: 308489 - DNA, 770 bp, Cannabis indica
aaaactttcccaacatcttccaaagaaaaaatatcataaataagatcaacatcccattctttcactccaactttaaataaagaacttaccaaaatttgatccaattcttgtatcaatgaaggcactcgaggaatccccaaattactaagctaaggatcatggaatactctagtcggatccccagatcccacacccctaaataactcagagacaccctcttagtctcccaaaggatccttcatataaaacatgcattagaactaagctcaaccccccgaaactcagaggaagaaaaatatctagctttataaactctaccaatcaatgagcccagatttttaataaatctccaccattgctttcccaacatcactaaattaaaatcacacaacctcctaaaaaatataccacccgtatttttatgaactgccatgctctcccaacacatccacaaaatcctgttactctgagatgaagaagaccataaaaacttcgccattaacctttgaatctcctaattaaaaagtcccaagaggtaaaagaaacacacgcgtatcaaataaataagaagagattgaacaacattcttaagcaaatcttctttctcgacacgagaaagaagcttctcgtcccaactattaatgcacttctttattttatccttcaaaaaactcaggatgacattcttattacgacccataacattaggaagacccaaatgctgactattatcattagctttagtgtaatgaccgctctagtaatgtgga

SEQ ID NO: 308490 - DNA, 1409 bp, Cannabis indica
aaatcacgtaatacgcctaaagtagttagggtgttacacccattctgtgtaggaagcactcaaccatgaggggtagaatatagctatgttagatgaaattgtagccttaaaatggaacaagacatggtatttagttcctctttctctttattccaatgtggtgggcaataaatgggtgtataaaattaagtacaatgcgtacggttcctttcaacgcttcaaagcttgcttactagctaaaagtttccatcaaaaacctagagtagattttggggaaacctttagtcctgtggttaaagcatccacacagtgagagttgtgctaactttaaaagtgtgaacgagttgggaaacacgtcaacttgacattaataatgcatttctcaatggaacgatggatgatgatgttcatatggttcaaccacaaagctttgaggatcatgaaaatccacattatgtatgcaaactgagaaaatccatgtacggactcaaacaagccccaagggactggtatgagcaactccaaacaactctaagaaatagaattttgaaaattccaaggctgactcttcattgttcatgttgaagtaccaaaaccatgtcgttattgtacttatatacgtggatgatataatagttacaggaaatagctctaaacatgtcgactagttcataatacaacctaacaagtccttttcactgaaggatctttgatctcttcattactttctgggcactaaagtatttagagatgacagagggctttatctttcacaacgcaagcacattgttgaacttatcaactgaattgacatgtcatatacaaagccaagcctgacatataacggtcttctgttacttgaccattgtgtgtcttagtttccttgaagctatatatactgtactggttcttgacttttcatttaatgaataaacactatttctcttctttcctttttgtaatatggtatcagaacgagaaagaggtgctttcctcaatcgatcttgatgcccttccttccgatcaccttcttcggtgaagagtatcgttctcagttctctgatactctgttcttcgtgtctttctgcacttttttgacatggtgatgaagatcaaacatcaacccagtctgacgctgcaaatcaacaagctagagtcgtggataccactccagcttcgattcaacatggaaatcaattccttcaaatttataattaaaagagtcccatggaagatcccgcaaatccatacttcttacaccacggagacaaccaggtaatgttcttgtctctcaactcctcactggtcaagacaattacgtttcttggagtagggctatgcaactttccatctctgtgaaaaacaaactcaattttcacgatggatccattccaaaacctcctatttct

SEQ ID NO: 308491 - DNA, 1291 bp, Cannabis indica
aataaatataaaggtattttttaattaatgaataaaaaaatgtatttttaaatttatcccaaattcatatgtttctacggaagcaaaacatagaaattttagtttatatttggattaattatgggcaaagttatggaccagaataagaataagaataacataatacatataataagtcaactgtaatatatggttgagttcagttttcttgggcagtgatcacaaatgcaatctagtaccaaaactctatggagataatctaagaaaaactgggtccatcctataactattataatttataacattatgatctaaatttcaatactttattgtaccatagattattttatatcattggagaatatgaaagccatgttaaaaagtcaatgcgatagacccggtttatattgcagctcatatttcctattatatatagggaaaacaacattaaatttcatgaccaacttaattaataatttttcgttttatatagtttttttttttaattttttttttaaattatagtttcattcttaaatttatagatatcgaatgttttctttcatcttcggccaagcctatcgtattttttttggtatttatagagattttcagaaactaaataaatagagcttcagaaataaataaaatagtaaataatagacaagtaatttttacgtagctcggggttgataatccttagttcacgagtcagttgtattgagtctttgggcaagtattctcataatagagtatgtgtacttacagtataaaccctagctctacactccttatgtttctctagaagaagaaaaaaacttgtaggagtttttacagagattgggcaagtagaaattttgttccccctttgtacataaaaaatggggatatttataggcttaagtgtgggtatggacatttcctttaccgacctaagattttgtaccatagttcattgcaagagcaggaaaatataacttcaaatctgactgttctatcgtgaagaaccttcttaaatataccagggttgcttaaatatctacctaacatccaaataatgtatgcaatgtctagacgcgtacctaaagatacattagactcccaacagatgatgcacaggaaatcttttgcatttcctaaatttcaaggttacttttagggcattgactaagactaaattcgaatccttttgcaacatgggtatcgcctcgtctacaatcttacatgccaaaccttttgaatactttatcaatatagctcttttgtgataatccaagaatacctcaagaac

SEQ ID NO: 308492 - DNA, 1690 bp, Cannabis indica
caagactcctagtttaggagccttgactctcgtctcgagaagactaaccaacccaattctttgatgagcaataaattgctttactagtgattgctttggttggttgttgatcgctcggacattgcaactcaacatcttatccattagattgaggaggctctcctccacctccaatgttaccacattcagcaactatttccttgtccaaccttccactctgtcctggaatttcagcttcaaacaaatcaccttgctcctcatcttgatagcttgtcgatgcttcagctagaacttgaaaagcattgaccattgttgttggaaccccaggcagtttctctttaaccttccaaactttcccagctggaaggaatccctctgaatccacctctgctggttttttcccctattttttctctgctgtcagtacaccaggttctttcttatcccctgtagttttgagagtccattcctgcttcattccagatttctttctacactcagtagtggcatgtcccaatccataacagtgagcacatttaattggtttccattcatacttgattgagacttctacattactcccatactcatcttcaaactcaatagcatctgggaactcttggttcattgagacttcaacaagaactctaggaaaagttaacttgtctttttccgtagtaaccgaatccaccatcactgggttccccaattgtccaattatcttgaacaatgattttttcccccagtatttcagctctagatcttttacttgtatccaaattgggactaaagtaacatcttccttcttaaagttcacattcgggtcccaagccttaattatgacaggcctcctgttgaaaaatatgtagccacctgctaacacttcatctctgaactcaatagactcaagccgaatcaaaaaaattccatatgcaagcattccaaccttatcaacctttcccttccacatacgtctagcaaatccatccaaaattgacaatggtggatttgctcctaacacataacatacaattgaaggggaccactaagatatttcatcttcaatatcttccaattgtattttcaccttctttccctgttccttgctagcaaaagagctagctaaattctttctcacagattcagacccaagcacaaggggttgaggagagttacctttcaaaattgcagctgaacactgttgattagcttgcataaagaaggcaaactccgtgcgaatctcttcccgctgctgtattactttcagcgatgactttggcgacagtggagcttgaaataggccagtattcgctagatttggcgcatccatattcaccccatcgtcctcgctttctgaaaaagctattggttcaacccataaaatctcatctatagattttactaaggatggaaaataaattctatttttctaaatcttcctagggtataattttataaaaattaaattaaaattaatatttagagttatctaaattagttattttaattaaataaatatattaatattaaaataaatatcaaatgaaaatacattctttaaaataatgagctttagttataaggacattcgatctccattgttggttttacatggttcttgttttagtgagattcatccctaatagatgaacgttcattagcaatttaacgccatagaatctcgaaagat

SEQ ID NO: 308493 - DNA, 1722 bp, Cannabis indica
tttaatttattaaagaaaaaaacgaaaataaaagatatatttgtagtttggccaaattacctctcttatataaaaaatctcacacactctctctttcttctatgacataaattttaagcacctatcgaaccatatcgtgcctttatcaaccatcttaccaccatcagactttcattcctaacctccaaattacactactatctcagacaatataacaaaaaaaaaacacaaaaaacataaatttcaccaaaagtcaattttttaccaaaaagtaaacaaaaaagataaagaaaccacaaatcgttcgtaatgtccgttcaacagtggtggtcgtgggtagtcagccacacaccggagagaaccaaagaaagggagggtcgtgggtggtggtatagcagtgcgattgatgaatttggagtgttttgtggtggtcggttgggtgagaataaaactgacaaagcgagagagaaagagcgagagggaaagagagaatagaagcgggtttctttattgggctttttgaaatgaaaggaataatttgaggtgttatactcgatttttaaaaagtcaaaaaaattaattccctgtgtgattttgactaagattcgtaaaggctaaataagttgagatattctagttaaatttaggacataaaaatattaactaaccattggtgtcagacctacacccaaatgtgtccaacttaaaatctattgggctttttaaatgaaagggataatttaggagtatactcaaaagttggcacacaaaaaatacacgttaactttagtttaagtaattaattttatttaatagatacatattcagccaaattttccaaataatatcaattactctcattacatattataatatattcactctattaagtgtgatatgaggccatataatattgttaggagaaatgataaatatgttgtttaccacccttcgaaggtaatgttctattagtatatttgaatatggagtctcatttatttcaatccttaatagtattgatgtgttaatttaaaatttctacaaattgattggcctagaaaattccaacaaaacacatatataataagtacaagtatatgtatgtatagatgcatgtgaatatatttatatgtgaatgtgatatggtcacaagtcacaatcacatgttgtagtggtacggagcaaggagattgggcaagagagacaaccatatctacaatgcagtctctctcggattctattctattctattctataatattaatatatgttacctaattaaccccaaagtaaactaatacataaaaatgttttcagtttttttttttgtgtggggttggttgatgtttataatcatgagttcgatgacattcactaggttcgaagcaacatgttatatatgttaatattatccaaataattgaaattggaataggcacatgaactgaacttccttgtttatatagtactctttacattttaataataaagtagattagtctgtaaaggttaattggaagaaagaaaaggaaacctttgtttatcataaatatatatatgtgtttaattaaggtcaatgtttcctacataccttgaactccgaagcctccttccttccttcacactatgctaaactaaaagataatattgttataaaattcttataaataatataaaatagataaaaaaaaatatagaagaagatgaagagagaaaaaaaaa

SEQ ID NO: 308494 - DNA, 1614 bp, Cannabis indica
tttagtaaaacagtttttaatcctgcgatttatccaaacctacgaatttttaacattaattctataataatgttatttgatatcacttataccattaattaaaatccactaaataatttataaaaccctaataaactttcatattggactttaattaaatgattacctaccttgtaaaaatactataatattttactttcgtagttaataataatctaaacaataatctctatttgaatctggatattacaccattgatggagtaaaatgacatgcaaattctacaccaatttagtgaaatggtaaattaataaaaaaaatatttatgaaataatctcaaaaaattaactaagtcaatctctaattttgtcgattgagttttattaaatttaaagtagacaaacctcaaacaagatcaaatatatacattaaccctaatagtcataggattttagtgtgattaaatctaaaaaaaattaaatatatactcaaatatataattttttcataataattgattttttttttacaaagaataataataataatggatttattattattattattattattattattattattgaacagatttaagtttttaaataatagcttcttatccaaaacgtgagtaggtcagccaacagtatgagtaatggtgacttggttcaatgctattggactgttgtttacaataatattttatattataattaaaaatacataataaaaaacacatgtcgatatctattccatttactcatttacggataacctggagccatctcatctgatgatatatcggatataatatatcgttaagtctaagctagggctataggcctacgaaatgcgaatcgtccacacagactgacaaagctaccagccgccgtcacgtgtctctttgtattttattacttattattcatttttagtaattaaatatagatggtcccttctttcaaaaaaaaaaaaataaataaaaaataaaatatagatggtcccatcacgtgcttatctttcttagtttaatcttaacgatgcttcaaagtagagttcctttgtcaattctctaaacctttttcaaaatattaattaagattcctttgcacttaaactttttttaataatcccacctatatttaatcaacgaatatatataaattaaataataataaaaacaactgtggtgtaactgtataagtgcaagtggtaactatcatgaataataaattaccttattcttattgtatgatatatgtgaattagactttgtattctgtaacgaacacatatacacattaaagtagcatatggaggagttttgattgttacatttttattataactatcgttatatttttttatgttattggattgatattaaatgattgtgattaatttaaaaattaaataaaaataaataataaataacttgtaacctaaaaataatttgataatttattttttttataaaattttaattaaattaattatattttaaaattaaattaattataattattaattatttttggcaatttattactatataagaattttttaacaaattatttttttttgccacttaaattatttaaaattttatag

SEQ ID NO: 308495 - DNA, 1518 bp, Cannabis indica
tcttttttctttttgtttttgttcctaaattgcaagttattactccaatcaaacaccagaagagcccaccaaggataatcattcatgctacttttacattccgaaatccgaggaagcagggttaagctctcacctctgggaaggtaagatactaaaaactttgacattacaaggaagaaacgaattgatgcgattagctagagcaatgccattagggtcattctcccatgcatctccagggatttccagtttcaatgatatcgttgttgccaacgagtgaacctgttgcattaacaccaaacaattaaagatcattatcaaaaccaccttaaacaatgagtgaaacaaacataattaatacaatgcaagaacacaaacaataaaaactccaataaaagagatagaaaaatgaaggtcatgagttaattactcctttatctgttctgctacttcttgcccatgcgattttctgaaggttcccataattactatctcgaataccaccggccttaaaaatggcagtttccagttctttttctatagctacatttcaaaattgtaatgcttgtttagcgagaccccaatccaccaatcttaagctgaatgaattatatgactatggtcaatacaaaaaacatatacaaacaccatactttccccccaatacaccacgatcgtagcaacaaaaaagacaataacgaacaatgcatcaatctcacgaaatgaaaataagcttactggataatgaatgctcgtctcgttgcatttgtaagcctggaaataattttatatacaaaatgaaaaaccattagagttggtgaaaatatcgggaaccaattgataatttcatatgatatgaaacgaacctctgtaatcagtaccaacgtagccaactcgcataactactttcttctttcgtaagggttcccatttgcccaaatcggttactgtatcttgggtgctagaggacgcagaagaagaagtagagaagcaacagtaaattggtctcagtggtaggggtgttgttggaattgaataaattctgaagaaacgagttgaggattttgtaagccaaggtgataacggaagtcggagagatgagatagccattggtggagcttcgggcaagtgcagcgagtgagtgtctgtcagtggtgtagattagggacagcgagtgagttggatgccaaatgggccgtttacgtgctagacaacaacatggtccaaatcaaaaagaaaagctaggggcgtgttcagttgaaggggaaagcttagaattaatcaaaagagtaatttgcggcataaatacctaagtttatcattcggttgtaatttaatacctaagttaaaattttggcggcataaataccttccgttacactttcagacattctgtaggtaccttgctgttatcttgcacactggacaacaggtggcatgccacatcatttaaaataatgccacatcatattataaaattgccacctaatattaactattaaaataaaaaatttaatt

SEQ ID NO: 308496 - DNA, 1273 bp, Cannabis indica
tcaataagagttctttctctcttcctctcttacttccgctttctctctcttttcgattctttgtcattctttctctttgctgaatgtcaagaagattaaaccaatccaatatggtattagagcctttttctctattaatggcgaacatggctactgtgggaaatggaagctcaaatcattaacttgtgcaacaaggagctcaagttgcaagtccaaaaactcaaaacagggatcaagaagatggcacgatgtacttcaatcacttagttttgatcaagctcaacgatcacaattatttactctgaaaaaaacaaacttggctacaatttgtggaaatcatctcctttaattcatccaagatgttgctcctcctccttaattcctcaatgatgcagatcgtactgcacgaaggtttaatccagagtacagtgattgggatgttcaagatcagcttcttatatcttggcttctctcttcaatgatagaaagccttctaactcgaatggtggtatgcaactcagcacgacaaattggaaagcccttgaacaatactttactctcaaagtttcatccaagattctggaattcagaacaaagttgcagaaactcaagaaaggcaccttgaatcttaatgactatcttcttaaagtgaagcagcatgttgatctcctagcctctgttggagaaattctatctgattgagatcacattgctgtcattttcaacaaagtgtccaagtttgtgacactgttggtgaaattgaagctctccttctagcctctgaatctcaaattggaaaaaaaagatcaagaagctaaatctagtgcaaacatggcgaccattgatgaagatcccaccatggaggcctttattgcaaacacaaatcgaaacctaagataccttgcctatcctcgaggtcagtccctcctaatggcttcaatttctctaattttccttcttatcccaataaaagaggaaactttagaggtcaatatccccctccttgaggaaacaccaacaatatgtagaccaacaccatgggaagaggaaaaggaagtaggttccctactccacaaaatcggatccaatgtcaattgtgtcacaaacttggacactgttattaattgcttttataggtttgacaagaattttacaggagtcttccctgccacagacccctcccaaactcaagctaatattgcccaaaccactcaagctcaagatgataatttgttgggttttatgccctacataaaactcatttcaatataat

SEQ ID NO: 308497 - DNA, 2702 bp, Cannabis indica
aaatgccactgcatacaaactaagcatcaacatgccacaagaatgcaccacaacatgcgccaccacctgaccaccacttggccaacatttgggcatcacttggcttataacgtgccatcttaccacgcacgttacactaagcaaggtcatataataatcaagaaaaagcatttgatacctgttggggatcatccactcttattcccatagcattagtaatggagagtactctattttgggatctttgggccctaatgcaattatggaagaaacctgagttcgaatctccatcttttagcaaactcaaattagatttttattggagaaaagagagatagtctttctgattttttgcatatttctttctagcttctttttcctgatgctagagttcaccatttaaggaatcaagctgcactccctactggtacgaatccaaggcttctttgtctttaatagctgcagcaggaagattcgcaaaagtcttctagtttaattctttgaatattggcttaagtttctttagcttagtcacaatttggaaaattacatgttgtttccaggcttcagcaaccaaattagtatagttaggatgagaagaccacatctgaaagtacctaaacagtttttttccacctgggatagtgtcatatactgttaagattgttggtgaatgctcgaataatccttcattgagaaaaactatttcagtagctgagtgaagatcaagccatttctggtttgcaaggattctatctattttagaataaattctatcatctcccatttgcttgttactccatgtaaagaagttccccgtaaactttacatcttcaagttgacaagcttctaaacaatccttgaagtcactcgagttattaaatctagcatgcctgccaatcctctcatctttgttgagaatctcattaaaatcaccaagtactatccatgtttccaaaccatcaagatccataagatctctccacaaaatcctccttccaacctcatcattgaaaccatagacaaaagagacaaagaaacttgtttttctatctatattttcaacaaaaaggtggatgagttggtttgtacacttgacaatagtaacataaagctaattgaaatatagaaaacaatattctttcccccattatgccatgcattattagaggtaaaacaccatctggaaaacattcttacgtataaggatcctagattccgagccttaactcttgtctcaaggagaccaactagccctacttttttatttccaatcaattgcttgactaaaagttgcttttgttggctactgattcttcagacgttctatgacataattctatccattagcaagagaggaacctccccctctcttgtgttaacttcttgatcctttttctgcatactcatctcattcccttctctaagagaattggtttcagcagcatcctctagagctttaaaatggttgctgatttgagcaggcttgcttccttcaatctcctcaggctttcaaccttttgaaactggtttgaaaccatcttcatctactgttacagtctttttcctttctagttcggacttctgttctggttttttcacaacccacacctattttccttcagtttttttttcctacaatcatccatgttgtgtcccataacatggcagtgtccacacataattggcttccattcataggatatagacaccgtggtgttgttatcattttcattctcaaagtctatagtctctgaaaactcttgctgcatttcaacttctttcaacactctaggatagctaagcttttctctattttttgtagcatcatccaccataataagcttgccaacttgcccaatcatcttgaaaagagatttttgagcccaatatttcaagtcaaagtcatcaagatggacccaaataggaaccaccctaacatcctctttcttgaaattgattttggggtcccatgatttcattacaaccgaccttctattgaagaatatatatcctcctttgaggctctcatctctatcttcaattgagttaaaccttatgaggaaaatgccatatgaaagcattccgaccctttctactttatcactccacattctcctagcaaatccttctaagattgataatgggggattagctcccaacacataacatactattgaagggttcaagaaatcaatctcttctttaatttttatcgttagtaatcttaactttgctactagtggctgaattcgagaatgaattctctaggtttctcattactgaaccaaatcgaagaacaggttgaacatgggaattaccttgagaaatactcttagagcatcgattcgaagcatctaggaagtgagcaaagtccttcctaatctcctcttgttgcttaatcgattgcaaataagatttagctgaaagaggcataagaattcccttctggattcctaaaagtataatcttatcacgcactcctcgagaacaatactgctcttcttcttcagcattcgaaaagttaattggtttgattccaagaatggaatctataaatcttgtcttcctctcatccgaccacgaattaggacctgttttcttagaaactctgctttgaatcaccttcccctgcactctagatcttatttttgccattgcaccaactcaaaagctacaagaacggagagagagagagagag

SEQ ID NO: 308498 - DNA, 1809 bp, Cannabis indica
agcttcttttcccgaatgagacctcctattatcaatttgaaagtcacttcatctggacataatcctttagatttgcattttcattgtatagacacacagcttcgctaactctagaaactttgcaaagcccattataagggcattgatgaaatcacatcaggagtgactcctctttcaaccatgtcactgaaaacgctaagagccatctcaatcttctttgccttgcatagttgatccactattgcagtgtaaaatatgcaatctagtgaaagacccattctcatcaactgatcaagaagcattttagctacatcagaactaccttcgttaagaaatgcttttataagaattgtgaatgttacaacatctggttcaatgcccttctggctcatttcctgaaaaagtttgtatgcccttctagtaagacgagccttgcaaaacgctccaataatagtattataagaaacaacattacacaacattttcttctccatcctactattcattagcaaataagccttttcgggccgattagctttgcaaagacccttgagaagcttgttatagctataagaatcaggtgtcattccatcactctccattttcttcatcaatttctcagcctcatctaacatcaacccatcacaacaataattcaacaaaacattataagtaaccaaatctggctcacacccacttctcttcataaaatccttgattgcctgagccttatcaatcctaccaactcgacaaaacccactaattagtgaattatatatcaaacggttaaactcaactcgacctttgaattcaccaatactaagttcataagccaaatcaactttcccaccatcacacaaaccaatgacaagagccgtacaagcaatacaatcaggggtaagccctgtacttatcatagtacgccaaactaccacagcagcatcaaatttcctagctttacacaacccatcaatgagtatagtataagtaacagtatcaggctctctacccttctgaaccatacaatggaaaactttcaacgcaaagtccacctggttttctccacacaaaacattcaagtatatattaaaagcccaaatatcaggaacatgaccaagcttatccatgtcttccaaaagtttctcaataagaaaaaaattcttaaccacacaaagagcagaaatgagcctagagtaagtaaaggggtttagagaaaacccctgagggaccattttgttataataatgctcagctaaatcgagacgcgaatggcgggccagtacaccaataaatcgattgtaatcaatgctaaaaactcggcattgtgattgagtcatttcgtcgaacacttggatggcttgatcgatgagaccagctttgacaaagtaggctatgcgagaacggtataagaggcggtgggcgccaagagtgtgaatcatatcagagggaatgcatatcaaaagagttagaaatggccgcacctgatttgggtctcaagttggctttaggcctggctcagcatcgttccggcgggtgaatggagattggagatgtttctttctgcttaagtgggggaaggaagtaaacacccaactgagcaagaaagagaatgtgcttcattttgggggcccagtagctaaccattttatgctttcttgggcctttttttcccacatatgggcctcttaaactcttgaccgttttagtatttttttgggaattttacaaattttgagtaaaggtttacatttagtggcaaaaattacatttatactgtccttgccttttttttttcttcttttatactgt

SEQ ID NO: 308499 - DNA, 2166 bp, Cannabis indica
tcccagcctattcctacaatatttgaaggccataaaccttataactggtgtatgtttaacatattatttaactatttacaataatttaacccccaaaattgtacttctacatataataacttaaaaaggacaaaataaaatatataacttaagattttggaacaaaaaaaataaataaataaaggcaattatatacatcattaaaccatggaaacaacacatgtcacaccagcaatttccactagaatatataataaacaagaaaaagtgaaatagaaaaacaaaaacatgttcatcactcatttactgcacaatatatttttatttatataacaagagtacatctatcttcagaaacagtacaaaaaacccagaaaacaccaactccaaaagactaatttgatgcccaagattttatgggaagcagtcaaaagtccataatgtaaaatgttttcaaattaagctataattaaaaggctcctgagtcctcaccacagactctttttcctttactccctcaaaagatttaaaccataaaaataaattaaaattaaaaaagatcttacaagtacactgagagaagctcaactattaggtacactcccatcaaggtcatccatttgtcttcttgtattggtaataaatcaattctttacatccaaatttgtcgtgcattattattcatattcacccaacatcacaagaaccaatgagaagaacctaaagacaacccaaatgcaaaatcaaccacagaaaagaaaaaatatatgccggcggatccggaactatgaatttctagacaaaagattattattattcacaaggatagatttaacatccaaagaaatgcatataattgatgttgcattgcaacaacacaggcgcgagaggcccgcgattatgaaaagaaatacttcgaatttgtagttcaaaaataaagcctacatgaaaaatggcgaaagacatcaccgagtctttccccttactcacaactctcccttgacccttcggttttcttgataagcatttagtactactagtgtgcgttaacacgatatgaaatgttcggtgtgagtcattcacaatgagaacttacctaaattgtattaggcaaaatactatttgcaagatcctcgttaatcgatacaggaagcggaggcatctggctcattatgccaggcatatgtctcatgctgcaataatagaaaagataagattttatagagattaaacttataagattatgcaaaagaacagatgtataacaaaaggggttcagcataatgttataattttgtttaagaaaatgtgtaaaaattcaattgcatactcattcaggatggaatttaagttgttcctcgtacaacagaagagatcaatgttgtcctgtaactgtttcaaaattcaataagatgtcaggcctcaaaacaatgtccactatcaacatctttaattttacccgaaaatatactgtttttggcattgttagatttctatgttaataatctttttctcttttcaatcttaacaatttatcctctgaatttgatatattttcgacaaaactaataatggctgtgctttttttcttcatagaatcaaacacatgcagaacaacataacatggtaaaacaaacaccaacacaagattaataactaataaatcaagaaatcagtacaaatgcatccaacgaatcaatattttgacccaattttctatctctaatatcttccactaactaaaaattgacaagtaccttcacttgttttggaaaggcagttttttccaaaaagaagaaattctcctgaataaagtcacttgtcaatttttaattattgatatatgctagagacaaaaatttaagaatatgagaattctatgttagaatatttttgacattttattccccaagaggagtttattcagtgaagaaaattatagccatcatcatcaatttcgtctcttttgtaaagaagtagcatatttggggacaaaaatgttacaacttaaataaggaaaatttttaaaaatacccttcttttatgttttatttataattttacagcctaaaattttttagggtgattctataatgcacccccttaaaagggatgtattgatgcacccttaacttgtttcggtatccagaaaaattttagtctaat

SEQ ID NO: 308500 - DNA, 3114 bp, Cannabis indica
cttgccctgaaactttttcatactgcaaccagcctagtggcgaggccattgttgggaggatgatgcgggcttatcgagcaaggtgtaacgacgcatcctcatcctttgacgaggaatggcttcaaaacttcttcgagaattaagggggaaatgttccttttactactcgtgttcctgctgagtttcacgctctttgactacgtgctgagcgtcgtcatgatctctgctggctgcgggctagaagtcatcgtgcttgggacgaagatttagaatgtgatcgcttggctaacgaaagatggatggaagagtgccttagggatggagttcctttttaccctcctggttttcctacgggctgtcgtcggtgcatgaagagggtagtgagaggttccatcgtgatcacaggctctctatgtattttatgttggcatcatcttgagcgtgagcatttttattgttgtccttgatgtattagttctatgtatttttgaagtagttttatccttagctaatttaagtatcgcttattttttatccaattttttctttattgtatatattttattttggctttaaatcccagatgatgttatgtaatttgttaccattacttgttctttgccacataattctctctctactttgtttaatggaacctttgatcttcccttataaatgccatttatatttttcgtttatttcacttatccttattaaaaacggaaaaggcacctcaaaaactggaaaaacaatatactgtgggagtgttttgagattgggggagtgtttagttggttaacacgtgtcattgtctaaattattctggggctttttgtgtttggactcgtggcatccttccttaatgcatgttggctcttatttttggctataaataagcagtgaagacaaaaccttgccattcgtaaaaattcttcaaagactttctttagacttttacttaggtgtttactcttttaaggtattttcttctacaaacatggcctttctgctaaaagactaggtacgtcattcttcaagggctaagccttccttttccaacaactttggaccctgcatttttatctttaaacccttttttcgagttttcaagacttcgaaccagtctccattcccctgttacctttctcggaggtttgcagttgtcccaattttgaacacatttcttttggcttgggaacttatgcttcctcacgcattgaaccagtgccacctttggcattgtgtccatttgcggtttttccttcaattttggcccctattgaagaggcaaaagaaagccccgaggtatcagaggggagttctactcaaacgacggtagcctactacccaaagcttgatgccactactcactctgagaatgtcgaggaggctaatgacttagctgatgattcctcgtcggcattctgcatttttgcttcctccattcctcaagagtcacctcgggtggtttctgaaattatatgacctcctacatctttcaaccgtcggggatggactactatgcgtaaagcttttcaccaacgggaacatttttctgtgtaggggttctttgggtggtactttgggtgttgtcttttaaaaatttgttctttgtttgtttgttgttgtttatgatttttttttttatatatatatggatagttttttacaagcatgatattgtctcaaaatttttgtacagacatgatattgtcctgccattattcccctaatttttaaatatagtttatacttatttaaaaacttgaatgtattgtaaggggagagtggcgttttgtaattacaattagatttgcccatttaatagatttcgtgctttctctcctattgggatattggcggctaaagcaccctaacttttaggtttgtaacagttaaccacaaaaattgaaattttggcggcctaactctctgaatcctggttccgtcttgctctgtatccctccatctaaaaatcacagttaagtgccatagtggactgcctacgtgtacacaagagtacacgtggcaaaattttagtggtctaagtaattttaatattaaataaactaaaaaataatttaaaaattaaagaaaaaaacaacttaaaaatatttttttttaaaaaaaaaaaattcttcttttttttttttttttttactctttttctattttctattttctttctctttcttctcgacagaaccccctaacccttcttcttcttcttctgccattcttcttctttttcttctcgatagaaccccccaacccttcttcttcttcttctgccattactaccataccccgagagaagagtcagcgcttgggagttctaaggagattcaactgcagagggacaccgtggagccccatgctgaaggagatcgtcaaaatctttaaaggaccgcaatcgaagtgggtgattcctctgaagcttctgagacggtggatttgagcatggattcagaattagggttttcaggattcaaactggcacagcgagctcagccttaacaccctttggaagtttcaaagacgagggaatcgtgtttgaaaggttgtttaggtgaatcgccattgaagaaattgaagacatcagaggaaaattctgattccagggtgccgccattgccaatgccagtgccagagctaattcagtggcttctgaatcgattaatgggcgatcgaagcatgatgatgcaaattttttgttggatgtgctgaaaatgatttgcgaagaccgtgatggtgagattgataagagcatcgaaggttgtagaagggttagggagttctgtcgagaagaagaagaagaggaagaatgtgggggaggcttcgtcgagaagaaagagaaagagaaagacaaaagaaaaagaaattgaaaaagaaaaagatttttttattattatttttatatatattttttaatttttttaattatttttagtatatttaaaattaaaattacgtggaccactaaaattttaccacgtgtactcttgtgtacacgtaggtagtccaccgtgacacttaactatgatttttggacggaagggtacaaagcaaaatggaaccagggttcagagagttataccgccaaaattttagttt

SEQ ID NO: 308501 - DNA, 1600 bp, Cannabis indica
ttttattatatatatttttttattttaccttaatggcttctattctcttataacttgaatctggggtaattagacgagaatagggcgaaaataaaaggtataaataagtagcagggatggcagtggggattagagaatacatattaatcccccaatttatgattttttttgttgaaagagtaattactgaagtagttggactatcaagtatcaatatgcatatgctgaattttagaaatttctcattttttttactgaatcgttcaagatcaacatttagcatcaatttaaagtcttgaataaagaaaaaaataataaaaaattcgaaaaagaaagaaaatcagaatctctaataaagtttcttgtacactaaataaaattattgtgaagcttctttcttagtagttgacagcaactttggcataagaaaattgctcaatattcacgacgattaagaatcatgtactcgaaatgaaatgggagagtacttaattgccctttccaatcctaatatggataattataaagtataagtgcattcttagttaccatggaaattattgatatggcaaattctttatttggataaatactaaagctatggtccaaatgggtagctcatggcatttaaattccctgcatactattactaacatttttaattgctggctaggctattttctagagaacatgatgatttaaatgatttaattcctggtggataatgactaagaattaatgcacaatatgtacttgcctataccttaatgccacgcaatacaaacggctaactcaaattcactcaaaattttgagtagtgcgttgacggttttttttttcctaatctatggagtgggatttgctaaatatcatgcgagttcagtctatctggctttagttacaacaacaccttgcttaattcctcaacttactcaactgggtcactcttgaaaaagtacagtccctccctagcccaacaggcaacaacactaatataaaatgcaaaaacaaaaacaaaaacaaaattggttaatgagtacccaagtcatcaagtggacagtgcagtctatattccttcccaacactttttcctatcactctttcaccaaccgctatatatacatcatgactaccataacttaagctcccacactctcacacatattgaacaataaaagaactctttgtgtgttcatcatcagctgcaaaaaaatggtttcagcttcttctcctcctcctcctcatcctccaaaggtaaaactcatgcatatatgatatatgtatatatattgtctatgtagtagtgatcatgttggctatgtatatatctatatttatgcggttatatactaatttcaggagttaggtccctcagaaaacaaatgggcaggggaagaaaacgcctctcgccgagccaaatggtggtactccacctttcataccgtcacagccatgataggggccggtgtactcagcctcccactagccatggcctacttaggatggtattgtataataatataatctacatatacatataatttaaaaatttatatatatagttatttaaacttacgaaacgtactcataactttcaggg

SEQ ID NO: 308502 - DNA, 2207 bp, Cannabis indica
ataaatagtgattcaccccattggaataaacatctgagaaattctcattcagtttttctttctctcttcatcttcttcttcttttcttcttatatattttatattatttttataacacaagttaatattaggggctttttcatttttacactacaaaactatttttttttttacatttttacgaaattctacataaaaactcatattgcaactagcgctgcaacttaaattataacaaaaaattatatagaaaccccttattgcaactagcgctgcaaccactttaaaaacccaaattataaatttgaaaaaaaaaaattaaaaaaatagtatatgagataatttcccttaatattataacatacatatggtattaaaattatattgataaaatcataagataccaatttaatttatgacaaacaataactaaaatgttatatttccaaaagcaaatgtaccattttagtatttttccctaaaaaatcttttatttaataaatattttttaatatcttatatatattatatatagaacttcaaagtatatattttctataattatttcaatttgtaattatgattttcactatttttggtagatttaaaaaatatttactaaaactagtaataatttataaatttgaaaatagggtaatatttttttccctgcaacaagcaacagattattaattccatattaaacaacttattatttattttagtaataacataccattgataaaatttaggatacttttgaaaagttatattgcaattaaatttggatgtaattaaagataatcactcttttgagtctttatttcactatggttgactctgagatttgataacccttcaaaaatataatattattagcttttatcactagaaaatatgtatatttctaaaaggaaaaaaaagtttgcagtacaactattgatttggtaggtgcagtagagggcctagacatggtgattcaaaattctaatggtgatgtacttgcttctgtcgcttggaggttcctggcattatgtccataatgcagaggttctgcaattaaaataccatatctcaatgcattactctcgacctcaacattattcaactcaacaccgattgtcaaagtttagttcaaaaacttaataattcattagctttagattcttctttaggtttaattcttgaagatgttagaattttatgttctcgtttcaatgttgtgagttttaattattgttctagaactgttaatgtagaagctgattatttagttaagtttgctttaacagctactgcaagcacaatctggtgacctagttatccttcttgtatttgaaattgttgatgccatttttaatgaattcccctacctctcggcccctttgagctcgttgctcttgggtgatattttctgagactattttctcataaaaaagaaagaaaaaaaaaaatatcttacatctccttggttgggtgagctttgggcgcagacctagtctgccttaggtcagggttaaccctaactatgtaattacatggtaatcatgtaattagaggtaatttaaggatctgaaactctaatgataattggatgtaattatactatataattactaaaaaaaatcattttaaatattaattattaaacaatattatttctagtgtaattattaactattttgtcaatcaagacaatagaaattcatacgtaataaccacctcacattcaaacacgttatattttaggaaaaatatatattacaacctctataaagtaattttggtacacccttaatttgtttggtattcatgagagtttttttgtctattatttttataatcatgtacgtttgtagttatttaagattatttgtaaatttttaaatgattttaaatagtttatattattaaaaataaaaattcaaataattatttattatatatataaaaaaatagtacagtaaaatatttgaacttaatttttgacattataaattatttaaattttttaaaaaatttatatgtaagtctaaataattacaagttaaacaataggggttaaaagtttgttagatgttgaaaagtgcattaaaataactttttagataggtgtactatttcttattaaaaaaaaaaaagagaaaagtataatatataattaccctatattttaaaatataataacataataataattacataag

SEQ ID NO: 308503 - DNA, 1313 bp, Cannabis indica
atgggctaccgaaaaacaagatgcaccttgttggtataggtagtaccaatcaatccatttaagtcatcttcaaccgtatagtcccatacctacacagtctcagaatcatcacacttgaccttccccaggtggtgtgggattgcacagcttacctagtatttctccttatggatcacggaactaatggctgtcacaggtgactaagaataatgctttatatccactcacatctccacatcaaccatgcatcaattttaatctatttaaaatataacaattatttatttatttatcaaaattcaaattaaatattgtatttagagaaacgccaaataacatatatatattgcagttattagtgtaattgaatattgagtcttattgttagagaatctcacatttttttgatgaatcaaaattcttcattctaccataacaatttacaacctatgagcaccttttaaaatacacgcatgtacatattctatacatgtatgatccatataatagtaaaaatataaaaaaaaaaccttaatatcactattttaaagagaatcaaaccaagtccaatctttctcagccactttctttgacatgacactagcaattctatttttaaccaaccactttatttgttgaagtagctgattcgaattgttaatccttaagctccatattctctcatttcagctatgccatacctggtagaccaaagctgcaacaacaacacaaagaacttgttttttgaacttagaatacttggctcttttaattcttcttaggatcccctgcaaggaaccagagaaaatcccccagccaagccaagttttgacctgattaagagcatcaatagagaatctacattcaaaaaatagatgatctttagtttcctctgccatgttgcagaagacacacttaggatcattcaagattatgaacttgtaaagcctctcttttgtcttcaacttgtattgcattgctaaccataaaacaaagttatgctttgggacatttaactaggggtgttcataaaaaccaaaaaactgaaaccgaccatcaaaccgaccagatcgtaactgaattttcggttccacgtcatcatcgaatttggcggtcggtttcggttttggtttttttgacatggcggtcggtttcggtatttgaaataaaaaaatagtttaaccaaaaaactatcaaaaccgtccaaaaccgcctaaaactgccaaaaaccgcctaaactgccaaaaaccgccaaaccgaaaactgccaaaaccgtacggtcggttttatacggttataatttctaaacggtc

SEQ ID NO: 308504 - DNA, 2773 bp, Cannabis indica
cgacacgtggcatttgaattgggtttaacagatctgttaacttggagaccaacagacaaataaaaagtgtgaccttgaggactattgccgctattttcggaccttggggactaatcagcatcaacgtgaactttttggggacttttgccgcaaatttccctaagaaatattacaggacatgtttcgcattcgtagagtgctaataacattggctgccatatatattagggtttttgttttatatttatattttaaaatattttttttttgtattttcataaaaattatggaagcaacttaaattataatttaaaaaaaattaaaaaatattgtatgagataatttttgaatatataaactccaagtgcaccgttttttattttgtagttaattatgtatcattaaaattactataattattgccacaaactagaaatattactaaacattgtatatttcaatcctgtgtcacacattgtttgaaaaaaaaaaaaaaaaaaaaatacctgtgacacacatatgtataggtagaaaatatatatgtgatcatattcatgaccaaaaggggaaacaaattaaaaaatccatgaaacaaattaatttaaaactaaaatataccctatgcctatgaaaaaataaaagacaagaaacggagaaatggatttaagttttaacgcacaagttatggtacttttcattactttgaaaaaaaaaaatggtagttttcattaaaattcaacaaaagatagagagagcccagtgattcgtacacaaaactacaaagcaatacaggtatgtacggacacataccagtcgttgaccaaagtcaaaggaaagaaacctaaaatatgaagacggtaaaattaacgacactaacagaacactagctatctgttcccgtatacgtactcacactcacagtcacagtcacagtccatgatgatcttcgatatccaccgtcggtttggtcggaggaggcatggccacctgaacacaagctccttcaccaaagaaaggataacacgttccttcgacaggagctgacgacgagtctgatgatgatcctccaactcctgatccgccagatcctccaagaatttcatcatacacagcggccactggatgaatatgtgggaacggcaagaacactccatggattacgtgagattctttatcacctctggaattttaatcctcacatagttgatcctcattggcgccgggttcaatcctccaataccagaggtggtgatcactagcgtttgatcctggaccagagtcggcagaagcgttcccagaggcaatttctcgagatcctcgaaactcaagtaaatgttggggactatgtgaaacctgatgttattgatataagattgggagccagagaagattgagatatcatctagagcgaagatcgtcatgttgcttagatttacgagctctggatacttgattttcatggcgagagcaaggatgccgaaaccgttgttccggagtctgagcatggcgtctctaagcatgaggcgagtgatgatcgacggctgaattgaaggtgaagagaatggccgctgttggccgccaccgcgatagtgatcgggattgatgttgaaagtactcgtaatcctctcgatatcgcaagagagtggagaaagaggagaaacgaaactgccgtcttgtttgagaccgtgaacgatgataagaccattactgaatagatccggttgcgttatctccaagccagaaatgaagatcttagatgacgccgtctcattgctcccgagcggtgatctttccgcggtgattgtcaggcagcgaccggggctcaaggtctcgatcttggttccgaacgccagattccggaggtaatccatgctgaagaggccaggaacgatgtgctcgcggagaaggttcgggacggagcaagagatgcatgatcgaagtgccgtgtcgaacggagcgaaaagagtgaaaggtccgatccagggcgatggagatgaatctgcagagagagacggagctgccgtcgccaagtcattgtatccgagttgagacaggatatgaggcagtaacgctatgtttgtgaagaacgcttgctgattttgaaggtcttgtggagacgttaatggcggaatcggagcgaggcttggtggttgctctggtccatcatcaatggcagatgtgctaccgaagcagagcaatataatcgagaagatgagcaaagcgaagtagtgtgaggaggtaatcgccatggaaggaagacactcaaactgatcagtctaatcaagactctagagagagagagagagagagattatctgtgagaaatgagcggttaggatattaaggattcttgaaaagagtatatatatttccgagtgagcgcgcggtaagagaattggttagggaagtgttattcacgcgccgttcagaggcgtgtgaggttggattcttgaattctcaacggtttgttagtctgttacaaagaaggaaagctcaaggacctcagtctcgtgtgcttcaaaggcggtggcgggaaagtttgcagtataaagactatccaaatttcaaccgttggatctgtcaatcaaactcatcccacagtcactattcatcgaataaggagttatgatgcggcgtttcgtaggaattaattcctccccagcacaatttttttttccttttctcttctgccgcactaatttttatttggggaattttattttatctttttttttttgaatggaagtagataatttcattaagatagaaaagt

SEQ ID NO: 308505 - DNA, 495 bp, Cannabis indica
tggctaaaagcgaagtcaacaaacctaaacccaaatataaagcttatccaaagcaaccttctgagaatcttccccttcattcaatcttgccaatattagttgcatcctattaaacttccatgggctgcgagagatcactctttgaatgtccactttgtggtaaaattaaaagagatatctactaggtggtaattctttaacaaacattcccatacctggtttccacaacgaagccaacacattttgcataatctcaaaatcgatatcatgatccgataaaaatctgcctacaagacaccatcttgcatctattccatcatcttccactcctccccctatcttgattccttcttcttctccctccacttgaatatgaagaacttcatcctccatcccgtttatattccaactacttgacaccattgcaaagagcacactctcccacaccaacaaataaactcaaaaactctatttcaaaactgttggaaattattt

SEQ ID NO: 308506 - DNA, 1014 bp, Cannabis indica
agtaaattgtgattatattaaaattgtaaaaaaaattagggaatatactcccaataataataataaaaaaattagaaaaaagacagcaaatcaaagtttacaattatattaaggataataacaaaatgttacaatatattccactctactataacatttttccaagcaaataacaaagtaaaataaaatcatcatcacattacacacatcataaacaattaatagaaattaaccatgatctggagatttttcttgataaatttttggtgaacaacttctaatatttaatgttttctgagaaacaaagcagagagcagaatcaagcatatgaagacaacaacactaacaaaagcagccaccacagctccactcacattctggcagaaatctgtgaattggttacaaatggcaagccagttcgagctagcattgccattgtgagccaagtaaactatggcggccgctgcagccgcggctgaagtggccagagttagtgccacctgaacaaacaaaatatgtttatagctaattagtaagaagaacaatgacaaatatatgaaaagatcaataacagagtgacagagtagtatagttgtgtagtgtattacagtgtccataatgacaaggaagagcttgattccagatgcatggggacgaacaatggtgactatggagaatggaagagagaggactaggtagccactcactagtgccattgctatcaggaaaaatctgcacatttttaatcatcaacaatttattagtacttgtaacttgttaccaaaacagaggccgtttttttgttctcagcaaattcacgacgaaaaattttatttttagtcacaatttaaaaattatggctaattataaatcagcattcttatgttgtgactaaaaggtctgtagctaaagatattaatcataaaaattataatttattaatgactatatgtatttttagtcacaatatttgttgtgactaaaactaaattagtgacaacttgtatataaata

SEQ ID NO: 308507 - DNA, 2313 bp, Cannabis indica
ggctgactggccgggctcaaacccggttgcggacgatccggcttgtggcccatcggctcactcgttagtctatttcaaggcctggcgagtccgtctgactgtcttattgggcccaatattgttggatccattattgatgggctcgtctgacttgcatattggacttctacaaaaatatcataaatattaagcaaaattttacctctacattattcttattacatttcaccatcaatgtatttttttttattattataattctgctttttttccttagcaaattgttagctgcattagaatgaaggccgagtgaagatcagggggatgagtagcaatttgggctgggttaggcctatgtataggcccaccaagcccaaggcccaaaatatgggtccagaataaaatagaaagtgttgtgatatcaagcgacgacagctcttggttgggtcgaatcgaatgctccttcctgcatgtcattttgatgagcttcaatgtcgttttgctttctgggtacttcttattgcttccattactcctgtaagtgaagtgactcctttgatattacgtgttcggtagttcaagttcagtgaatttgaatctagtctttcaattgttgcttaatgaattaccatttatttcaattgggaaacgtataattttctgcaattacattcatggtcttggggcttgaattgcactcattcttcataaattgtcaatttttcttctaatactcgttcacactgacttattcacaagtatgtgagctcgtgttcttggatttcttttggaaagaggtcatttgatttttagtttgttttatgtagcaagaatagattactctgttttgaatcttttctagaagggtgcccattaagtttaaatctgtttatggtaacaaataacaagttcagatttcgtttttttttttcaaaagatttttgttttttcagttttctttgggtgagaagtgtatatgtatcattactagtcatcaagttttcatctttttatggtaggtatacaagtgcagatttttattccgttgtttgagaaatgtatgatcagattaagatttttgtgattctaaatctacttcatggcctctgggttatgcttataattaaacttttctatggctagacaccaatttagttgggagagttcattccacccttctaatagaaataaatgtatattgatttcagcctttaaaagtaggattggttctttgtagtctgaccaatattttctggccctgtaagctttaatttctttctcaattaatatgccttccattaaatattgtttgtgcagttataacttaaaacggatgccctgtttgttatgcattttggaggcatttttctttttagtctttttttttttttaggttccacaatttgtttgaggatagtctttttgtgtgtttttatttgataaagtctaacttttagtagtttattctggtataaactatagattgagcttcatttgcaaattttagaatcatttcgttgtgtatagattctatagaagggctactatgttaattttcgggaactttatagtttcttttctttttgaagactcttgatcagttgacacttttggccactagcaggactactttgagggcttcaaaatactgagcaatattactaacatgtaaaaagtcattaggggtctctaatttagcagtgttttaagtatgacacccacaggtcttatttaaaagaagttcagtgtttctaattataaaggaagtataggactataaaccctggattaaacttaaatgtaactttctgcttttgtcccgattattggagcgattacttgtcagcagcacacgacaaaatcaatgatccatatatgttatccaattgcttttagcacaagatcttcgctgtcgagttacaacaaaatctgttactattttaggaatttctgtcattctttccttaaaaggctagtacaatctttgtctgtgactctaatgtgtaatctgatgtttacatggcaacttgtgcaagttcattgaatggacataatttgtatagtggtttggtttcaatgtaagattctattgaatatgcttagctgcagatgtgttacaccaccatgatgggggagaaaggatcttacagtggcaattaagaaggaaaatatcttatagcaacatggatatgcatatgtaaaacccatgtcaatcatagatgggtaaaataactagagtttattatcatagaactcctatctgcatatatttctagataacaaagaagagaagcataaacaaacttttcatac

SEQ ID NO: 308508 - DNA, 2574 bp, Cannabis indica
tctcttctctctctctcttctcttatatatataaatcttgtataaatatagcagctgattttgtgtactgatggtgtatatgtatacatatgttattatgatttgaaatcagatgggaccctattaatggcatgttagagacccaatatacgccgcagcccagcatgaccagacacctccttaatctccacgtagaggtttgtcttccttttcctattccttgacacaacatatcaaagattatgatgatgagagagtgagagagacctcactaaaatattccagaaacatgtagtatatatgtgaaaattaaatcttatattttgcacttgttttcgtatatgcctttcataaatcacaacaaattgtttgaataatatttctaaccatgtaaatcattcaaaaataaaattaaaattagtaagaagagctagcacatcaagattcaaactatatatactaacggaaaactccatagtatgctgatttctctcacaaatataagaggtggcaattcaaatcctactctcccaatatctcaaatatatagtatatatataacattttttttctacgacattgttgatctctcctgagagagtgagtgagaggaaataaacccaaataacctatattctaaatacataatagatcacaaatatgattttttttcttggagaactattatgatttttatagagttttattctttaattttttttttgaaaacttttcctttgattgtaaaaatgatattgtgaatgttctcatttagttgcaatttttgtttatttttttaaaacaaatttacttatgtgattgatcatagataggttgcaatacaaattaagatctctttagctaactaaacatacaaatattaatatagattcttatagaatatatcattgaatactttgccaaattaattaatagtgtcacattaatattcctacaattcagaaaataataattataaaatataactataataaacaagacatttgtaagtatgtttgatttacaaatgtgataatatttctgaagaaaaatcaatcatatttatttaatagcattatatatagatattggagtttaatttcttaatctctcctcataataatattaattacaggaatctcatcaacacacgtctaagaatcaaaagcatagaagtaactcactgggtagtagtcagaattctgaatcaagtgacactcaagaactagatttggagctaagactctcactttgatcgatggtgccatttcattatatgattatgagacattattaattaataatgttactagctatctctctctctgcgccatgcctcaaatattaatgcacacgtatgtgggttgtgaagtaataatgcacatacgtatatatatgttggttcttaatttatacaattttttatgctttatgaatataagtacttggaacatatttgcaaaaattaatgttcgagcatgaagttgtctcatcatataaacatatatatagttttgccgaatatatatattgaaaaaaaaactacacccaatgaaaactcataggagtgtaatttaaaatgctatatatatacctgagatctttgtagtaaaacttctttaatatttataattgttatatacatgatcctaattaaaataatatagtggtaaaactactttagtttatgattttgttacattcgtgtcctttttaagtttaatgttaattcagaaacatatacatatgacaatatattattagattatgtatgaaataagttaaaaaaatacgttgttacacgtttctaaactaatatttaacaggcttaattgacattcaacaatcaaaaaatagtacgattgcaataaaattataagaaaatgtatttttattgtcacttttttttattaggttaaaaaaatttcatgacaaatatatatagctatgattgggttttcgcactttattccagttttcttctttaatttctttctttttctaaaccaatacaattttagggaaatgttgatcacttcataattatttgtagaagtaaattaattaaagttaattagaataagaatctagtcacagcaatcatgttgtccctttcaaatttaacttaatttgtacgtacataaataatgtcaggttcattggtttaaggaactctaagattgatcatgttgtctaatagtaaaatacaaccactttattaaaacaagatcatgaaaaggggcacaactaacatagtcatggctaggtacaatatgtgctacttgcagggatttttaattgaaataaaaagctttttctataggtttaggttaaatcctgacaattactttaaagtttaaacttaatttccacttaaaattagagattccatttttttttaatagaatatcaagtttaaatcgaacaagagtgatattttattattattttttaatatctaattaaaaataataaaaaaaatcagattctaattattatggtggccggcatttggtgtaacacttttctaattaattttctgttttaaaaaatgaaaatatttttcaaaaacat

SEQ ID NO: 308509 - DNA, 3144 bp, Cannabis indica
taactgataatataatgcaaaaaaatggccaaaaaaagataatagggtttggattttcttctatttgtggaccaattccactctacactttaattttatttgatttttttttttatatttgactctttttttttctctcctttttcttttttgcttctccaagatttctatttgtttttcatatttattatgtaacgttatacaaatatcttttattacttttctctaaaaaccaattgaccattaatgtcttattattctaaattttgaaacatatgttctaaccgttctcatatacaatgtgtaacccataaataataaaaaagaaatttaactatttaccatatattaaaccctaataccacattcctctatgaaatttgtgaataaatagtaccacaaagtgaactaaggaagagcacaaaatattatttgggatatgttgtctcccattttgcacactagctagtttttctccttagctctcgttttttttttttctttgactcaacaagccaaaattatgaccagaaagaaggtgaagttagcttacatcaacaacgacgcctctcgaaaagccacttataagaagagaaagaaaggtctgataaaaaaggtgagcgagctgagcaccttgtgtggtgtagatgcgtgtgcaatcatctatagcccttacaacactcagcctgaggtgtacccttctccaggaggagtacatcgtatagtgaaaaagttcaagaaaatgcctgagattgagcagagcaagaagatgatgaaccaagaagttttcttgaaacaaaaaattggaaaggtgagtgagcagatgaagaggctgaagaaagagaatcgtgacagagagctgaatcgactcttgtatggaaatctctctggtaagatgaaccttcaaggcttgactgttaaagatttaaatgatctcacctcgcttattgatcaaaatttgaaggatattaataagagaatggaagaaatagccaaaaaaactaagattgctcgaatgacagcagctactgcagcaaaagtgcctccattcataaatggggaagtaaacgctgcttccgctactactatggcgtatgacaatgatcgtggcaggggcataaggagggatttaaacgctcaaaattaagctaataacaataatttgatgaaatttgggaaatcagatgtgatgttttcattggggaacaacaacatgaactttaattaaatattgtttagttatggcgattattcatgtttatgagttatttgtgttagtatggtattttattttattctcttgttgttgttggtcgaaatcattgttaattttattttatgttgttttaataagtaatatgagtgttattggtgtcgttatgatgtagttttcatttcaatgaagtttttattttagttatttattgttttatgttgttgcttgggaataatgaggaattttgtttagattttatggttttattattttattataaacttttatagggttattttttaccatgtgttttataaaagttgttgattagatctcttattttattaaatgataaaataaatcttatagggttcgttttgtacgtcgtattgtattgtactgtgttaaattgtattgtattagtattatttaatacaatactatattcggtattgacttgtattaatagattgtgtaaagttataatatattttcaatacacttgaccccaacaccaactatatgggttcgggtcgcgggtctcaggtctagggtccaagtcataggtctgggtccgggttcaggtttgggtttgggtccgggtctaggtatacgacccttatatggcgtactaaaagagcccatattttctaaaatagtacaaataagaccctaaacgcaattttcgataattttttaaatataaccaacttaaagatagttcctagtacgaacaaatgtagaaaatataaccaattttatcataacacatctagattgggttattatttagttttattttgataaaaaaaaattagtttataataatatctagtactactttgaaagataccgagtcagatttattatttaatataataaattgttcaatcaataaattttacaaaatataggtctacaataatataagcatatttttatatgaaatcaaatttaaccacaatgtcattataaaaaattaaataaataaaaatattctctttaatattgatatcaatatacaagaaatttcgaggaagcacactttaaaaattaattttttcattttaaaataattaacataattataataattagataattgaatacattttaatgcacatatataacaacaacgtcaaaacactcacaaaatatggtaattttaaattagaagttatacctatttaattgattttgttaaatgtaagattaattacgctgtgacatattatattttatcaaaattttaatagatttaattgctaattcttgtaacggattatatattaaataattcattgtttaagattgttatatgtatagttcattgtttatgattgttaaataattcagaggtgtgcgtaagcagcttccgaaagtaaggccatcctagatactcttttaggttcgagtccaggatgacccctaaaggcatcctcgttaagttccaacatttcttatctcttgggtgagggatgagagatgacctatcctttcggaaactccaaagacccataagatagagtaggatccaaacatcctgggcactagatgggttgtgagagatcatatgtcatatattctcaaaatagatataacaatatgatatatttatcttattaatatgaccaatttacgtattaatagtcttaaattgattttttaagttattgattagtgtgattttaattgtttatgatattttaaagactaatcatgcaattagagtcatttagagggataaatagtggaagtcggcaagctcggttttacaaggcggagcttaattacaaattttgacaaccttagaagcagaactggacttagagctcaacatgaaagctgttttagatctcgttcttagttttcagaacatcttgaatcgtctaattccgagttgtattgaagaatttatggccaaaata

SEQ ID NO: 308510 - DNA, 2924 bp, Cannabis indica
ttttttaaattatttttattttctttctataaaaagaatacaacaaaaatataaacaaaataaaataaaaatacatcgaattttgaaagactctctcatctcagctcaggaacaggaattcatttgctgagaaatgggtgttacaaaggaacaagttcactctactttgacctccaaattgagccctatacatcttgtaagcttcttaactttaaatttattttctgcttatcagaactaccgttttcatctttagtctcatctcgatactgttttgttctcgtcctaagttttgaattcgacatttctataaatttggattggattctgctcaattattgaaaaatttgaatgtttaggtatgtaatatcttagttagggtttttatgtcctcgtttaggactttaattgtgtattcatttatgagtaccgttgtacttttatgcgtggttgactcattttacttttctcctaccaccctaccacttacccaattgcatatggtaaaatttatgaagaaaagcattaattttctgatgcccgtaaagattatggctgaatttgttctaagtaaaattgcaaggcataaacgaagttgccaaaagaatattcaagtcttacatattttatcgatcaatattttttctttttttttttgatcaactatttagtagcaataatgtgaaggttgtactcttagaagtagaagatttggaaaatattgaaaggagtgttaaactcacttcacttgcccccttttctttaagtaagaagactaagacatgtgttttactttccgccttcttgaaacaagcaaatagagatgtaatcatgtaaaaactagttattattaaaattaatatgtaaagaggttaggtaatagatctattcagttttttgtctccttcaaattttaattgacaaattatttatgtgtttgttaaaatatttaataattgattttataagaagaatgacttcacaggaatgatgaaaaatgtgaatgactgaatatattgattgccaattgtgtaaatagatatgacacatcttcactaactaaaacgagaataggcaagagagcttactggcattagcatcaccttataggatagagagacagtaaggtatgagttttgaaatgaattaagcaagattacatattgatttgtccatggctcgtccattgattagttgccagaattgtatcactttcagattgagtcttgtctcttatattgttttgtagctatcgaatagttgttcgctaagcactcacactcccaaggtagtgttatttagaaatctatctaaacatactatcattgcataaagcttctcaactttggtttgaggtaataggtgatttgttatttttttgaattaccaagtgatcattggcacacttggtgcttaattgagactaagagtctcaataccaagagataaggttcaaaccttgatctcatctcaattcccaattcccctcaccattagtccaaacctattgacttttttttttctttgaaactaggatctcagtctaagcttataatattttgggacaagaaaactataaaaattactatgtaggtaccaagtgtgtctaaccccttataatatttggggactagaaaactatagaaattgctatttctatataggtaccaggtgggactcaaatgtcagatcttgtgggagcaaattacatgccttgcctgaccatttgagctacccctcttggggctagtaacttattttttgattactaagttatgcagcaatagctataacattcaattgagacccaattaagatatgacaaatcaacttatcacttggctgcctaaatttggtattataaatgggtatcacaacactgttcttcaactaaaagacatttataaattacaaataggaagcgaatgtcattataacttcttgattaaaatttgaataacatgttggcttattggtgatggctctcttgttactagcaataagttgatgatagaaataagaatgtagcatcaatacttgttgctaagaatgagtccatgatagaaaagtttccctttttcttttgagtatggtttttgttccttccttttttcggtagagatctatcatcttaaagaataatttttattcttgatgctttcttttcatatgggtgattacttctcctatgtaaatccctgtgcctttattcaattgtaaccttttttcatttgaaatttattctcttctctgtatttttgttgttttcagggagtaatcgatacatcgggaggggtatgcttttattcacaaagatatatgcttatgtttagatttctagtaaagttatccatttctcttctaatattgttaaagaattatcctttttcttccgtggtaacttttattgaatgaatatgttaatcagatgcggtgcaagctttgctgttgaaattgtctcagaacaatttgaagggaagaggttactggaaagacatagacttgtcaatggtgctttggcagaagagatgaaggacattcatgccctttcaattaagaaagctctcacgccagagcaatggaaacaacagcaagagtctgaaaattcaaaaactgcagcttaaatatgctttctcatcacaacaaatcagatacacactaaaacatggtagatcataagcacgaaattgttatgttatattgttttgtgcgagggcagtgtcactgagccctcctctcactcgcttttaattgatgtttctattttttttaacaaattgatgtttctatttaaacctcctctaacttatgtctttaatttttaccctcttttttaaattatattatctttacctatttttttcattttttataaccaattttacttctattacttcacgataattttcattattctctaatta

SEQ ID NO: 308511 - DNA, 2311 bp, Cannabis indica
ctatatttttagaagtattattttttactttttttaaatagttaaaaataaaaaattaattaaaacaatattacctgtatatcatttctatagtttagaaatataaataaagaatcgtttgtttatttaaacattcatttatttttgttcttttttttttctttcttcccttgattattcaaatatttttgtccttttactttctcagtaggttgattttctcatgtggagctttctcaattattaagagtccgggcaaaaagtgggaacttaataagaaaaaaaacaaggaatctgaatataagtataatttatctaaaataaaaataataataataaaaatagtgagacaagagctttttattattattattattactttgctcttttaatcccagagcttttattccctaattaaattataccattttgacgcagaatttgaaattgtcagaatttggtatccatatccaaggttttttttttttttaagcattttatatattacttataatttggaattagaacatctccatcacactcacccttagcctcgagtagtttttggtatcaaaggttaaattttatgctttgaagatttaaatattcccttgggataatagtttttctgtcctatatatatttatactttgttgttcaaaaacgatttcataaatcctaaataatagatcaaatatagggagattaattatgagtagtaataatgaatgagacgactaaaattaataacaataacttggggatccttatagaagaatgagataataaaaaaaagttgagagagagtaaattaccaaatggaaagtgaatcgagagccaactctggattctcaagcaggccagcaagaagaaccaaaatctgaaaataccaggtttccaggcaaagcataacggcagaagcggccgagagcttgaaaaatttcggcaacccggaaaacgcttcccaactaaacccggcccaagtctccttacaccgctcgctcttcacaatataaatgaactgggccaccacaataatccaccaagagaagctcagaaccaaagaagcgcccaataagcccatcccaatcttgtacacagccacccaactgagtactacgtggaccaccagcgtggctgccgagatgtacgcactcggcgccacgatgctctgcgcctgcagaaatttctgaatcgggaagtttacagcgtaagcgaatatttgaggaataaggccgtagatgaacagagcagccgccgatgcgattctctccgactccccgaggaaaaccaggaaaggcttcgagaaaatatatacgaacgtgagaagtattccagtgagggtgaggagtatggttgatctctgtagatacactcccagcattccgtacttttgtgctccgaaggcttgtccacataatgtctcaactgcgcttcccattcccaactactccaatcataacaataaatattaatttttttttaaaagaatagaaaaatgaaaatctattcacgaagaaattaccataaggccgtaggcgaagatttgaacgccgttgttgccaagagaggaggcggcgagttcgaggtttccgaggtggccggagatgatttgagtggacatggacataagatagttgatcatgtagacgatcacggctggggcggcgaggaagaagagtagacggagctcgatctttaaagcaggccaaaaacgctgagcgaatgggacgttggtgttggagagtattgtttcgagttggccgctcgattcgtggtggccttttccaaaggacgacagaataatttgcggcgaagaggagtggtattcatgattaaggaggggctgttgaagcagcggtcgtcgattatcgacgtcgtttgccgaagaatccattagggagttaattggtaattggttgaggctagctgagacgtcctactctttttctctttggtgcctttcctatacatatatatatatttatagaagataatatacgtatgccacaaaaaatgtgttgcacagaccacatgggtcggatcagatccgactagctatcagaattttataaatgtacgtatgaaaacgtagacttgattgctacatggagaaatgataaccaagagagtgttcaaagagattacttgcactttgcaaataaatatttattattatctattagttatagcatatatagcagattcattaattaaaaactatttcaaaacaaaaatatagttatatatactaagttgatgttacatgtaatgcacttatatataattaatttactttttaattaggtga

SEQ ID NO: 308512 - DNA, 1836 bp, Cannabis indica
gggatgttttttttggtgtacttttgtttttttttaatctaaatttcaacgctaaccaccttccttcgattattattagtttataattacttttttcgtaactttttttttttttttcatttaattaatggaattttctagatggggtctctgaggttttcttggtatttcaattaaaataaggattacatatatctgtagaaaatatataatggggttaatgcgacaaaaattattttcatgggataggtaaaaccagattagttataatataattggtttgatattggtaacatttcccaataagatactacttacttatattatatacatgtgtgccctaattaacttaattaaggataaattattatagataattgtcattattatatcataattaagatcgatgctttgaacatataaaagaattatcatgattgaacgttttacatgttgtatagaagctatagaaagtaaatgcgaggttaaaaaacctatctaattaataattttgagcctcatattagagattattaaaaaaaattatcaattacatttaaattttttgaaaaaaaaaaaattactacaaaaatatagaggggtaaagtagtaattacagtgtttgttttttttagaaagacaaaaatttataagtcgtaaaatgtattatattttggttactaaaatatacaggtttatatctatatatttataattttgtaggtagtaatatttacagacaataaaaatttgtaacatactttcatcggtacttctataattaattaaaaaaatactaaaaatgcgaatatattctaaaaaattgtgcaaaatgtaatttttttatttttaaaaaacaatttctaatgcaagttttgattagttggtatcacttaacttgctacttttttctttttggtgttgtattatttggttattcattttaacattcatgtacaaacacatatgttgaccccaccttatctgtatcatcaaatcagatagagtgtcaactcgactaaacatattcacatttttctttaagaagaaaaaaaaaatttgggccacgccacgtgttcaatcaaggtccatttcaaacatggaatatcaccaaatcttagggcccccatttcgtatttgagcccaactttatccaatatgggctatttggagcccaataaagcccattaattgtgaggcatgttaggatttgttgatggtgaatttattaggtgatatgattattcattttatttttgctattattatttactgggaattaatgcttttgtgtttttcctttttggtagtcattgtcataacatggcaatggtaataatattaggttgtacctgttccgaccagatatattaatcgacattcatttatataatataataacaaaatcaaatcatggttgaaaattatggagtttttagctttattatgatataatcaaatcatgattttgaagatatattactgcaaatctattcaggtgtgcttacctaacttccatgtgactagtgatatatgcatgcatatatttataatattattactataaattaaatatatcattagggttaaagaagttgatatagctacaagaatttgtaattttataggtgtaacattaccctactatactttaaacattaagaaataatataataagatacaaaaatgtatgaagcaactaatatattgtcctggttggctcgacttttaaaagttattttcgagcttctgaagctcaaaatatatattgtgacagtcagtagtcccgtgatccgtaaggggaaatatcgggtaagctgtgcaatcccacaccgc

SEQ ID NO: 308513 - DNA, 1362 bp, Cannabis indica
agtacatatcaaagttcgggggaaaaaattactaattagcctaatattattgttactaagagtacacaaatgtgatgtaggtcaaattgattgagtcaatataaactagtttgtgaggaattttcatttgtatggttttatcttttttttttttttgcaaaaatatcatttttttgaaaaaaattaaggaaattttttttataatttttttaaaaaattagaaaaacaatataaggtaactggttacctaagatgagtagtctttttattgattttttatgcatggaatacatgtttttttgtacaattttattccatttataaaatcaaatcctttgctatattattcccttgaaacaaatattaattaaccctagctataatattaatttatgcagctgatttccaatgacaagttcataagtgtgactcatagagtggtggccaaaaatgttgggccaagaatatcaatagcaagttttttcagaacatatggtcaacaagaaatgagttctagggtttatgggcctcttaaagagttgatttcagaacaaaatcctccacattacaaagaaacatctgttaaagactttgttacacattactatatgaaaggcctcaatggaatctctgccctagagcatctcaagctatgaagaataatttaattgggtggcttataatattaatttaggtgtgttttagtgttggtatgtatttaattatgtgtactttgttgtagttgagggtgatgcaaatttattaggattatttgcagcgaaactcttaatattatgattttatacatttaattctcttattttttagtggcaaaattcctttaatatttacttttttcgtaaatgtaaaatattagttggatatcattgttaaatattaattgaattattgttgtattattttcgaagttttactttatattgaattataaataatggatcaaatatagtccaaatttattttttatgtgaaatttaacacaaattttacatctttcattctaaatgtatttaacacaaattttacatctttcattctaaatgtattttaagatgttctttaattagcatttctcataataaagttctattaatatatagtgtattaattaattaatttgtgattattttgatgcagctcataaacaatggtgagttcaaaagttgttatcacatagtggtggcacaaaaagttggtccaagaatatatctgtggtcattgttttcagaaatattgtgacagtcagtaatcctgtgatccgtaaggggaaatatcgggtaagctgtgcaatcccacatcgcctggggaaggtcaagtgggatgattctgagactgtgtagg

SEQ ID NO: 308514 - DNA, 4786 bp, Cannabis indica
tgctctcttctaccgattgcaagaactaatgtggccaaagtgattttctaatatccaaatgactaaaataagatagaaacaccatcaaggacttcccataatccctggctgaccactgccatatatcttttggcactgaatgatggaagttgtctcctgttaggatttcagatgttgaaatgaggtttttggtgtcccgagacctccaaaatatgattcaacatcaaaaaacaagtcaaaacacactcggaaggatccaggaacatccatggccaagaaatgccactttgatgtggcaacggtcagatttggagctaaaaggtacatactacccttcggtaatacaagcattactctctccatttttctccaaatgacttggttcaacttgcattgaaaatatatttttaagacaaatctaagtttgtcgcatggtcatagctcaattctaaagttatcatgctcaaaattggctcacaatataggttggcacactttacttgggaattgattggttttattgtgtgtgagctacaatgggatgtttggagagctatgccacaacccatgtggcatcatgatcgagaagtgccatcccaaaatacttctctccaacatttctctcccattgagaaaattcctagccgaggggtgacatcccttgtcactcctctccaatgtttacatttccaaagcacaatgccacacaagcaaatttaaggcaagaggaatatccaacttcaacaataatctcaatgtttgtagaatatttgcctagcaataaggaatattttcatagatatttatttattcctatttttattcattatttagaatagcttacgtgatttgaaagtgagacaccccgacatgtgggagatcactaacaaaccctaggcctatataaagatcgtgataggctagggataagggaggagatccttgagaaattgaaatcttccttcacgttctaagagcttcccaaacttaaagaccatttgagaatatttccttttgtatcttcttctttgtgttcttcacggcaccaagcttctattgttgtaccctcgataaacatcattacttcaaacacgtttaccaaggaagagagaccattctctatttctaaccatcatccttatcaaatttatgaatgttgggtctttcatgagcattgtattcatgagtctcgatagatttcacataaagaacttttttgtactactatccacatactcttgagaacataactctggtgtgttgaatccaattgataaaaacaaagtagatgtggcctcattaacatcgcgacatagggggtgaactaatataaatttatgatgcttgttgaccctaaattttgtcaactgatagtggagtcttctaagcattacgtgtgagttgtaatagcaaataatataagtgatacatcaatttatagaggttcggccccttgattatagagataataccacacatattacagacttaaacttgttaatttctagttatgactctcttagattgtacagtagtgagaattgagtgttacaaattcagaacaagtgagacttaatgaggagaatagactaagtgtctaatgaagaagtgaggaaacgtgagattgtgagagcaatagagcttgagggacttagaattcagatcctttttcaccttgcataatgccatttatataatactggggttacaaaagatcattattcaaaatgagtaaatatcccttcaaaatagggaaaatagcttttctatattatatttaaattacaaaaaagataaattaatatccttaaaggataggtagatattagcttgaagaagatcacctatttccatagtcaattaaggttatctcgtagctaaattttaacttgctgaccccacatccatctggcctctacataaggcttatttgcacatgctggctgccagccctatttatagggcttggcagtcacacaaaagttcattggctagccagggtttggtccagctagggtccctggttggccatttgtcccttgctcggtcctgcttgattgctttaaacccttgacaatcgatgtgctgtgcaaggaagatttgtccaatcactgacaagttgtactccacgtggccttagttttgcccatgtggacatgccacgtcaagtgagaaaaaattaggataacaatgttctttttatttattgtagttttatttagcaaaatcaatttatcgcaatcctcttatttcttacgattttcttagatcagttgatgaaatatcgcgtcaacaggtaggggaaaagaaaagtaaattttgtaaaaattttgggttttcaagtattgagctaaatagattcatttattttctctcaaaggaagaaaaatgtattggaaaaactctacgtaatttgaaaatacaaaatccaaagttatagagatcgtcaaaaccataatgtagcttaaatcagataaaaaaaccctatttaaattataaaataaaacagaacataccataggacgcaatttaagatattaagaagaacatattgggattagaacttaatgatgagttggatggagtttaacctgaagcttgacgaatccaaggcttaggaatgaagcattttttgggtttcaaaaaatggttgcaaaaatgtggagaaaaaagcaaatagataaagagggcatacaaggggaatgctttcagttctgtgctttttctccttagataacagtggtgaaaatagtggtaagaaataaaaatgacattcttttaagcaaaatcgtaagcactgtatgattaaaaaaatacttaatcaaggatgattagcttttgggtcagttgaaaagacaaacatttattataaaaactatgattagctcttttatcgggaagacaaaaatcgccaaaactaaaaatttaagaagcttactcgatacacaaaagacaccatgcgataatgatttaaaaggttttttttcaaaaataaaaattactttttagagggtaattgttacacccatattttaagcactacatatgaacatgaaacgtgtccatgtagacctaaaagaataaagatgataattaatacgaggaatgaataaatgtaccgtctcgagatgaactactattaaaagatgtaatgagctcgcgtggcacaatcaatacaatgattcatgaggataacaagattataagctaaatcctcagatttgactgagatgaggcagttgaatagcatggaagaatgagttaagtggaaatgctaggtaatgagttctttaagagcttccaactcattgatccacatacccgtgagtgtgttgaaagactaacgaaaataagcaaagtataacttatctcagaatttttatagaatagtccatgaattaacgtaaaaagtaattgcaaggacaaacatcttaactagcatatcgtggaatgcgaccacctcttcctgaacaccgttaaagaatgcgagccaaagttggagtatgttatctcagtaaagacaaactacttcctggtaagaacaagaagcgattatcagtagttatatcattttatccacatgttgtaaatataaaatgttgtgattgtctatgttttatgaatagttacctagataagattaaaagagaacaactgacattcctaaaattaatccttataaatagagacaaaacctatggaaaaaggaatcggtcatttttggaaggtaaaactttgtgagattgagtgaacatccaaagaaattttcttgtaatcaagaaacattgtctagaaatacttagaaataatactgactcgtgaagtatcatgtagattttaactacaaaatcacttaaaagttattggtatttcatctatatttattaattataaatagttaattttttatttacaaggcttcatttattgttaacgaaaatttgagttaacacattaaatggcgcctccaaatttcgcaagcaatcaaaatttttctcaaactattgacattattgaattcaaagatttagtttcgtttaattttaccaacaaacacttgacgtgaatggaagttcaaggagtacaatttaatatataaaaaatcgtcaataaaatttaagtattgagtaatttgcggcgtaaatacctaagtttaactgtcagttgcaaataaataaagttcaatttttggcggtaataatacttaagttataattttggaacttctgtaggtaataaattgccacgtggcaatcgttgattggtccaagtctttaaatttttattatttaaaaacaaaatcagatataccaataagaaaacgacacgtggatataatggattaatatttaacggttaggtatctacagagtttcagaactataacttaagtattattaccgtcaaaaaattaaacttagatatttatttgtaactgagagttaaattttagtatttataccgcaaatttatttattaataaaattaaacaaaatgacacagtaatttttaaatcagcctaaaaaaattgagaagcatatacatatgaatgaaaagaatcttaattagtttatatatggatatggtacttaattgtatcaattaatcccgagatagctaggttgggttgggatcactagtgtcacgggctcaccttttcaggcagcggaacacccgtgcggcaccttgacttctctaaaccaaggtcagccttccaaccatccgagtaacaatgggctcatttttcgcgcgaccgtgtgcctcgtgcacacttccgtctctcgaa

SEQ ID NO: 308515 - DNA, 1841 bp, Cannabis indica
ttttatgtactttttccatagcttagacaatttcagtatatagaagaaaatcactttagaatggaatagaatttatttatttggtttctcgtattttggtttcacattttactacggaatctcaatcacttttcatccatctaaaaaattgatactctctatagaaatagatgaattcatttgtgaataaattttatttgtctttttgtttattattttattttattttatttggaaaaaagaagaaataatttacgtggcactcagtaggatgacacgtgtcgtacaaatttagacttagacggagtatactcacttttggttccgtccagatcaagtcatagccaaatcaattaagtctgaacttcagaatgatccatctgcgcaggccccaagtctcgcactactcttagtagatcatcatgtcaagcaagtgtcactctccagaaagaagcatacaactgtaaagatctttagatatatttttcttaaatatctagacaattacagcccatttaaaatttccacctttataggattgactttatacgattaaaaaattatgggatttgatttcagtttccctaatttttctcatattaactcgtaataattgtatatgtaattgtcatataaatagtgaggtcatattactgtttaaggacttcatttttgcattctaaagagtagtcactctgcaaaaatacttgtaagctttttcgagattatcaaaaaacttatttggtcgaatcttgtgatcttgataattctctataagtaatataactaaaagaggagtactattatccagagtcaaacctctataaatcgtgtgtgttctattgctttattttattaatattattcaatcaatcaatatcatcactttaaagatttagcctcattggttagaagcaagatcaacaatgtgcaataatgtatttttttttatttttattaagaaaaaaaaacaacaaattattatttttagttaatatatttaaataaaagaaaaaaaaaactacaaaattgcatggttttgtaattaacaattagaacaaaatatttttatgttattattgacctcaaaattctctaaacaagagtctcgtggtcaaaatgataatagagagattcgaaaaaagaaggatgtccaaataaggctatcatcttgggacaaaggccaaagatcacaaggtcaccctgaggggaccacgtgtcgcgtcgttggggttcccccttggccatggtgccacgccactgggtgacctcctctccatgttttcgcaccattgggggttcctcccttcatggggtgctcaaggttcctaaggaggaccctcctcctcgcaccaatcgatccccaaagaggacccctctcgtgccatgactttaaggctctagtagccattcaatagtctaaggcccaaaggaggggtcaccacctctcaagaggtccatgcctccaaggaagggtcaccacctctcaagggatcgaagaccccaaagaagggtcaccacctcccaagggatccaagaccccaaagaagggtcaccacctcccaaggggtccaagaccacaatgaagggtcaccacctcccaaggggtccatggccccaaggaatggtcaccacctccaaaggggtccaaggccccaaggaaggctcaccacctcccaaggggtccaagaccctaagtgtaacgccctattctatagggacgccacatgtgtgattttataaactaatttaatactaatagaataattaattattaaaaactgttataatattaaaaacttgactaaattaaaatattaaaaaatagacattataacggc

SEQ ID NO: 308516 - DNA, 1692 bp, Cannabis indica
taattaagggagaactatttacgaatattacgctatacaaaagcacctttggagaagttcaatatctatctcttacaagacttgatgttgccttcatagtcaacaaactcagtcgttttttcaagctcccaccactctcactgggaagcttgtaagagacaactaagatatctcaaaggaattattaaagatggtatttgcaccccacttgcctctgccatgactcttactgcttacccaaatgcagattgggctagttgtgttgatgatagaagatctacgggaggttatttttttggtgacaatcttgttagatggtctgcaaagaaacaacaaattgtggcaaggtctaatactgaaagttaatttcatgcattaactaatgtagttgctgaacaaatatggattcgatcgttgttgtgtaagttacaagtttccttagttcaatgttttgtaatttgggtagataatcaaagtgcaataactctcgctaccaaccctatttttcatgcaaggtcaaaacatattaaaattgatctccatttcgatcaaatcattgacaaacaaatctccattaaatatgttcgagttcttgatcaagctacaaaaatcttaacaaaggctctgtctacagaaccttttctctatttaaaatcaaaagtaaaatttatgtccacaccaattcatttgaggggatgtaaatagagtttctgagttggataaaaacagttagaattatcttttgctttctttaaaaaaaattcactcttaatttctacagccattataagtttattttttatttttttattaacttccattatagttgttgtgttctatagttttcaaatttggagtaacactatgcagcagtacaccctctctaagaaatgaaccaagggaatagaaagttagaaaaggatgaagaggcacgtctcataagtttatcgccatcatatcattgtttctgttgtcttgggaataaaggagaaacagtgtaaatgacagaacatggacttcagctgaaaaggcatagagctttttctttcttcttgggtaccatgctcgtataaagtcatataaaatatacatcagaaaataaaaaataaagtttagtgaatttgtaattatgtaacctttggaaaacgagtatatataattagattcccacacctatcatttttaccaatatccaagcagccttattattatgagctctctttctttcacttattgattatttggggagttgttttgtccacctcttataatcatgataaatatagaaaaaggagtcttgaaaaattctatggtaaaaaagacaataagctctcataaaaaaaggaaaaaagtaaaaaaagagaatatattcttgcaatgagtaggatattaatatatatatttatatatttcattttgctctgaattagaatgtatactttagttttgggagtcatcgttttcaaaatcagatgctcataccattgcctaaatccttgggcgatgaaagctggatagcattgaactagttactggatatgatgaatgtttaaatgaaaaaaaggtaataatttgagtacatattataattagggttgttcatccgatccaatccgcacttttttggtcaaacaacatctaatccgcactaggattttattttttggatccaatccaatccgcacaatagct

SEQ ID NO: 308517 - DNA, 2437 bp, Cannabis indica
aaaaaaaaaaaaaacaagaatgcaattctattttgttaaagcaaatgcctatatttaataaatatacctcagaatataataataataataataataataaacaagaaaatttttatgctgttttaaaattaattctttataatccacaagtttttataattcacaagattttttagtttgtagagtattacagtatacttgtatcttctcttagaattctaaatttagtcatccataactttgggattttttcccctatttataagtttttgagggtgatagttatttcctttttaattttatcttcataatcgtttattaaatatggacaattctcacgtttcatatttacaacatctagaataaataaataattgctttcgtctttatccaaaacggttatgctgactaagtttttatgccttgcaacgtatactgacaaccgctttttgtgtttatcttgaaggtagtttctttgtcgaagtactatatccaagatggtcctcacgttctttcatagtgttaggactgactggtcgtgttttgcaagatgctatcctctcaagtcattcatgaatatcttgaggtgaattttcttttactcatatcctttagtctttcaacatacttacgagtatgtggttcaatgagttgcaagctcttaaagaactcattatctaccatttcgagcgacttgttcctacatactctacttgttttgtttttttttactctgtgtattccaatatggacttttttctgttggttgttcatctcgttggtcttaccaaatggtagttgttattcatggctcgtccttaatggcttaaggagaaacttagatacatatatcatttgtattctccgaggcaaatatttaacatatttatttcttcactattcgagctggtttgtttttcagtcttcttacacgtgtcgcgaccatattgatgctcgaaatatgagtataacacattcttaaagtggtttttttttatctaaaattaaattgccaaaaaactaaaataatactataagtgatcaaataaaattatacttaaataaatctcaaaattaattggaactcattctataaattaaatgaaaacatccttaataaatttgataatcttattattattcgttaaaaagctatttattgttattgccctgatgagtagttaagttgaaaaaaattacatacagaatataagtttaatgattaaatatattttaaagttaaaaaatatattaaaataaagatattttggtcatttattccattttatttccactttaacaaaacaaaataattattattcctaaactgactagtaaaagtttattgacggtgagaactcgtcaactaaattttagttagaaaattaattgcgaagagttgaggatgaaaagcttaagaaaaattaagaacattcagccatcaatggagtaaaatactgttatattgaatattagagctctcttacaaatggccattttctagctaattacaagtatccaaatgaggtttttatacttaagctctaatgactctaaaatacaagttgtcccaaaagtaggggacaaagatttgattgtaccatgagggtcagtgtgatggaggggtaatgcaggagtgttggtcagatgtcagcttgtaccttgagtgagacaaatggtatcttcactacttgtacttgtcatacctgttgtacaaccacctcttctctttaggccatatcagaggcgtcctagctttaatagactagtcattggttgtacattcctttggtgttcttcccatcatagcttatacttataatgagggagcaacacttaataatttggctaagtgttattgctcccaagtgtggagcaagtgataggtgatgagcatgtgagagtgatgtgtgggaagataagatgagaagggaaagaggagtgagagagtgggagagatggagcatggagggtgaggaagagagtgagtgagcaacagggagtagggaggacacatgcaagcgcagagggctggccgtggggagctgggcacagggagctcaacctgcggctagtgccccgttgtgcgaggttgtctccttgtgccatggtgacttctagtgtggggtttcatcgtgcaggacgaactcgttttcttttcttgtttacactttcaagtgtatcttggaatttttcctctgatcaaaatcccaaaatttacacctactaattttgggggtcaacacttgccccctagtctataataatacttttaagttttcttgtatataaagtttggtgagattcgtccccattgcacggttccatggctgcccttttaggcgcttatgccttgaggtcttttcaccatgttcctttatgggagagtgttgggtcttggagctatcttggcccctttttgttgggttttatgccc

SEQ ID NO: 308518 - DNA, 1085 bp, Cannabis indica
ttttatcgaaatattaaaaatctaacatttctaataaaggtactcttttgtgaaatgtagtccaaacctatctcggtatatttttctccataattaagcctaaccctaaaattaagagagcctcaaaagctttttttaattcatgaaagggctgcaagtttacgccattattcatgtgtgcaccaaataataacaactaagaattgtcttacttagcttaaagtttaagaaaatattaattggcatcatgaggttttgaattataattcttaaaacatttaaggttttttcttaaaaaataaaaaataaaatttatcaatttgtaagtattatatatttttattcatgtctttttatggacaatatatatttttttgaatgaaaaaaaacttctaattaagaagacacatcatctaactacatagacctaaatcaaatattttttattctttgatcatggaaaataattttaatactaaaaagaataaataaaagaaagaaaaataagaaaaggcacaagaggaggaaagcaagttgtccttctttattttttttttggttaaaaaaatatgtgaatttagaaataaaataaaaatatatttgtttaattattattcttttaggtaacacaaaaaaaaaaaaaaaaatcaaaagatattgattgaaagatggctgtggaaaaatctttcacataccaagaatattaaaagtgacttttgtatttctttttaaaatttatttcgaataactaagcatacctaacacctattatataaaaaaaaataatataatactttgtaatagtattgaggactattaatatcaattaaaatttcatttaagtaaagacattttgaacctatactagcagccagcagccatgaagatataaatttcactatactacgaagatacgagactataattagaatttagaaccatattatagtacataataatatattaattgtaacgtccccgcttcaagcctccattgggtccttacacccacggaaataatggctcttatacacgagtacgtcactctggctgcttcatggactgatgactgaccctacagacca

SEQ ID NO: 308519 - DNA, 933 bp, Cannabis indica
tttggtcttgcgcactattaaatgatgaagtggtcgatcactaaagtttggaattcaatatatatatgatgatgaagaatttaatggtctggacttttgtaaccaaatcccattaggaacctatcaggaaaagtttgaaaaaaaatattttcctccttagccggccattataatataaagaattaatatataataaactataaaaaatataataaccaagtcactgtctattattttgtggtaatggtgttgaatcagtaaatcatttatttttttaatctgtaattcttaacagatctggtgcggtggattcatagagcaaagctgtgcaattggtggtgtagaattaaatgatgctttttggaatcaagaggtgaaaacaattgatacaattataaaaaaggttaaagcaaaacaggaggaagtctagaaagcttgtaattaaatttctcaggcctatttttcgaatataggtgctgttaagattgtattggaagttgaagtaaatacaaactaatctggcttatccaaagaaaacaattataataatataacttagtataaattgatacaaatacctcatctaattttaattaaactatatatattattgggatttgcgtcataaataaatggtgattgttgtgtttacttactcatgtcatctttctctgtccatctcgttctcaatatactttttttttcttaagtccgttagcagcacgagatttagatctcctttggtttgcaagtttcattggtgaaacgagatctagacctagatctcaagaacactgaggcttcttttcgaggtggtgtagtgaagttttattttgtaataggaaaaacccaatagttcggattaaaatgtagaggctattttgctttataacttaaaaattgttttctgtttttttaaaactgaaaatagtt

SEQ ID NO: 308520 - DNA, 1265 bp, Cannabis indica
tatggtctacacttatgtgagactctcattgagtcactcgagtggtttattcagttgttcaaaacattggtccacttttgctttttccatgtgatgaggttgagctacttcactacactactacccaactatgatcttaacatttttaggattttctttatattttatttcatgataaaaagacaaaatttgtcatctaactacatctaccattaggtttggtttatgattataacatatataataaatgttttaaaagttatattttatgtcatcactaatagttaaatatacttaattaaaaacatgttatccattttttctttattacattttttttcatcggtttgagtattagttgttagaattgctactagctctagcgtacgctttactttaccatgcccgaaagggatgcccgaaagggaatggtgtagttattctcttatatttgaagtgtgtgtttatgaccaatgctagaggtgtaacactaccatagttttttgttcttgtggtgctcgacttattatcttgaaggtggtcgagattcacactgagctataatttttatcgtcataattataagatttgttaaaaagaaacttaaactcgtattgtgattattatattattaagggctttcttggtatgttgtataagaatcgtattttattaaatgataaatcacattatatttagataaaacaatatattaattattacgatcaaattttttaatacaatgtaagttgtattatttaatatataacaaattgtatgtattaacttgtattgtaatatttacaaaggattcgtagtcaattctaatctccgacctagactcggatccagacccaagatcggagccaaactgggatcaggaccgagaccccgtaccaggacccagactcaaactaaacctggacctggacctaacccaaaggcggtgttggggtcgagtttattgaaaatagattataactttacacaaccttttaatataagtcaataataaacataatattgaattaaataatactaatacaatatattataatataaaacaatacaatacaacgtactaaacgagccataaatgattaaaagagagagtgaacacatgtattgaaattagataattatatggctaatattcctactaatagtaatggaataattacataagacaccattttttgtaaaatatttacatttttatgttcaaagaatgttttttttacatttttacggttttccaaaaaata

SEQ ID NO: 308521 - DNA, 2438 bp, Cannabis indica
aaaaagcacattatatgacacttcgagtatatgtatatgcccaagtgtcatgctggggatgtatcacaggtggcagatcaaactatttggtacgtgtcttgataacagaagtgatcgtctcttttcccatgttgatcaaaattcgaaaaccaagttacacacgtgtgccactcatggcaagcgagtgtactgactcagcctctacgtttcagacaccccaccatttacagctccacatgtcacccccatggcccatgcatacaactaagtacatatccattactcccttctcattcattcattcatttcactactctgctttttaaaaacaccacacccaaaactatcacacctcactagttttacagcaaaacaataccatactacacgttcaacaattagtttcaaaaagagaagattaataattgaaatatggcttctgatcaacttagtcggaaagacaacaccaaagacgagacagttatccgcgtagagaaagtcagagtaccaaagatggctagccatttcgagagtttagcagctgagaaaggtaaagccacggaggatatcagccatgatcgtcatcatcaggatgacttcgtttcactttctgatatggataagcagaggcatgcaaatacggtggctgacaaagaggccgaagctaagcggcgtatggagaagtcagagcctcaaactgtggggaagtttgaagtggaagctagaggaaaagagaagggttcttcggataaaagttccaatgctggagataagaatcgagagaagagcaatgtaatggggaaagaagagaacaggggagagagtacggatgagggtaacaaagagcagtactcgttcggagagatttcaaagcttagagcagaagctcagcaaaaatcaaatgacgcaataagggcagctgaagacaagtacaaaaaggctttacaagttgcgagagaagagattggccaaaagggtgctcaagctaaggacacttgtcttgaacatgcacattaccttgtggacaggggacgggctgccaaagaaactgccataaacaaggcacagcaaggcggtgctgcagctaaagacaccatcgttggagctaaggactacaccgtacagaaagcggcagaggccaaagaggctgctgtgtctaccggtggcaaagccaaagattacaccttgcagaaagcagtagaggcgaaagatgttactgtggacactagtaaggacgctgctcagtatgcgggcaagacggcagttagcgtgaaggacaaagcggctgcggcgggctggactgctgcgcattactccacagagaaggctgtagatggtacgaaggctgctgccagagttgttaagggcgcagcagagtatgctggccataaggctgcggagatagctgccgtgccattaactgctgctaaagatatggctctctcggctggtgagactgctaagggttacactgctaggaagaaagaagaggctcagagaggcttggatactaaacaaatgtctactgaaggacaggtatacagagttgatttatatatacattaatctataatctatgtggtgtatatttgtgttaattatgtgtctctttgtttaaaaggaaacgtttcagggtgaaggcaagaagaaagaggattcgagagagtatcatgaaatcgaaacttcagacgtgagaaagaacagaaaatctggtcaggacatgaccaaggaagtaggttcccatggagttgaagaacttggcaatgagagaggaacaaagggaacaagtatgttgggagccattggtgaaaccatagtggagattgcacagaccactaaggagctcgtcattggggaagacgtcagcccacatcaaaaaagagaccaaagatccaagtcttcatagctatcttgattagtggtccattgaagttaaaaacagatatgaatgatgctatatttagttctagttaagtttggcaagttatcttttgttttatttgaataaattcgagtcttgttaactaaggggagtgtttgctttgtggatgctatatatagttccagttattttgacttcagtaaataatttcctgtatggaacaaccttgttcacgttttgtaatgttttggtctgccagataatttagatttgtatttaataagtctatgatggatttagcttttcctttatttatctaagatgtttttaccaaggagcttatgaaatgggaaagtagtctccactccctttatttcctaatggcataattacatagagctatactacgtcctctatatcccaagctaaacatgttgtctttaaatatagctgcattgtacgtttcaagctaacaaatacaatatgtttcaaagggattctataagatacttttagtaacacttttgcaaccagtttttgtttttctaattagaaa

SEQ ID NO: 308522 - DNA, 6051 bp, Cannabis indica
attacatttggaccacttcaatatgatcgagatcatctaaaagttgctttccctcaaaaagaaacacagtaagattttactcactactccagtaaaagttgtagcttactttcaagattcaacaagtaaataatcatgttttggagaaggatccgtaatctctcacattattacaagcgaactcgaagccaaaaaataatttccataagtattgcatattaaacttcttcatatctctttagcaaaaaaatgactttcttcataattagaccctgcaaattcaattatagctcaacaaaatattaatgacatgcatataacagtagaaagctattaatcactaaaaaaaaattaccttttcacatttgatgatctctacttgtttggccagaatttaaaaagtttctagtttcttctaaaagaaaacaaaactaagttaacatagtataaacaataaaagatttatgttatacatgaaaataataattcttgcatggagagtttttcttttaccttgtacgtggtacgcattattagggaagatgaaatgttgtaagttatatgatggtggacaatgaaagtagggcaaaggtaaagtttgtaaatttggttggaaatctaaaatttgccttgtagttaaatcacatgacatggatacttcttcattctgaaaaggattaatagaaaaattatacaaattactaaataatcaaatagaagacatgtcaatatacaaatcaacatataatatatacccttacctacttgttcattctatcaaatgtaccaataatattctcattatgcatataactttgtaccgtgtttgtatcctgtgaaaggaatttcataaatcacataagctttgatttgaaataaatgttatttcttaagacaataataaataaatgtgttacctttactttctttctttcatttttgagtttttgaccctttgctttcttctcctttatgattagcttttcaaccattggaacttttctattttttggtggacgcccatgtcttctaatagcaataggagaacgaggtttattactttcattgatcatttcttcatgagagctcataattggatagtcttgagtgatagtgaaataaggtacacaatcaacctcatctttagctaagtttatttcaaattcatgtatcacattccaaagtcttttaaactcttcatcggagacaatagcccaatctgctactttatcaaacttcttttggagctcatgatatcgttgtgatataggattgctatgtagatcatcataaataagtttaatctttgtatgacatctttttatattctttttccaccttgataaaatatatttcattggaacatttgaaacccccattctaatgagaattgagattgcatgcttgcataaaattcctaaaaattcaaacaactgacaagcacattgaacttcagaattttctttgttgaaatgaattttgaaattgacttctctacttactccttcaaagaatacagcctcacatacattgaataacccagaactttcgtcaagacaagaaacaccgcaataaattttcccaattaactctttttggaattccttaaactttgtatttgtataggctgcttgaaattgcttttctattgcaaaatgagtcacacatggaattattgtgctaaaagattaaaaatcagctcgattctccttctccatcttatccctcaaagcactatcatattgttcaacaaattgcttaagtgttgtctttgagttgacatatccatcaaaaaatgcattcatactttcactacgttgagtagttgacattccagcccaaaatgtgtctttaacaaaagcaggaacccaacgatttctttcttcatataagctatttaaccattcattgtcctgaagattgaaatcattgatgaaaaaatcccatgttacttcaaattcttccttcgtcaaagaattataaacacaatttttcagcgcttttttaattggcttatacaattgatagctacttaacttctcaggaatctttttcattatataccaaagacaccaacgatgtcgactttggggaaacacaacctcaattgcatttttcattgctttagcttggtcagtaattatagctttcggagcacatccagacatgcaagcaagccatgtcttaaacaaccaaataaatgtttcagtagtctcacctgatagcaacccacaccctaataaaattgactgaccatggtgatttactccaataaaaagaacaaagggcatattatacttgtttgtcaaatatgtagtgtcaaatgtaaccacatcaccaaattcttcatacattgctctacttcttgcatcagcccaaaatacatttttgattcttgacttatcatccaaatccatcatatagaaaaaacttgaattcttagattgcatttgaacaaaatatttatgaattgcttcagcatctccaaccccaagtcgtaatcgtcttgctttctcaataagatttctacaatccttctctaagaatggaacattttcatgacctccggcttcaaccacgaatgattgaaaattctttacaacactaatacccgctcgatcatttaattcaagttttctttgagcaccaatacttatctctctattgcacaaataaaatcgtgacttttgaggactcaatccatggttatgctcaagtataaccgaattaatcttacattttccatcttcaagaatggtaccattaatcctagccttacattccactcttgttaaaggatttggattaagaaaattttgcttgtgtgattcagattttcctgctcgagaacacgacaatgtcaaaaatcttatctttctatcttctgaagcacgtgtcgttttcttttttattccaaaaccctcccctcttgttttccatattctctatagtactcatagagatcattaaatgaactaaaatgcattccagattcaggtgctttaattacacctgaatcatttccttcatcgttctccttttgcatatttaacattctttctattttttttttccaaatatgtgtccatacactcttcctccatatattattagtttcacctagaaaaataagttcacataatgtctaatgtagaaaataaacaaaacatgttcatattgtttaaatgatgatatactttgaactaaatatttatatatattgtaatatttctttaaaaatctatacatttacatacatattttaatattggaaaatttatgaacaaaaattgagcattatttatgtagataaagatcattagcaatacctcacaaaaaaaaaaatcatcatcgatcaatatttttcaagaggagaaaaacataatcaatagtataatattgaacttttatttttttaatttttgaaattattgatttatgaagactaaataataataaatattgtgcgtatatatatattaatttgaaaatatctgtatattggcgatctgacaatgagtcttctcctctacttcactgcttcatctacttaagtttctaaagaacattctacagtgataagtttgttcttctcaaagcaaatgaaaagtctcaaagtaaatgaaaagtcaaaagttggtaactatatatacacagagtattattattattattattattgttattattattattattattaaaaaagtttacttttattaaatatatatatatgtagaataaagttgtacacttctttcaataaaaaaaaaaaaagaagaaagatgtacacgtaagctcgggtaaattttcaatctaggtggctcgggctatatagctttattcttagtttccctatatacaaaacccaccccagcaaccctttgaatttgcagcaagcttctaatatgttctattagtccatcaacatctttgcaccctctctctgcttgcttaatcaaattggtagcttgaaggcaattagtctccacccaaaattgcttgtttaatcaaattggtagcttgaaggcaatcagtcttgaattcttgtagcaatggcatggagctctgcttgtaaaggtgtcatctctctcgtaaaatacgttgcagcagcaaattgagtttgacccttttgtctcttatcaacatactaatgctggcctcgccatgacctgctctaacccctgcatcaacatttaattcaaaataaccatttggtggagaccaattgactttttcacgaggatgtcctctcttaaagtcggtattactgcctttgtactctgctagaaaatagtagcaccagccaacaatttacgcaacaggtgatttgtgtcccccgttagccacactatttcggacataccatagatcttgggacaaaaccagaaataattcaaacttctcccttagccaagcccgagaaacacgcataaggaaagcaagaacatcctccctaccaagtctctgaattagaccatagaagccattgatttgccgaacgtccctatttgcacgattccataacgaatggaagacattttcataagtaccagttgcacatctagtacattgtggatcaatatgtactttcctttgggcaagagctacatttgtaggaatccatgaataggccattttccatgcaaaatattaaattttcggggggtatttgcagcttccaattcttcttccaccacagctcctcttgctgaatattcgactgagtctcctttacctgtaaatcaatttccattctataaccacttcaaatcgaatactcgccattcttactataatgccatataattttcttctatttactactctgaagtgagaattttcaacatcaaattagcatcatttggattgaagacaactctaatgaaaacctcatcccaatcaccattagctttctttaaatcaatgacataaatatgatccgggataggtggcttgtcatatatctggaaagtgattggacgagaaagccatgggtcctccaaaacccaaacagaattgccatcgcctattctccatcgataccctttcaatattatcttcttccctaatattaaactttgccaaacaaaagacgcatgattaccacttttagctagaggtgtttgcggtgcgggtggtgcggtttttgactatttttcaaatcaacccgcacattcagtttttctaattttccaaatcgtactcgcaccgcgaaactaaaaaatcacagaaaccgcaccgcaaaaaatggtgatgtgcagtttgtgcggttcggactatcaccaaatattaaactatcacaaatataacaaaacttgagcaacagttgtcaaaaataccataaggcttgaaaataaatatgattttttttcttaagtttcaacaatacaaaaaagtggactttgggttggacattcacatgttggacctaaataaatataaaaattggtatttttataatgtgcggtgcggtgcggtttgaaccacatataaacaattcaaaactgcaaatcgcactgcaccgcaccgcgcagtttaggaaaaattcaaactacgatcgcaccgcaaagaatttcaaactgcagtgtgggcggtttgatgaacaccccacttttagtcgttaagatatcttcatttgggaaatagctcgccttcaaaactttgctacataaagacttcgggaaccgaatacatcgccaaacttgtttagctaagagtgcttggttgaacagccccatatctcggaaccccaatcctcctctttctttcgatttacataaaaccgaccaattacaccaatgaatctttgaatcctcatcatacccccaccaaaattgtgctaccatccgatgaatcccattaatattaggggtgtacttcggtgaatttagttggtttatggtacattttattcaacccaatataaagatcgggttacaaaaatctaagtgcaacccgcctaattaagaaaaaagaaaatagtaacccgcccaatgaaattggtcagtttggtccggttaacccgtccaaactgaccattattttttt

SEQ ID NO: 308523 - DNA, 1641 bp, Cannabis indica
caaaaaaaaaaaaatatttttataaatttaattttgttactacaacaacaaaaaagaaatcttataattctaaagaattcctccattaccctttaaaaaaaagaatttcttgataagtgttaatgattttgataagcaccttttaatttaatatctattaagctattaaattaagaatataatcacctatataactagataattttatacaacaaaactaaaggcaaataaaaattatcttgtctaagtgacatggtgtgaaagtttttttgtttatttttttgtaattgaaatttttgaaagttttcttaagttttttctttcttttttattttcttggttgttccttcttatggatacttctaagaaatcctactggtgttgttagtgattgatgtacaaatatttcattgaaatatgaggaagagtcaacggtcaggataagtcattaatccaggatgaagagattgacactcgttagagtatagtggggcaatttttgacaaatactgcaattgattttatggcaaagcaaaacttgatagttgtgctttggaagcttgggatggatatgtatgtaaagaatctaggaagcaattgttatatctttcaattttataaagaaatagatattaagagggtgataaataggagtacttagactttgaaaaatgctctccatctatttttgaaaggctgaagccaggtgatgttctgaaggcggtccgactgcatcatttagaaatatataggtgcaattacacgatatcctttcagagttcaaaactggacgagtggttagtgatgctgaaaattatattaggcaatttgtaagcttgatgagaataatttagtggggtgtggagggactatttgtgtgtccgagttcagatttgatattgagaaaccattgaaacaaagaatgacactgtaacaaattggagcatattggatttggatcaattttcaatatgaatttgttcctacttttagttttatctttggaattattggccacactaaatagtttgctcctctttgtttatttagcctattacttcgatcgttaaattgtatagatttttatgaaggcgacccctaagagaaaaaagtatgacatgggtgccaaatggctacgttctagttcgtcgagctcaggtatgtacggtggtccgacagaagaaagtggcttgctgagaaaataattcttaggggattgacagattacatgttgcaattaacccacaatctaagggtcatggatggaatcttggccatcaacaatatcagagaattgatatggaaattatgggaagttatgtgggagatatgaatgggaataatgttgggaaaagggcgggagcgaatttaaatgtagaagatgagaggatggtttttatgaactctataaaaaacacgaaaggaaattaatattggcatgttaggccttaagagtctattgacttggatatgggttgttcagatggtactctttcaaaaaacatcacattggtgggctcgaaagattaggcttatcaattattatggaggaaattacactctataccctttttatattgccctcttttttaaagtctatcatttttacctctttttttaaatattgtaccaattttgccc

SEQ ID NO: 308524 - DNA, 1102 bp, Cannabis indica
ttttttttttttttttttccgaaagaccagaatggaatatttttatttagccaattaggtttaattttgtggtttaaagtttgatctaataatttagggatatagggcactatatgatgcccaacactatcttggtattggttagtgcatgttaagtattaaatttcaattatattgtattttatgttaaaattggaatacaatactaaatggggtaattggtaaattttacaaaataagattcaaaaatggtatttatcttaatacactaataatattagttagtgtgtcaaatcaaatagtgttcgatacaattgtcatttagaaagataactctaatcaagattggctcttttcctctagccaactgaataggagccccaagagtttcaaaaataatattatttatataaaattaagaaaaataccttttttatattcaaatataaattatgtttgtttaacatgtcttaggactctaatgtctcaggccatatatgaccctaatcaaaatacattttagctaggtatatgagaagttgcttactgctagctacaccaaatttaagtctattttgctaaagagcattgtcagtgaatattagtagtgtttaacttaggagtaatattctataattaattagtgatattttttagcagtcaatatattaattatgtagacctaatacttaattagattaatagtaacaccatacttaataaacaactaatataaatgtatatgacacgtcgcaggtgacaaaatctttggtatatcaaaccattttcctatttaaggggtaattgtatggtgataattattgtcacacgtctaaactttactatattgttaaagaattaaggtagcgtttggttggaatgaaatggaatggaaagaaaataatctttatttcgttcctttatttggttgttaaagtgttagaatgtcattttaatagaatgacattttcactattttggtagaatgactattttattttaaaatgaaaggaaagactattctaaagaaaaaattaataattttttattaattttttttatgtatttaaattttattctattcaatttctatttttattta

SEQ ID NO: 308525 - DNA, 600 bp, Cannabis indica
ttgatcaactaatggcaacaactccttaattttgtgtgaattacgtaagtttgttatacggctcaatcttttagatttttttacataaactgtcaatatatttaatacatttatggcatgttaatatgctaaatagttttaaaaggtcattaacaagttaatttcgtattagttgcgtcaatctaaatacgactcctttattaaacaagttagacgagctaatctaaacacaatcctaatccatttaagataaatataatcataacatggattccacatgctttctgtgtgggaaggaagatgaatccattgagcacttattttttgagtgtgaaaatagtaggaagtgcctgcaagagataaagttgttcctacaatggaacacactagcaacagagattaacaagctgctacaagcatgtcaacaaatgaagcgattttctgcagcaaggaaaagcatggtgaacacagttcttgcaagtcttgtgtatcacatatagaaggctagaaacgaagtactttgaaatcaacaggtgtggctcatcaacaccactgtgcagaaaactcagcaattgagcaagctgagaatcaaagggttgc

SEQ ID NO: 308526 - DNA, 1240 bp, Cannabis indica
ttttttttttctatttttgtttgattttgtgtttttgttttgttttctaattgttagatgtggcaactagaaactctactgaaggcagtggtgaaatctgatgataaaagtctttcaaaggaaaaaaaaagtttaacaagaacaatgattcccaaaagataccaaacgcctttaaacaagttcataaacagaactaaggaactcatcattgaatactggaagagaatatgggtgatcatgttgtggttagccatcaatttgggactttttctttggaaatattttcagtacaggaacagaggagcttaccaaatcatgggtgaatgtctctgctttgccaaaggtgctgctgagactcttaagttcaatatggctcttatactaatcccagtttgtaggagaattctcactaagttaagatcaacatttcttagtcaatcaatcccttttgatgataacataaactttcacaagttgtttgcatctgcaatagcaattatgactttattacatgttttgatgcatttaacttgcgatttcccgagactcgtttcgtgtccaaacgaaaagttcatgaggattttgggggatgatttcagtttcaagcagccaacttacttggacttggttaaaagcattccaggtgtaactgggattctaatgatcatcataatggcattttcttttactctagcaacacaccactttaggagaaatgttatcaagttgccatggccgattaaccatttagcagggtttaattccttctggtatgtacatcatttgctgcttgtggtgtatgcactcttggttgtacatggatattttctatttctcactcatgactggcacaaaaagactgtaagtaaagctattgagcaatatttagtgaaagaaatgttatatgttatcaaaggtgtttagaacaacacatgatctttttctttctgtgcagacatggatgtatatcgccgtgcctatcttattgtatgcaaccgaaaggacttattcgatcttcaacgagagcaatcaccgagtcaaaattctcaaggtcagtagtagaatcaccctcttttagatatgttgttttgaaagcattaccaaatttaaatcaaactcatcatcttatgttgcaggcaaccatttacaaaggcaatgtgctagcattgcgcatgagtaaaccggaaggattcgagtacaaaagtggaatgtacctttttgtcaagtgtccagatatatc

SEQ ID NO: 308527 - DNA, 2434 bp, Cannabis indica
actatcacccatctcacacaccacaatttcaggaatttccatattttcaataaaagtgtcatttttgttattcttgtcattaaggcccatttgatcaccaatgagcccactttccacatcacccttagccgttccactctcctccatgtggtccaccctccttcttttcacataagaaaaggaaagactcacatttgaatcaccctccaccatattagcaacaatctctctcataatcgactccctaatttcttgggatttttcgatattgcaatttgaaggatggtcaacaccaacgtgattctctctcattgatggggatcccatgaaatctcagcttgtccaccactcccaaacgtctcctgcctcatcggaaaaacagtcggccgaaccacactagtcgaagatgacccctgctttgtccccattcccgatcgaagccaccttgagccatctgcgtagttacgcctcctcggagccgctttgagatccatgctatagttcttcatgatttgatctctaagggtgtcaaataacttcttgcaaaatctctctaaataaccgagagccacatatgaaacagaaagttgaaagatcttcgtatttaaaaatcacatgacaaaaccagcccccttgtatttcgattttcttctttttcttcaacgaactattaaccggaatcttgacccgaatacgtaaataatcccgccatacactggaaaagttgttcggatccgacttaataaaagtgccaagaaaattaccaataccagtgataatcctttccgtcatgaaaccagttgacatattatgaagttggacccagagttctaacctcgataatggtacctgccgcgggttaacccctggtttaaccctttcgaagatcagcggagccctatcaaaggtctatggactgccctctatgaccctctcaatgtccacttcatgatagaattggaaaaggaataagttcaggtctaactccttgacgtagagacccctccccggctgccagaatgtagccatcttgttttggatcgcttgaaagtcgatggatcgattagttagaaatcgacccaccaataaccaccaatcatcgatctcctgcagttcatcctcaccagcttcaaacaataatccctcctcatcctcatcatctatattgaaagctacatactgctcctccattgtatgaataagaaatcaaatgtaacaggaaaagaaaaggacaaaactctcactaaccacatccaaacagcaaacaaaaacgaacccagaaaactatatcaccatggtagaggccaagacgcaaaggtatattataactatagagatagagaaagacataagttgaggcctccttagaagaagagagaaagtcttattctatggtccatcaaaagaagaagaaagaaaagcctttcatggctttttcatcgttatactttaataacaatactagtgagtgatacttaattatgtcagtctaaataaaatattttaacattctcacacttggactacataattaaactaacaagtgctcactgaacaataatgtctatatgcaaaaatctcaagatatacaaatgtctataaaaccaattatgcaccatattgtatcaatatgatacaaatataatacataacgagacattagagattcacataaacatgaagataaatacttatttagattcactcgaaacatagcacagagacttagctactgactcacataattaagtgtacacacaatatcaaagagtgatcccaagtatgcttgtattcaacaaccaatataaatccttaatatatctatcatacatgaaatctgtaactcccacagactaaatacatctttgaaacttagctatctaactaagaaatatcatatttaggatacattttttgttacgtcctgtcatggaagtcattgtcatgttggttgtaagtgtgtattatgatgctagtaaagaaaagtatttgtaaaagaaatatatatatcgttttgagtgtattttggtaaattggctaatagggtgaggataaacataatttgttgtaaatttttttaaaaaatactagaaaacactttctctctcttgagctttctcagtaaaaacctcccacaaagaataccataaatattaaggaattttactgcaaatatatttaaattgtactaataaaattagtacatagaataaaatgactactacctacaccaaacaatactcaaattatatttgatatatatcaaatcttcttaagcaaattaatatatgatgtttctatattttttttttgtgcttaactatatataaagttaaatgataatatctctttctaattattatgtaatttctaaattcctattgatatatgagaaaattgtaaagtctttttttgtcaagttagttgacaaaat

SEQ ID NO: 308528 - DNA, 1216 bp, Cannabis indica
ttaatttttattttttttttaatgagtttcacatgttaaccttctttttagtttttgtgaggggaaaatttgagcttaatgctacaaaattcaaaattcaaaaagtctacgaaaaaaaaatgctacaaaattcaaaaagtcccactttattatcttatgttaattttatgttattctttttgtttgtatctaaaattctcctcccatttttaacatttattctctcttcaatttgaaatcgccttcctacctctacataccccaatgccattgcttgtcgctgccttcacctaccacgagtcttaacaatgccaccccacccttctctctcagtttcaaactctctcccctctttcttttcttcttagtttctctcatttatcttattaatcttggttgaaacaacaaaaagaaaacgtttattattgttgagaatcattcgagcttgattaaagctcacagaaaccaattcgagaataaacaaccataaacaagataaaacagagaaaaagaaaagtatttcttgtattgaatgttgtctaaagctattctaaacctttacaagattgcttctagatagttataggcttgaactggtacacatagttagttgacagttaactgacactaacagctagacagaaggaggttcactaacagtcataactgaatgcttaaagaaaaagaattaagagtcactcatttctaacaattctctacctttaaccataatccttgagcctcataattttatgagtcatgagtagttgaagagtagtcattagtgtccactaagagaagcttgaggcaatgaataaacttggttgatggtaggaactttgtaagcatgtcaggattttctgttgttgagactttctccaattttacctttccatctaatataacatctcttataaagtgtagcctaacatcaatcaatgtgttttgttctctcatggaatacttgatttttgcttaaatgcaatgcactttggctatcaataaacactgtaatggaactctggtttataccaagttcttttgttagttcttttagccaaagaacttctttgaaggcccctatacaagccatatattcaacctcagtggtagacaaggccactattaactgaagtcagggccggccctgagttgaaatgggctataggcaaaaaaaaaaaatttgggcccttactatgaagataaatggtatttt

SEQ ID NO: 308529 - DNA, 1628 bp, Cannabis indica
atggcgtttggttagaggtaatgaaatggaatagaatggaaagaaaataatttttattttattcttttgtttagttgcattttaaggtattgaaatagcatttcaggtagaatgttctttctaccattttggtggaataactattccattttaaaaaggaaggaaagaccatttcaatataaaaatttaatgattttttatcaattttttttatgtattttacattttattccattctatttctattctcattcttattcctatattttcaatcctcacgaccaaacgcacctaagttcctttagctaagttgtaacatttttaactaagttaattagtttaattgcaacttcacttttgaatcctcaacacaaaacaacatggataagcaatttgagcacaatcatagatgatgattgttctttttattataatgataagtaccccaattaaacgtgatctcaccaaaaatttaatatatatatatatatatagtggtacaaatttaaaatataatattttaaaaatgaaattaggtcttttttcttaataaaatatgaaatatagtaatcctttaaacaagataagactccaaagcactcttcatcaaaggcttcaagctcatcacaaaaggaaatccttagtgaagttaaactcaaaggtaatcctccttcaagaaaagacttttgttctggtcatccagagatcttcatatttttcagacatggaaatgctgagtccatctgttgatcccttggcacttggcagtaaaggcatcagttgcttacaactcaacacttgtagcattgttaatgatggaagatatataatcaggcaagtgaacatttaactttggacaatcttccaaataaagctctttaagtctaggaaagactactccatctctagtactgaatgaccattccttccattcaggcatgttccaaatatgcaaaatctctaaaagattgaaatgacttagaaaactctgaacttattatgaccacactatcacacccccaaatctcgagctttttaaggtacggtagctgtccaaagggtggcaacaaacaacaatttttacaagaatgtagacgcacttctattacattcgaaaaggaatgatgtcctacccaatctgataatattgtacctctgtatccatagaaacaaagttgctttaagttggtgtgaggtttgagtgcatctagtatttccctttctttttgtgaatcatcagtgccaatgccaccgataccccatctcaaaatcagcccattaagacgcttcttgtcctttaacttagcctccaaaacatcaccaacattgacaacattctcaaggcctgaaattttaactccttgatgctagaatcagcctagcctgtcctcttcccaaaacaaaatcagttaatgtctctaactctttcagcttacaaatttgagatggcatctctttcaaagaaattgtattactgtaggaatttttaagataggaatttactatcttgccccctacaccaacaaacaaacgaatcaaataccaaggtcaatttcgacctttaactgttcactttgacttttcaaagttaaccccaaaacgaccccgttttgtctttgaacaaaacc

SEQ ID NO: 308530 - DNA, 1007 bp, Cannabis indica
tgacttgtgacttgtgacttgtgtgttttagcgtcaaaggtgcgactcttccaaagaggcttccttggatgctttctccattgttattaaccaacatataatcctaaagaattacttggcctctcttgtattgagaaatttctctaaagttattgaccactttggctgattaatctttgtagatgtatatactcttctcacctttacgagtatattccctgagtaaaacttatgttattgtcgatgtgtttggatgaacattttgctaaccaacctcaaataggtgtttagtgtatgtttggtagcttggatttgggagggatggaaagggaaggaaggagagtaacggaaggataggcaatatttggtagagggaagtggaagggggagggggtttgaaaatccctccaattccacaaatttcaatcttccaataaagggcctcctcaagctcaacacaaatgcgacatgtgactaaaataattaccttgcaggattcggtggagtgattcgaaacagtgatagtgaagtggtggcagcttttgcaacgcctcatataggcggaggagatgcagcaattcttaaagcaaaagctctaatcacatcgctatgattgtgctattaagaatgttttcccatccatcaaattgaaacagactgtaaatcaatcactgacgctctaaaaacaaccaaagaagacctctccctttttggggacctcataaataagattcgtttaactttatcttagctccccaacacctcaatcacccacgtcaaacgtacggctaacatttttgcacacaatttgtcaaaattagctttgggattagatgaagttgctatttggattggcgatgacccttgtaattttgtttctcttctctttcttttagggttgtacatcggtcggtttgggcggtttatcctatatattttctaacccaatctagagttcgggttgctaaaatttaagtacaacccgcctaatgtaaaaaaaaaaaaaa

SEQ ID NO: 308531 - DNA, 1167 bp, Cannabis indica
gagaagaggaagagagagacgttagggagggaaaattaaaataaaagggtattttgggtagtttaggaaaataatagaattaatttgtacaaattagtggatggtctaaaatttgatattgggggttttattagggtctgaaagtgaaatttcccaatgtaaaagcctcaattaaaaatagaataaaaaaaaaatataaaatgccacgtaatcttttttgtgtttttctttatataaatgtatagattatttaataacatactttaactaccaatgaatggagaactagtagaataagaatgacaaataattagtattttgattttggtatcttatttatattttaggaactgaaataataaatgacaacttaaacaataggataccaaatagtataagaaaaataaacaaattactaaattgtattaaaaagaaagttttaacagggcggacccatatagaagaagcgaggaagggtagttctctcttaaaaaaagttaggaaaaaatataaatgtattttaattaattacaatatgtatttgtaataaaagatgatagttataaaaataatattaactttggtataaaaattaaggtagattgcatatattataaaactcaagagtttaaatcccaccaaaagcactttttttataagttcacttttgcccttcctacctcataaaagaaattaaaccccctcactttaaatcttggattcgtcattagtggtgataacaaaataaatctatcatatagaaatatcaaaccaaatagtatccaaataaatcagttatgaatattggagtgaacaaactttgtttattttaattttgggtaaaaataaatataatttagttgtataaaaaaacaaagagaataagtgatgataaagtaaaattggaaagtaaaatctagttagagtaatgatacaagtatcttaatttgatttttgactatgaaatttgtaataacttatataaaacggtgtaaatttctctaataaggatccaataacttatagagatatactacgttattactttcaatttttattgaataattacaaaaggtactattttttaaaaaaaaaattaaaatttttacgtttatttttttttttttactattcttacaggttactatagaaataacatgaaaacaa

SEQ ID NO: 308532 - DNA, 1773 bp, Cannabis indica
caaagagactttctctctcctcacatatcgctctcttttcaaagtctttcaatcccatttcttcaaggatttcagtgcgaattaaggaaggaattgcttagaagaatcaaaggtaattatagttctcttcctctttgaatttcaaggtttaagtttaaatttgatttggtaattttgagagtttgggagtttagttttttttttcttttgcgctgaattttgttataaactgttttaaagcttgattttggttttttatggttaatttttagaagtagtagcaactgtagcaagatttgaggaagtttaggttttatgaactcaagcattgcccatccatagtgaattctattgcatgttttttcgaatgcttttaggttgagggttatcttaagaataccccaaattataattctggaaaatatggttgcttttgtttaaggtaggagcttttttatggggcctgaatatgggaaattttctagcccgtgtagcttccgtgaaggttagcttctacgtagtaagcttcgtgaagtttagcttccgtaaggttaaccaagaagaatcgacggtttatatttacaaataagtgtgaaattagttttcaagagctgaagcaatggttgattacaactcctgtgttagctttgctatcaaatgaagagaagtttgtggtgtactgttacgtatctagacagggactaggatgtgttttgatgcaagctgatagggtcattgcttatacttcccggtagttgaaggagtatgggtagcgttatccaaatcatgactagaacttgtcgccgttgtgtttgcattaaagatttggtgacattatctctacggtgagaaatatgagatctacccaaatcacaaaagtcttatatattttttttactcagaaggatttgaacaatagatagagacggtggttagaattagtcaaatattatgactataaaattctttatcaccccggggaggccaatgtgctggcagatgcccttagtaggaaaggcctggagaaatttatagtacaaccatgatctctcctcagttagtagttgatatggttttgtcatgtattgagttagtagttggaaaactcaataagctaattattcaatcagatttattaaaaagaataaaaaatgctcaattggtggatatttaattgttaaaaactcagtataaaatcttagctggtcaggataaggacttatcagtttcagacaacgggatgttacttcataaaactccaatttgtgttccaagaagtattgagattagaaatgaaatgttagacaaatctaataccactccatatttgttacattctggtaccaccaagatgtaacatgattcgaaaccttattactggtgatatggtatgaaaaaggatgtggtgagttttgtgtccagatgcttgacttgtcaacaaatcaaggctgaacaccagaggcttgtagggttgttacagccttcgacattccctgataagaagtgggaggatatcactatggacttcgtggttggtttacgtagaaccacgagtatgtttgatttcatatgtgtgattgtggtctatttactaaatcaacacacttcctattggtgaaaataacgtatacattatgtaacaccctatttacttaagcacactccagtgattttttgggattttatgtcctaaataaaactcatttcaatatataatcttattcattatcaataaaagaataaaatttatttatgtttacatgtatttttcat

SEQ ID NO: 308533 - DNA, 1945 bp, Cannabis indica
ttgcgtctacggttatagcgtcgattacacaaactgatgtaaattctttaaatgtctcttaaaaactgaagtagaaggccatttttgtagtagtgagaatgccagagataactccaaacaaaaatctcttgtttagaagctcaaagtgggagataatcttctagtcagcatagccccgagctatcaaacttctcaacataatgttgaaaagacttctgcggctctgactcttaggttagaggaagttgttgccataaatatcctagaccttcatcttttgaccaagaagtcttccaaggcttgcccccagccgccctgcccaaacaccccaaatcttctaagggatcgatttgtgttgacgttgtcgatgttcagtggcataattgcctaagccaactgataccacagttgtcgtgcagcctaaaactaagaaagccaaaaggatgtttggtttctaccaagaccatgtaatggtcgatgtgaataagcagctggctggtgtcgagaaattatctgtacaacttttggtcggggcattctaaaggaaattaccagtgctctttgtggcttccacacagatcaccactcaaattttctaacttgttttattgtttcattttttctaagctaatttgaagctcacatatgtttgtttctgagctaagtctacgactcttaacaccagtactgcaccgataagctgacgaaggctttggagaaagccaaaagtactgtcgagcagaagggaactgagcttggtgaagtgaataaacaactagttgctgcaaacaacactatctaggagttgaagcagcaggtggcaaacatgttgtccactgcctaactaaaagcaggcttggggtaggaatcaaagagaatttaggaactcactgatgagagggaaggacttcaaacacttcttcagagttaagaagctaaggtcaatgagttaaccaaaaatctcaggcaaaaagaagagtcatctctgaatgagaagcatgcccttaagaaagaacttgttattgagctgaaggcccatgttaaggatgttgagtaccatgaaacaactgctacggaggtattttatgaatccttgaaggctaaccccaaggccaactttggtattttattaaatattgcgagatcaggaaggctgaggatgaggcaaaaagaactgaccagactacaaatgaggagactaagagtaccaatcttgcctctgtaatccagaatataggaactttttctactgaatatcaagagcatggaactcccatggagtgaagttcaaagaatctcctttttttgtatcagttcgtcctacaggccttttatttaagacaatggagtcgaccaagtggattttaaacttggtttatttttattattttgttaagacaaacggctgactgggcagcctttaagtccaaacttttatctacctattcttttccttattttcatgcatgtaaacctcgctttttaattttaagaattttttctcaagtgttttccatgattcttaccaatgttgtgcgggtgtaggtgcccccaagtgactaagcagaccttacgctcttggtcacttgtaattaacttaagtatcccttatttgtttattcggttcttgtacttgattggacctttttgtaatgccctaattctaaggcacgctacaatgttttttcaattacaatgctatctttgctaatcaaaaaattttcttgaaaaacgtatcaaattaaaacttttataataaatattaaactttataatttacataatcatttacaaataccgggatcccgttcctaaacttttatacaaaatatgccaaaatacatgataaccaggttgcacagcaactgcaaaataatatccccagatgtcccgagaccgaacaatccaggtcgcgccgtcaaaacatgtacaacctcatctcagc

SEQ ID NO: 308534 - DNA, 1299 bp, Cannabis indica
aatgtaaaaaaaaaaaaataataaatgtaaaaatgtaattttttttcaaaaaataatgccttatgtaattatcttaaaaaaaatatcgaacttctccaccatcgaaggggacaaaaatactaataccaccactacgtacttagagggactaacaccaccaatttaagagacaaatacttacatatgtcaatatttacaaatagagcattgtttttgggtaccattggtacccaatactttttataggcgacgttctatgattggttagcaatattctttaaaaactatttttaaaaattattttctaaagttatatgaaatccgatacttaattacacctaggacctgccctaggctaaggctggctagactcgcacctagagcccactcatattaggggcccaaataaaaaaacttttaataaatataaatatttttttaataatttttaaaaatgctatttattgttataaaaagggtcaaaaaaaattatttatttaagactcaaattaactcaggaccggccctgattataccaatataacaccgacgaaggtacaaagcaccaataataccgcaattctcttacaaagaattttgaacccaaggaccttatctgtattgattattttaatagtgtgtgttcgttgtgttagataaaaagtgttgaaaaaatgtgaagtaacataattatatatgtcatatagcacaaaaacatagatacatgaatatattactactagtagaaatcaaaacctcatgccacaccaataaagaatagttaagcacacatttatatatagttaattcaaactggtggttgatgatgtttgatctccaagcttggaggtatgaatgatgtgtaaacttgttccaaatctacttgggtagattgttcaatggctgcgattttgagaggaatgtggtggaatgaacgatggaacttcttatgtgcaatgaagccaaagagaaaagtgatgattgggagtgggactaagagtggtgtgtacacaaattccttcactccaaagtaaccaaacatggtcacttggtataatatcatagctgcaaggattcgaaataccatgtgtggccacatttctccatagctttcatattttgttacatatactttcagagcctgcaaccattattaattgcatgcatgcatgcataattatgatcactatcaatataatctctaacatacatatatataattttataaaagttaattaggatttttttccctcaaatttttgtctaattttagtaaaaaattctaacatgatgaaagtt

SEQ ID NO: 308535 - DNA, 1894 bp, Cannabis indica
tagggcacaaaacccaacactagtattttgagtacctagagtaacaacggttccaagagaggttctgttcagatcactagcatggggatttctcaaatttacaagagtttaaacaattggattagtcaccataggattagtagaatcagtagcctgattccttcgagttgttacagccatttgtgatttgaactgaatgagatcaatccaattgtactcttgagtttagctctcaatgaaaataccaaaatattgaccacgcttttggccaatgacaccgagtcttgaaagcaatttagaattaattaaattcaatgataatatgtttaaaaatataacataaactaagaacactaaattttatagaggttcagcaccatttatttggtaataggctaatcctctttctgattgtattttacttgtgagaagagaagcaagaacaacttgatctctctcaaagcttttacagatatttaaacaacgtaatagctctcttgaaaatataattttttttgtccctcaataatggaatggctctattatttatagggggataattacaatggaaaatggttcctcaaaagttgacaaacaataaaaataggaaattaattattttcctaaactgtgatatttacatatggaaatcctctaaaatagagatttgattatataaaatgaaaaactttatttaatgagttctcttcatgcatttttctttggtcagattgcgtgaagcgctggctgtttcttcctgtccaggttaacttcgttcattccatacaagaagctttactttgcttatttattgttgcgtctagcaagctgtttatcctgagcgagcacttggtacaccattcttccacccatgtcttggaatcacgatacgtgtcacctaaaaaatgtgctacatcacctggataaaatttaggataacattttcctttttagctttatttgttttaggaaacctacttattgtatctttttttccctataaatagtggatccatattccattgtacagggatctaaaatcataaattttcacgagagctcttatgctgtaaaataattgtaagcttttcctgagaattattaaaaaactcacttggccagctccttgtaatcatattaattctttgaagtaatacaagaaaaaggggagtaggctattaccataatctcggggccgaacctctataaatcttgtgttctaattttcttaattattttacttattatctattattcttatctctttaattgacttagtgtcgttggctaaaaatgaaatcaacaattataaaaattaatgcactaaaaaatatcattaacaaaaacaatattactaaaacaattacttaataatacatgtttatccaaaaatctacttatcaatacaaataatcccaaaaaaatattttcttaaccaatgattacaattgaagtttaacataaaaaaacattagatcgacaccgaagccagctcctagaagccggagatggggaatattgtgactgaatcacggagtagccacgaacgttgggaatacttgaaaaaaataatgaaatgagagagagagagagagattgggatcgagagggatgaatggagagagtgggaaagagaagttttacctggagggagagagagggatgagcgacgaagagactcagcttcggtgaggctccaccacgttctgtgatggtctttgacaaataaaaatgggagatataagctcttcttggtttcgaggttctgattccgatggcaacgagccaccttttggcctctgctatctctaacaaaccgcgaagaaagagatagaggccaagaagagaagatcgtcgacaagatacatagatagatagatagagagagagagag

SEQ ID NO: 308536 - DNA, 2113 bp, Cannabis indica
aaaaatgtaaccattgaatagtcacccacatatatatatatatattatgcattagtttaattatcatctaaatagtctttcgctctgtaaataaggtcactatattattaatgtatatatttttttatatataatttgataattaattgaaaatatatatcttttttcaatcttttttttagggtaaaatattagttattattaaacatcttttttcaatctttgagtttctttcttctaatctctctctttccagactctctctctctcgacttctcagtatgaacacagtttcatcctcttcccctgcatgttcacacagatcttctgaacgtttccacaaggtgaaacccatgcccagctccagatcgcttgatcatggtggctcctcctctgctgactcctcctctgctgagacacaacgcagctcgactcgaccaagccgagcaagccgttcccctctgcaggtgcccaaccactccagtcgcgtcccattaactccggccttctcccatttcatttgaatcgtaccgtgattaatgaacctcttacaggtactgatcttcttctacatttatccctattcattgtcaaatcatctcagaaaaaatggtttttgatagaacaatataaatatttgtttggtttgcccattaaattataccctgatttctgtaccttacaaaagatttggggctatgggaacctccctaaatctgtcgacaacaggcccttattccattttgccattttgagtttgaatttatcatttaatgtggcctgcaaagatgttctgtccattgctctatcccaatttttggtgcagacaattttcccagtatttaatgccatcgatttgactgttactgccttgcattactcttctaccgtgggtatttgcctatatatagttaatctcaggaaaaactttgatgtgtgcgatttagtaatatcaaacttactctctctgcaaaactctttgattattaagttatgttctagtaggagtttcaaccgtttgtcccctttgaaaaattttctggcatttcctcgtcaccttccccacccgtggactcataatcatagtctagttcttccttttcttcataaattgtttcactttcagaataccaatccggacaatccccttctctgtgcttgtgttacctttgaaattgtttcttggcttattattattattattcctgaagctgtgtctatctctcaaagccgttctatacacagaaaattcccttccctgactaaccgagctgtcatagtcctttgcccatacaagtttctgtgtcttttaatatttattcactttctttctatattccttactcggccaggaccttcactgtctaaggtttctcattacattttaatttccctccctatggatgatctaacaaactctctctctgttgctctcaatctcacagagaccgaatgtactgtccaaactctgcatgaaatcacccctgcaaccacacctgaaaccgagatacaacaagcccccctttttctcgttgccaaagtgcacaccgtcaagtcttttaaccggaaaaacttcatcgaaaaaatgaccaagaattggaatcatatttcccgaagccccgtaactatcaccgagcgccctcatggcctttttcttgtggagtttggttgtgacggagatagacgtcgggttttgttgcaacagccatggacctatctcaaccaagctatccttatggatatccccaactccttggatgttctcaatggggatagtttactcaaaatccctctttgggttcaagtgttcaataccccgtttctcaaaagatctgaagaattggcgactcttgtttcatcgtcgctcggccacatgttggaattgtacaagccgtctcttcgtgagacatggggcccctactttagacttcgtgtcatgtttgatgtggcgcaacccctgcctcgaggcattcccattcacttctctggtattaacaaagtcgtgtggctggagctgaaatacgaaaatctccccgacatttgctttttctgtgggagaatggggcatagttacaataagggctgcatggattacatgaaagcttgcgatgaa

SEQ ID NO: 308537 - DNA, 1673 bp, Cannabis indica
cttgattccctagttagagattctggtggactggaacggttgataccaatcgttccttgctgtgaagtcttggaatgtcctgtgccaacccaaacaaagagggggtcttggcttccgtcgtttggaggatataaatgattctttacttgctaaattagcgtggcagctagcttccaaagaaatcgcttggtgcttgctttgaaaggcaaatactttccgagggagtccttttggagtgttgtggggaaaaattcagacagctatgtttggaaagggattcttaatgctagagaatgtgtggctcatggctcttgctcaatcattgttaatggggaaagtatagacatttggtggcaaccttggattccgtggatgaattataacgaattcaagtccgtcatggagaatgttagaagcattgcccctggtttatcttgtgtggctgatctaatgtaccgcaggacgagaagctggaataatggttatcttcggtttctttttgggaatgagttgggtgacgaaattggaaaaattcagattgttaagcatggagatgaggatttcctaatttggaagaattcaagattagggaatttctctgttaaaggggcctactgggatgctcaaatgcataggttcgggggagggaataaactttggggttggatttggaatggcaaggttcatccccgtctcagcatgatgctttggcgagtttgtgaaaatgttttgcctactggggacattttctgcccttctgtgagcaacaattgttgcttcagtggggcttctcgagagagtccaatccatttgttcgctaggtgctcttttgtcactgcctgtggttcggttgtccttaccctgttcgtattgatactattcaagatgacagtattgctggtatgttgggtaatctgtgtgctggagttgacgaggatttacagtgtaaaatgcttagctgcttcgcgattttgtttgatacaatctggaataccaaaaatagaatctatcacgaaagcaatgtcacttggagtgtcgatcaagcccgaagagaaatcctcaagagattttctgaattttctactatccttgcctcagctccttcggaccctggtgctgctttagtccctgttgagagttaccttatcagtaccaacatggtgattgttgtggatggattgttttccagtggtagcttcggctgtggtgctttggcccttcgcaatgactcctctgactggttctttcgttcctcttttggtgcttgcgacaacgctctggctgctgaattggaggctattcggttcggcatcaactgggcaaaggactatggctgggacagagtcacaatcgcctctgattccaaggtgttggccaaggctttccgagacttgaagtctcctgattggcatatcactgctcaatttttttctgctttaagtttaatgaactctttcacttcttgttctgttgtgtttgttaaaaggaacaatatcacttttgtggacgaacttgctaagaatgctagacattcccaaagcggttctttgttttgtaaaggggagggatttccccctgtgaatcccactctcttttggtgttaagtcttgaactgaggttatttttacaaaaaaaaaaaaaaaattacacaatccaaggttcattaaaagttc

SEQ ID NO: 308538 - DNA, 691 bp, Cannabis indica
attttcattaatggtactatgcttttacctatacttcctctaagattttcattaatggtactatggttatcttacagatttactaatggtggtatgatgtctttgttgtgaaagattaaggatcattgcaatcactcagagctggtttggccgttgaacctttacttctctgtctatatgtcattcttgtaactttctaagatcaaatgtaaatttcaggacactgaccactactagatagattctgattgaaatagaagttaacattttctttactatagtctaaagctttgttttctagacccttgtataaacttttatcttttagactatttgatagatgaagaaagagatggacattacgaaggtaaggaggatatgaacaggaattcctattatgattttttgaatcagaattcataatattctaacttggacgagtaaaaattgcaccttaaaaatcaaccaaaaccaatgttttatttgatctaatttttacaaattgtattccaatactgtaaattaacttaaaaagttgaaaaaagtatatattgtttattgaaaatatgaagaaattattatataaaaaattaaaaagtaaattaatgtaaacaacattaactatttgcaaaaaggtaaaattatggtatgaatttgagttgtgttaaatttaatacaatttttaatgtgt

SEQ ID NO: 308539 - DNA, 2157 bp, Cannabis indica
gtacccaagtattcttcgtggcataaggtcccagttttagccgatgaagagagcgaggattacgtggctcgtgcatattatctctagagagtagcccctcaagaagctaaagaaggatcctcctgaggtaatcaatgtggatggtcacccatagtgcttagggctgagcgtaacactctagtgtcattccttgatagtcaatataacttttacacttggaatccctttctcatagatcacataacacatagattcgacagttggtaccctaggtttcatgtacaacttagttgtagtagttcatattatggaatagctgagtaatatgagaccaacatggacagggcaagccatctcgattcgagttgggatttatctccactaaatcctactgatattttcgagatcccagggtctactgagtttagttattattgtagtccttcctcatcatcttttgataactatggtaactttctttaagtgggagtttatcccccatattctccttatttatttttgtttaagtgctaacgtacttcctttgccccgcagacatggatctcaacttggagaatatattaaagagtcctcctttagtcgataacaaatctaagaacagagctgcccaagtcggtgatgcatcaggttctatcaaggaacccaaaaggaccaacaccaaagccaacaagaagaaatcatctggccaacttactatcaaaccagccaagtctcccgagaaggaggtgccagcagtgatgagttccaatgaactacccactaagtcagtgcaccaagtgaagttctctggttctcatctagagatggttcttctcaaaccctcctatcccctgcctctcgaggtcagggcaaaaggttcgcaaatctgctccctgtacgccactaatggttggcatcatttccaaatcatcgggtttggcgactgggagcttgtcacgtgaggcagctcagatgatctcgctaagaggaggtctgaactcatgcatcaggtaagtctctttttctccatattattctcataatgatatttttttttactcctcttgattttcatccttcttggaggcattttttctctcctttgctactcaccataggtcgtcttagtggattgagatgctcgagaatgagcttcgccagactagggagtatagggatactttagccaaaaagtggaataactctgaggctgaggtttctcgcacaaaggaagaggctgaaaagcattgtctggccgaccaaaacaagatcaaggagcttgaggattctatccaatccatccaggccgaccatgacaaaaaactcaaagagctggaggctgaaaccaaggatagggtcaatagcatcaccaggagaaccatttatcagacctggtcggccaagcctgatatggacttcagctttttgggtgaaggagtcgatgccatgcttgccctatgcgacaaaactaggagagaagaacttggaaaggatgaagaggtcgaggtggaacaagaagatttatccaagtctcctaaaatgtaggcttagtttttagtcctcctttttttttttatttaagaaaatggccatatggccgagaaaatggtttgccccttgtggaattttttattgtaaagaaaaatttgcaatgttggatggccaactttgcttttactttatctttttatttatttcctcgcaactttatatttgaacttaatatatttgcttatttctgtttttgctcacaacttaaacaattgtaagtaagcatttctactaatcttgtttctccgtcgatatcgcttaagtagttaataatctgctatgcatgcgagcagttatcgtttgccatggattctattcgcgagcaatttgttagttctactttccataaatagtcataatctgctatatgcaaacttaaacatactttaaataaataattcatcttgtgaattactttgtacatttttgattgcttatatgaatagttaggccttctattcatatcctaggttaagtattatcttttcaaggcatcttggtgcctccttcataatacattcctataaaatgtgagtcgttatatattcagctttgcatgtagcttagtgttgtttttatgagttaaatctcatttacaactgctac

SEQ ID NO: 308540 - DNA, 1220 bp, Cannabis indica
gctaataaaatatcaccattttacctcaaaaaaaaaaagctacaattggttaccaactaaagcccttaaaattttaaagttgggttgggacgcatgtaccaaaacttactaaattaacaaatatgaattgggtggtaaaaaatgtaccaagttgtatggcttttgctagagttctttccaaacaccaactttgtcttttttttttttaattatccctttccaagtttccaatgtttgatccccaagaaatgggagagatgttatcaactttgaagtaactattatatatatttttttatgttattaagttaatattaaaaatgagatatgtaattcgatatttagttaaaatactaaactaatttaaatagtaattagattagattttgaggtttaattgaatcaactattaattttttattaaattaaattactaattagattaaatacattaagaaaaaagtattagattggatgagatgtctaacataaatttagagcactaccattaaatgttctattttatctttttaaaaaaatatatcaccaaaatattattttaatttcttttatatcatacttttctattcctttctctatctaatttgaatattacatttttttttaaatattttgttcatttgaaatagtttctctcattattaacaatatattcataatatttatctatatatattatcaaaatataatgagattttattttaaattaatataaatatatattaaagatataaatgaatcgcaataacaataataaaaaaaaatgttaaaaaaataattataaaatttcttaaaacataacatatatgtgtataaatcgaaatatgtataagtttttttcttaaaaaattacaataaatatattatattattcatgttgatgttgaaaattaactcaacaaataaaattatatttttacttacaattctttacactaggattaatccaattgtaagaatacaactcaagtagattacataattctttctaaatcgactgtgattctcctctttgattttcagtcctgagctcgagtatattttggagatgtattctggcagagtttcaattggattggtgtgagtaagagtttcctctttttttgaatgatgaagtctcctatttatagacgagaatgcaagtcgcggttgttagggattttataccctaaataaaacccattacaatctaatctgat

SEQ ID NO: 308541 - DNA, 1807 bp, Cannabis indica
gcatttaatatcttattaagataaaatgctcaattttcctttcaaaatactatattctagatatttaccaccatatatacaaaagatatataaaaatttataaagaatgcccaattgtattttttggctcaaggctcctaattggcttgagatgggcctacatgagacgcttgtcaaaatgacgtgatgatccttccccgaagggtcagggaggaataacaccttctttgataaggtgttgattgattttgtcttgtgagatttcaacacccttttcgcagttggtatgtcttgtactcggtattgttgtgaatgtggcgagttagtgagatctttcaaaaacaatatgacaacaagtctttaagcccatcgctcttaatgaaagtactaaactgttgacgcgatgatggtaatttataatggtgtcgtgtctctctagatgagaaataaaactaaagagatattgtggagacttatgcttctttttatgactaaaaagaaagtgagccaagagtctagagttgtatctctttcggaggtctctcttttagtttatatagacctagagaaaagctaaggtttacctttcttcactcatcatgactcagagaatttattacacactttgattctgtcctttaataaaggaaatatattacatgtaaaggaactataaaaaaatatccatctaaccccgaaagaaaataaatatcttttagaaacgtatcttctaatctaagtttaacatgtgtcagtgagactttggtttttgaaggataatgaaataggcgagcagtgaccataggaagtagtcattgctcacatatggtctatttggaggagcctttccagttgccactagggaagtggcacaacttcagtgtcaacttcatgtggctcccctctaatgaaacctttcattttgagtgtcgaatgagatagtttgtattgtaacccaatcttggggccaaaaacctcataattgtgatatgactatcagacaagcttagatccgtcttgaaaatagctttctaatgcaacttgagctgcttcattcgaataagaattgggcgagttatgatcattttactgaaggattgtgagcagtgatattgtggttggtcaatgattgcgaattcatgttttgtgcgaacagtgaccatatgacatggcactgcttgtgagttacttgatttctaacaccttgtggtgtgttttgacatgtctcttgatggtgataaatattttttgggttttgaaccctaaaaccctagtgggcccttattaaacacattatgtgagaagtgaccattccaaagtggtcactgatcgcatatggtccctcaccatctcttgctggcttttcttatttattttacgcgtcttgatgttggagaaacacatttggccaactttatccctctctttctctttggaacagcagtgaccagtttggagggcaaaagtggtcattggttgcatagcactccaaccttgggtggcttctttcattgcttttatgatccttaatgttggagatatacatttgacaaaatttcctcttctatttctccttgggaaagcagtgaccactttggagtgccattgttcacatggcacacgagcagtgactatttgaagtagtcactggtcgcataacactattgatggatattcttgtgaaattttaactttatgtttaagtcttgatatccttgtacctcaataagtcaagtacttgctgcatttcttatcggattagggttttggagtgaaaaccctacttcaaattcatgaagaggccaac

SEQ ID NO: 308542 - DNA, 1745 bp, Cannabis indica
atggtaaaaataaatatgatattttcacttagaatattagtcgtaatcttgttcagctacgttgttgggattatgagttttgacttaaacaaaacataaaaaaaatatttttagttgtcaaaattaactcttctaacttgaacattatatttcttttttggagttaaatattttatttaataattatatttatttattcaaaatttaatgctaaaaaaggggttaaatttgctgcaatgcagtaatcgtagtcaacattgtgaatttaaattttgaaaactctgcaatttaaacataaagaatgttctatcttttacaatgcttacttatcgttcgctttactgggcaacgatagtgacatttgtagctcgtggataacgagtgataagggtgctttatgatgcactgagattgtctcgtcttattgacgtttatttaattatgcattgttgagtatatgttgaatgttgagtatgttggttacaccgtgatctgattacttgcatttcatattgcgtgtaaatttattagcttttcttgctaagtttatgtgactcatgtgttgcttcgtggtgcaggtaaagggaagggtaaagcagagcaaccatgagttagaggttttccaacaatgtacatatcaaccgcggcgcttcggctaccagtggctaggatccacccttttgattgtattttgaattgtaacccttcgatgtaaaactaattttgaaacagagtgtaaaatttttatgcaggggatccccgtatttagcagtgatttatcttttataaagttatgtttttattttaatttaaaagttttaattacacagcactttttgtaaattaataaagttagttttaaaaaaaaaattgtaaaagcacacacgtaacgttcctgtaggataggacgttacactaacttatttattagtgtattgtaatctcttttattcaatcaataaaacaaactctattattcacctctgttttttgttctcttcaactcagcaccttaattgtttcttttagaatattaatacttcctttactcgtactacaagtaaattaagattgtatagtaactaaaagttgttaaggtgttgagagacatgactctctcgaatgcaatgtattttttaaaggaaattttgaagggtatttattagaccacatccaatatttttaggcctattcaaattcgatcaaagtatatattattggatgttagattttaccattcgaaccaatccaattactttcaatcatctgatcgatcggttctatccattgaatatattacttatgtaaatttaattattaaatttgttcgaatttatttaatattttaaaattaatatttttttaattaaatcgaattcatctaatattctacgtctaatatttgaaactccctcttcatatacttgaaacattatttaaataagttagaataaataattgtcgagatttaattagtttttaaatcaagttgcacacagatttgttttttctttaatttttagaggtccaaaatcattggcagccaccttttatttcttattatatattttatatttatatatggatgtttggttttctttcataataaactaatgggtttgtttatctaaaaaatttccctttggttattattttattagaaaaaatcttagctagcatcaattataggtttgtattttatatacttgaattagtagctatcatcacattataaaaaaaaacct

SEQ ID NO: 308543 - DNA, 1526 bp, Cannabis indica
ttttttttttttttttgaacatcatagaaaaagagattgggaaaacggcccctagtaacgagagcaatagatttcaccccaaaaaggaaaagttaagcataaataggatatatagaacaaatactaatgtgtcatgttttatagtgagtcatgtgtttttagaataaagaaaattgtgttgtggtccttgtggatatatgcacacctaacttgataagacttaattgaaaattaaatgaaaagttagtgatgatgatgatggagttgtataaatttgttttaacactaaataattgtaaattgacttcatttgaaaaataattaataatcaagtaaacctattcttacaagttaaactaaataaataatataatattagtgttaatattacccaaattatttattgggttgataattgtttaataataaaatgtgaatattgtaatatttgtttgctaaaacttatattacatttcatagaaccatataaaggtaaatgcagatgccgacatatgtattggcacattttcttggtcaaacttcaaagttttcattttcacaattctctttttccttttgactcacatttattacataacaaacaatataagagcatttttgggcatttacatattctaaaaatatataattaattacacaaataccgatataataactactgatatcttttaaacactactaatatcttataacatttttttacaaatagtataataaaaaaaatactaaaagatattaataatgcctaatatcagcatcgatattatattactataaatataattaagtaccacgtctcatataatttaaaataataatttaaagaatatcgctaactaatcataaaatattacctctacctctaagtagtgctagacaatactgtaatgctcttatctaataaatcttctttttctttttaaaatgtatgattgagatttaatctcttcaatgaaaaataacaactaaatgaaagtcctctacatattaatgaagagataaattcaaaataattattaatattatatagtgagcaaactagtaatttttccaatttaagggagcaataacttagagggaccactcaatttaatgcacatatatttatatatgtatagttataatacaaaataaatctataacatgacacggggaccactcaatctaagcttcataaagtgacatttatattatataaaattatattttttatagaattataatataattttatacaatggttgatactacaattttatagtttaaccattaaaaaagattattaatctcaaaaacaaatatttctctgaagtctggcccatcctaggtgtgaactaagcaagcccaagcccaactccatttcctcatacaagagaagcaaaaactcagcttacacaatgggccggccctgaatataaatgggccgaagatatatttttctgttaagttgagttgaggtagcttacaaaattaccattttttttcactacatataaatatattat

SEQ ID NO: 308544 - DNA, 1055 bp, Cannabis indica
tttttgaaaagttaaataaatgaaagtttatacaagttacaaggtgagagaaagttgaatctctacacgtttgacttggcttattgggacccatgtattataaagcttctacatttggtggtgatgatgatgaatagactgagtcgcctttaggtcgtgtgcataattaataaaaatggagaagagtaagaatatgttacaatacaaagtaaccaaacaagtaatgtaaataaagataaacaaaagagaggaagaacctcacaattcacatgactataaaatagtggagatcacttaacttaaacaagtctttatatgcttgtccaaaaaaacttctttcacttatctttaggcactaaaaagaactttcaaaaagattgtgagaattgctaaaacgcaatactagtgtctagcatcctcttcggtgttatactgttattagtgtaattaaatattggatctcatatagcttaaaaatataatttttaaaaaatatgattaatcaatcgtggagcaccactcatagaaggtgttgagcaccactagcgttcaataacaatactcgaagattgtagtagtaaaaatccattaaggggtcttaccaaaagcctaataaggcttcttcggtccaagttgtcaaactagctcacgagtcgaaatgccagtaagcaaagcaagctagcgcatagggctatctggctggctcatgcacccaagctcaaactcaaccaagtcactaaacgagtcaacctacactattctcaatggcaaaccaaagatacacaaaaatccttctattttttccttttttttcgacttctttttcttagagatcttacagatgttcatagtcatgcattgcattattttcatcatgttttgatgtgttgaagaaagataactttgacttcaaaaattcaagtatcatcaaaacttgcaaggggaagaagaagggtcaccaatagagatggaaattggtcggttaatgtacgggaaatgcaatccccgccccatccccgctactatttatacccccatccccgtctaataaccaa

SEQ ID NO: 308545 - DNA, 1350 bp, Cannabis indica
ctctctctctctacctcccaatctttctctctcaagatcacctctcgaaacttaactgaacctcttccagtaaatgctaagagttggtgatatttataggtgcaggatataaagtcagtggctaaaataaactaagttgttaagttagttacgacttaacaaactcctcgtaataatatctccacattagcataagacaaagtgctaccgtgtgagatatatgcttcgggacagaggatcgaagtgtatgttgaagggacatctcgaataagaaaagagccaattggaattgactatccaggactcccttccagaaggaaataactagccatctacaacttctttccgaaggaagaatagcttttctgaagacactgtccgggttgacatgataaacatccgggaatgcccttctggattacatccttcatttcacaatacttattccgtgatagacaagttagacttttggggatacccttcggatgtcatctatctttccataactagaacaacttttggagatctttttatttaaaaaaattataccacgaacttaattattctatcttctctccaatcctaaacccaaatcatgaaaacataaaatttattaattgtatagcgttgttgaaattaattattttgttttgattgtatgttttattatattacaagttttcttcatttaacacatgtttttttttttacaaatgatcaaatcaatatctctatcgagtttagatactctttttgaaaaaacacctaccactctacatttaacatcctatttcactctacaaatcaaagtattcaaaataggcatagattgattccacaacacttcgtttttctccttccaaacatgatacaccactgctgaagtatatacttgtcttctaaaattggtacacctgaccttttattcaatcctagcacacttttcaattgcttgtcatctaccctagcccgaccaaaatattcttcaagcaaatatgactgtaataacaataaaaaaagatatgctcatttgtctttctttattgcgcatgtataggatttataaaacacttaagaaatataaatctcacagatctaaatatattactaaaagtgcttgaatatagaaaaccctaaatcataaatttatgtaacctttgctaaattaaagaagaagaagatgataaaagatgagcggaagcactaacctgaagtcattattggagattacagagaatgttttgatcttctaagaatacactattttctaaagtattatctctgatggggaaggagagaatacagaaacctagtgtttcttaaggatcactacctatttataggctcatt

SEQ ID NO: 308546 - DNA, 1265 bp, Cannabis indica
aaaaaaaacattaattggaattaaactaataatagtaaataataaatgaaaacaaaaatctgaaacggaaaacgttgttgagccgaactgaaccactctcaagcgatagaataaagaacacttcgaagccgccctccgtcttttccttgctctccctctgaatcaaatttttaataacatacaatatatacattaaaattaaataaaaattgtttcttttaataatatactttctatatcatgcaacatcagcactttataccgcccttaaaaatattattttccattattagaagtagcccaaacctccaaacctcccgttcatgaaaataaaaaatgactcatagtaaacttgagtttaatgtgttgtatacaattcatggtgtacaaaaaattaaaaataaatcataaaatatagtaacataaaaaatttaatgttttcagaaaacgaataaacttaatttttttgcactaatatttataaactaaacataattattaacactaataaattaatttttacactcctaccacattaaactaacaaataaactaccaacatcaatactacaataaattgataaataaactactaaaatcactaccacaataatttgacaaacaaaccactataataaactacaaaaattaaaaacgacattaacaaattgttaccttactaccaaataaactataacgtggaaatcataaacacaaacaaaatgacataaaataaatcttagcctaacaaaatagaaaatgaataaaccaaatccaatcaaaaatataataaattgattattttgggtattaaaaagacccactaatttttattatttttttttcaaatgtaaactttcctattttattttaaagaaactaataaatttatgctatatattttattttaaattattgtaaaaataggttaattattttatttattgcacaataattttcacatcagatttaacattgattaacagtggacgtgaaattaatttaataaagaaatgcctcgatcactagataataatatgagtgatgattacttctactttggattcaattaccatacgtgaaacagatttgaatcaataatgtagtcaattttgtacatatgtgtatcatcacgaaaattctatcacatccatcgatcatagtcaaataattgaggaaattacacagttaatatattgttataaatattaataattacggtaaatcttttatttattaccattaatggtaattaacattttttt

SEQ ID NO: 308547 - DNA, 1693 bp, Cannabis indica
aaaaaaaaaagaaaagaaagtataagtttagctataaaatatagaacaatgcaataatttaaaaaatggtatacaattatgttaaaattgtaaatgagatagactaaagtagtgttcggtaaccattaaaaaatcagttttttgattaattaatcaaaaatcatgaaaaaactacaaaattttgttaagtaaaatttaaaaaaacaaaaaacaaaatggttcccgaacgaaatttaagtttattattaataataaactagaaaaaatgtgtgtatatgtaaattatctaaaattaaacacgagtcaaaaaataaagaagcgactcacatacaacacattttataaacccctaattaaatccacgaaaatttcgtgaattagaaccatcctggagtaaagctgactgagtcatcaaaagtagtatacaattagcaattttgttttccaaaagagggtaattctggtaaaaataaaagaattaagttaatagttgtcattcctaaaacaaaagaaatggtttgttaagaatcttaataaaggaaaaaaacaagtttggcagttattttaaggaagggtttagtgacatgggttttccacttttataacaaacgtatgacgtggcagaccagctgttgttatggcttttgaggtcacctttttatttgtcctaactggattctaagtgtacccacacacacattagttcattttggtttaaacatgtcacttttctattttatttttattgtttgttttcaacctttctctctttatttttctttcttaattctctaaaatttagagattatcaccagaaactcagttctatttgaaggatcaagctcataaaagtgggtggctttgggaggtatgtttcgtatgaagtgttttcttgttcattattattgttgtattaaaactcgaaatttaaataagggaaaaaaaaataaaaaaataaagcttcgcttgtggggtagtggaataatttcatccatcttaaatcttggtagttggtacaatcattctttatgtttgtttatttctgatatgtgaagaatagatctcaaacagacttcaaatggtttataatacaattaaaataattcattatgactattgttttggtcaacgataggacattgatggcattaaaaaaattgaattgagcttggaaatctaaaaatacattaatacatgagaaaagagatttttatgtggcttcggacaatatctataattaactttaggattacgctgtatattatagttttttctttctttcatattatagtttaaaacaatcttctgtttttctttctcatgtagaattttgattgctcctattcattcaagcttaattttttttttttttgaactaattaattaatatttcaactatgtttaccatttcttttttaatttcctaacatggtaacgctacatgctaaagcacaatttctttaagtcaaaaacaaccattccaattccagtattgcttccattgaactcttgctcattattcaagaattaggtaaacaagcatggcatggaataaaacacaaaacaatatattatatatatatgtatatgtatattaacatggctatgtgatgggaactcataattaatataaatacggaactctgacataataatttaaaaaaaaaaaatatgtgagaaatgttaaaaaata

SEQ ID NO: 308548 - DNA, 2236 bp, Cannabis indica
ctctgcaattttcttgctcttcttctcagctcaaaattttcaataatatatgtcttagtcatgtccattaatatccaaaggaacaatcccaattttcatatcataattagagatctcatctatttgaacctttttcagtaattccagttcttattatgatacaaaatatttcagcatatgcatacctttttcattgtttacacaaatcactcattaggcttcaatttatttatgtcaaaaaaataaaaaaataaaataaagaattgtgatggccccaaaatcctagtatctttctaaatactaataagaggctgttctatcctattgcaaggaatctacatcagaatctagatggaaaaaaaaatcaataaaattattataagtaaagaattcatttatatcactcttagggactttatgtttgagtccttaaggaaaaatgtatacatggtaatatgataatgacattgtttgccaagaaaaagttgttacaataatttttgtcagtgattattatctatgagcaatcatcaaaaggcattcaatcgagaaataagatcgacgaactcatcttgtctgcaaggaattgtaagagctcccatcggatgatcaaatccaaattcttcttcggcttgactaagcaactcttgaaatgaaggatagttcaagtatgctaaagggatcacaaatctcttcattcttctctctccaacatacactgcaaaatagcctttcattgggatatctttaccattaaagagaggcctctttatgagtttcttagcatgatctaccccgagaaatcgaaaacccattatagtacgaaaaacaaaaaaaaggagaagaatatgaaaatctttgatagttgagaatgtgaagatgagttggagtagtatggaacctcatctaatgagtatttatagccaatacacacttgattggaaaaaatgaaagaaatgaatggttgtgaagagtgaagactaaagactagaaaatgcaattaatgaaatggggtctctagttcttgatcaaccacatgatattgtttttcatcttattattaccattaaatatgaattagtcaaaactaagagccttgccggattgtttgaatgcaaataaaaatcaaaggaactttcttcacttcttcatgtctagtaagctaagaagagtagtcctttaatcattaactattcaaaactaaaacaaatcatttattgtattcaattcaaaggaactttcttctacttcttcatgtatataagaacccaacaacatcaactcagaacacagagttattgacaagatgtgttatatataggtggcatgtcccacagccatgaaatcacattttcatatctaaacatttaaacaatccttccattggctagctatttatgtcttgtgggacatactggtatttattatactttctattccctgatgggtgggggagtgtaaagtttcatcctttttttaacccaaaaaaatgttatgaatccaaaagtgttacacttgttatggctctgagttgcgcccatcatcaaaagagagagttcacttagaagttttcgtctcaaaactaaatggccatagggaagtaacttttaagctttataaactgattaactctctcttcttttatcaatgtgggacactcacatgtgttctttggaaaggctctgctttaatataatatctagttttcagtggcatacatacatgtaacaatctttgtcctagctagtaagtattgtttatgtctctaaatcccaaagtccacagatttttcaaaaaacaaaagtaaaatagaaaatttaaggctttttgatctctcaatgattatatatacaagtaaataattttaagagtttagaaatggtatttttatatgtcgaaaacaaatatttgttcatattgcttcatgcttgattggaatggtaaatcttagaatttggccggggaatctctttaaaacattcttactataatggcaccaaagtaagatttctccctacaagtagagatgcctaattttttatattttgagaaatgtaattcaatttcattcatatgatatataaaagagtaatttgcggcatatatatacttaagtttaacttccagttataaataaatacataagtttaaattttgacggtaataatacttaagttataattttggaacttctgtaggtacctgattaaatgaattgtcacgtggcaatctttga

SEQ ID NO: 308549 - DNA, 3246 bp, Cannabis indica
ttgaataaaatagattacattgaaatgaagttttatttagggcataaaacctaacattgagttcatgtgcgaaacccaacctataaaacattgaggtatcaggtgtccttggtgtttgaattgtttggccaataggttggcgtgatacttgagtagtggtgaagctgttagtatgtataactcctcccaaaggacggtctggcaggatctagccgtctaccgtgtggcctacagtttggacatgtggccttcgattggacgcctgattactgtgagtttatgcggtattcccaactacatacccttctgacctgcccaagggaatagtggatgcagtagccacttgttgattatgacttggtaggcccttcttatccgtacagcggcctgcctagtacgatcattaatggcttcctgctgagccttcataatctccatctctcggttcctccattctataaattgacgcctctatttgttgaatgcaagatttatggctgctcagaggtcttcttgatcatgatttaaagtgttattatgaccttgcatgagccctagtgcctctcgcaaattttggagtttggtgtcgtccctaactggtctgtgagtattagttgtggatggaacctcaatgatgggagtggaatgatcaactgctgaatcggtgtttccagtttcttgtaagcctggtgtgatcccagccaaaggggaagtcactccatggcctacagtaggaggttgtgtagtaacctgcttggggtttgtccctggtgatcctcttgtgtttctaggagtttgcactttgggatctatcaccattgggtcaccctgatcagcgaggtctcctctacaagtttgtacaaccatcctatttacctatcaaaatttaagataaaagacttgtatttttactctcaatgaaagcaccaaaatgttgacctcggttctagccaacgagagtgagtcaaataataaagcaattaagtaatgtaattaaaagaaagcaaaaatagtaaggtaaagtgaacactagattttaaagaggttcgaccctgtaagtatggtttgtattgtattaacttaagagaaggaacaaagtgttctttcccttgaaagctcttacaattgatctctgagtatatttatgcagtaattctctcgatccctttcatagtgagtctaggtcactatttatagagactaaatgcatgagggatggtttcccttttgcttataatgcacaaaataggaaattacaatgattctataattacaatgcatgaaataggaaactagaacaggttgccattttcctctaactcaatcccacaattatagagattgtctttgcatctggacaatcgagactatcctctgaactcttgtatttcactcggcataaacatgctcgtacctggtcagacattctccacaatcttgctcaaatatctgactattacgaatgttgattactcatttattggcttctagggatattctcctccacccagatatcagaaatatgggacacgtgtcatccaattcaattgccacgtcaaggtgcaacaaacaagatcaccaaaaggcttttacataatatctggaagtttctcttttgtctgtccagaacctgtttcagtaaatttgtgctctgttggaacagatggaacaaaggttgcatcaatatcatcactgacagcaactactttgtgaatttcagttggatcatcgataaacctataaatttctacctcaatagagaatttagaacaatccttagcatcatcaataacaacattaccggacttcattacattttgggttcttatgttataaacacaatatgccctattgtcaatgaagcaaccaagagaaacaccctcatcattcttaccaacaaacttaccatcaaactcttcacctaacttaggtaaaccatgaacaatctttgcatgagataattttttcaaagttttgacatttaactgagcaagttcagaatgtcgcacatcagtattattacgcacatcagattaacacataattgaaggtaaaagtgtatagcaattggtatttgatctgaaaccttcaagaatattctcaccattcttgttcaagacaaaacacctatttttatcaaagtgaacatcataaccttgatcatagatttgaataacactaagcaagttagcattaagtccttccacaagtaacactcttttaattttatgtaacccttcacagttaagattacccattccaagaacattaccttcaattccattcccaaaagtaacagatccacaatgcattagtttaatattggtaagaatagacctgtcacctatcatatgtcttgaacaactactatcaaaataccaaaagtatgaaaaagcagacctattatattcactagtaaagctagcaaaacaattattcttttttacccatattttcttttcttgaattttttccttttttactctctttgaattatcaaaataattgaatttcttaaaatattcttttttagcaaaattcagtagagtaaaacatctaggtcaaatatgtccttttcttccacaaaagtgataggttggaacgaagttttttaggcttacctttggatttacctattaactataacaaaactattgaagcaaattgagcactggatgaaactgattttaacgaagatgacaagggagtatcaggtgaaaattttctagttgagacaaagatggttttctttgcattttgagagcttgaagcagcaagacctacatgacttctttgacctattttctgaatatcctcaaaaatggtagaattagggttaaacattctaacattttttttcaaaagaatcaaaatccttagacaacttattaatttcaacattctttgaaattatttctttttacaatttctcatttaaattagtaagttgtttattttcgaagaataatttttttattttttcttaccaatgatcgatttttagagcacacttctacccatgagccacacatctctttgtaagattcaatcaaagactcatcattcaattcagattcatcactatcaaaattttcttcatttattgaaacattattcaagcaaacagtttttccctttttaactttaaaactagatagaattgagttaaaagcaatatttgttggattttatgccctaaataaaactctttacaatctgattagtaatcaatataagaaatttgaa

SEQ ID NO: 308550 - DNA, 2595 bp, Cannabis indica
aaggtcatgccctttggattaaagaaggccagagctacctaccagcgaatggttaacaaaatgttcaagaatgtattgggaaaaatatggaattttatgttgatgacatgttggtgaaatcaaagacttccatgagtgatcatgaagatttagaagaggctttttccttcatccaggactatggaatgaaactaaacccaaagaaatgcacttttagagtttctttagggaaattcttgggttttatagttagttctcaaggcattgaggcaaaactggtgaagattaatgcccttctagacatgccttcacatagaaaacagaatgatgttcaaaagttaactagaagaattgtagaaatttgtaaattcatctccaaatctatagataagtgcatacctatcttcaatgaacttcgaggaacaataagtttgaatggataacttaatgggaagaagcctttaagtaacttaaagaacatctaatgaaggctccaatattgtccaaagcaattgagggatagtcgttgttcttgtaccttgcagtgttcgatcatgctataagtgccccttcagtgcgagaagaagggaaggtataacttcctatttattacgtgagtaagagattgctgggtgcagagtccaaacatctcatgattgaaaagctttcgtattgcttactgattgcttcacaaaaattaagaccatactttcaagctgatgtcataagggtactgacaaaccacccactcctttaagtcctacaaaagtcggagtcatttggaaggctcctaaaataggcttcatatatttcattgtggaatgcgcggggatgaatgatgatcctgaaacaccaatcttggagagagaagtttttaaaatatatgtagatggagcatcaaatgaaaatgttctaaggctggaaaaattttgatttctcctcaacaacttcagcaccaaagtgccattcgatttgaattcaaagcctacaacaatgaagttgaacatgatgacatgattgctggcttttagttggctaaagaggttggtgccaagagtatcgagatgtacagtgatttgtagctggttataaaccaaatgtctagagagtaccagatgaaaggagcaaagattgacagttacctagcaaaaacaagggagctattgcaacattttaagcactactctatgaagcaaattccagaggataaaaacaccttcacaaatttgttagataaattgaaaacagatctagaagaggagaattatggattagttcccataacacatctacttacgccaagcatggagacactgggggtgttagccatcgatcactcaacttcctagatggccctaatactcaagtatttggaatcaagcacgctcctagaacataaagccgcttcgcagaaaatctaatatcaatccccttaatatgtgatcatggatggaaagttatagagaagaggattatcgataccatacctacggcgcatagatggaacagagataagagctatcatgcatgagatatatgagtgattttgcaaggatcacacattcaaaccctgtctttccaaaaatcattctccatggttattttaggcctaccataaagatggcttccagtgaatatttcttctaatgttaacaattctcgccttattcaaaagttctaagatccccacaaatagagataacactcatgaatagtccatggcccgttgctattttgagaatagatttagtgggatcactttcaacaagaaaaggaggagtcaaatttgtcatcatagttgttgagtacttcactagatgtgcaaaagctgaacctatgaatatagtgacctccaaaaaggccttggacttcgtaataaagaacatcatgtgcagatatggaattccatgcaaaatagtatccgataatggaaaggaatttgacagtgatcaattcaatgacttctctatcaagcatggaatcatcaaaagctttttggctgtggccaaacttcaagcgaatggacaagtggaagttgtcaacaagatttttaagacagccttaaataagaagctgcaagcatgcaaagcacattggccaaaagaacatccaagagatctttgggcctacaagacaattgaaaaaacttcaacacgccacactccatactctatgacacatggatgtgaagcagtaatcctggttgaatccatagtgcctccacatatgacagaaacgtagggccctactcgaaatcatgctctacttcaaaaataactagaattaattgaagaaattcgagaacagtcatagtttcaactcaaaatgtacaaaaataatattgctagaaacatcaattccaaagtgaaaagtagaagatttgaaattggtgctctagttcttacaagagtatttccaacctctaaggagcccagagtgggggtcctaggaccaaactagtgttgggattttatgccctaaataaaacccattacaatctaatctaatttgctatcaataagaattaaaagtcatttatgtttacatgtagttttcatgattatggtttaatatatgtacaaaatctgttaagtc

SEQ ID NO: 308551 - DNA, 1353 bp, Cannabis indica
ttacccagtgtttccccttacggatcacgtgattactgactgtcacaagaaactatcataacaagtcatgcaatccttcagtcattaaataggtgatttatatatgtacaaatattcatatatttacctcagtatagaaataattagtaattgatgtgtttcaaatcaataaattcataaatactacaaatagtagtaacctattaaataatatgatgaagatgaaactcattaactagtagttgattaaatttgcaaagtccttccaatttaattggcttaatatagtataatctttcaggaccaactttgagtattacttttcttgaattgatatgtttaaaatcaagtagtaatgctattactattttgagaatatgaatatgaagtaaagaaaagaaataatatgatgaaaattgtatgattacgaatgtattctagtgtgtattattagaatatcaaatatttatttcagaaaaaagatatcttattattattatatgtttatttatcaaatctcaacattcaacaatccaaaaggtaatctttctatctcagattatcaacagcaagacatgttatgaatgagagcgatttgattatgcatcttctcaatggcctaagaccagagtatgatcctgttgttgttgttgttgtttatgtgatgagccttgtccgtaatctctcatttgaatctatccaattgttgctctcatttactaaaaataatcaagtgttcttagattttcacttcacttggttttgttaaggacaagataacatggaaagttttgctcaaagggagggttaagaatggaataatgaggcttctctaacagcctcttcctcatgtaataatcctgtcaataataaaaattcttgtgtttccaatccctcaacagtctctaaatggggttttttatgctaatcttaatcaagatatcaatatttagcattcaaaattaggacatcccgcccctaatattattgtcaaacaagttgaattttaaaggctaatttaagaatctaagattttgtgatgcctgcaaactaggcaaaaatcacaaactaccttactctctgtctaacaacagggcatctatgcctttagaattggtccacacagatgtgtgtggaccttctcatgttctttccaaagatggattttccctatgacacttaagttcaagccttcccctcattcctttaattcaagaaattggttgaaaaacagttcaattttctctactcagaactgttggagttaaaattggcttcagatttctcaaattactctgctttcatcagctaacaacaaagctcttggtgtaaaaaatttctcatttgaaaacc

SEQ ID NO: 308552 - DNA, 712 bp, Cannabis indica
ttcttcttgataaaaaaaaaaattgaatatagcatcatgcatgtctgatgagttcagaagaaagtagtaaatgtgatactatgagagaatgagactctaactatataattatcttcaaaataaaggatcatattcatttcttttcttctcaaaatttgacttgtgtactaaaattttataatagtattagaaaagacaagaaattgtcaccatggcagcacacagatgcagatcagatctagtgactagtaacaagaaacaatcttgttctcattgcagatttataatatgagtcatagatgtataaaatcataaataaataactatattatatacaaaattggttcccaaccaaatttatatccaataatataagagacattctatccatctaattcatgaaatatgatgagagcctaaaataactcagtagaaaatttattcgcatcaaagaagttggaatttaaaaaggtcgaatatgtacttacttttcttcattatcattagtccgccgcggaagtttgaccttccatctacaaatggcagaggttatcatggtaatcaaactattatcagtagtcatatatataaatatatatatatgggtatgctcttaatgggtattacccatgtatgggtattttattcttgaccattggatcaaatatctaatggttgatatttataatctttaattaaatattaaaaaatt

SEQ ID NO: 308553 - DNA, 1534 bp, Cannabis indica
caattgtaattggatatccaactttttgtaattggattggattggttcggttcggttcaattgaattggattggatgatgcccacccctaatggggtccaacgtctcagccaaatgattgatcaataattaatagtgcttaagttaaagagacatgtttacaaaattcatattctaagaaattttgtaggataggaaatattttttttttcattaaataaaatagaagttcaattggataaatatattttattcattttaaataaattaattagattttttttttctgaactttgacttgttagactactttattaaatttagacaaaaattattatatttaataattttaactattttaaaaatttaaaagacgtgttttaatacaggtaaaaataataaaatgcttaaaattctttttcgattttttcagtttaaaaaagaataatatgtatatatattgttatggtaggacctaatagcattagtacaagtaatccacactttagttagagaaattggagtagattattaatccgaataccaatattcaataaacattttcataaaaataaatagtcttaatccacatttcaaaaaagaaaaataataatcttaattctaatcctactcgtattgatatatatataaaagataaaagttatttgaatttaaaaatcatatcttcatttgatctgtattattatttagaaataaaaataaaaataaatcgataggaaagagagcgtgtcggtgtgggcccagaaagaaacggtgggatcttctttcttcttctattttctttctttctggttcttcttcaaatcgagagagagtagactctaattcgatttctctcaagtcctatggactctaattctcaacaacctccttcaggttcctcttcttctctaatcctctttatctttatctttcattctattctactgttgatgtgtgaagttaattttgccttggattggggattattattatttgggccaattttatttcttcaaaaatgtaatttagggttggggattttgatgaatattggggaggttttgcttttccgattgattgaaagattttttttttttttttacatgaaggaattttgggtcttgtttgtttttgaataaagttgtgaaattcacataagtaaacatgaattttaggatatgccactcgattctttgatttgaatgagttcaattcgttttgtttgccgaagtcaagtgaaatatttttgtctgatttataagaattatgcagattatttgagtttgttgtttccatttgagttataacttgtaaaaagctgattggaatttgttaggattgttccttgatttggagtattttcacgagttgattattttccttgatgttgcttgaagtttgttgtgagaacagaacattttttctttgatttagacagtttgaacttaagagaaaagaattttgagatgtgttatggttgttgcttgcagctagtaatcgtccccaaaaccttgggaacgggcaggttcatc

SEQ ID NO: 308554 - DNA, 3740 bp, Cannabis indica
gttagttagggtgttacactaactgcctcgaccctggttccctcggaacctattgttctaatttgagccaccaggtgcaaatggtgcctttctcttctgatcggtggtcaagccactaccaatcctaccataaccagaggtaggaggagtagtggctccaccaacaatctgagtccctcgggactcctggacgcactcaactgcgccctcagccagtagtgcttttcccaccatatcaacataggtggtattatcctctgttgaaatcatcaggtcatgcttgatcttgggattcaactcatctaggtacttttctttctttctaaaatcggttgacacaattctcgaggccagcctagctaacctattaaactgggttgtatattctgtaacagtcatattctctttctaagccagctgagtaaattctttcctccttgcacttctgactgcctcattgtaatactttgctttaaataactcttggaactttcccaggtaatggtaataacatcccgagtcaaagccaccatatcctaccaaaccagggcatcttccacgaattggaatgtggcacaggccactctgtcgttgccagtgacacacataaagttcattattcgtgtgatagccactgtttgactttcatcacatcgggacttccctgaaagactggaggtgcgtgcttgcggaacttttcgtacaaggttccatccaatttataatagcaatcggccctgcctgcatagaaggggtaggagccacttgtatttcaggagcaggcattgcaggagcaccctactgcctcaggtgtctgatttcttcgtcttgttcattaattctggcttgcattgatgcaaacctattttcccaatcctaggtagcctgcggtgagttaacatctccccgactgcgtgccctgcctcgtaggcctcttcctcggccacgtaaatttgggggaaactgaactccctaaccgccactagatccgaccgagttaccccgacttctcgtgttccacctggcgtccattctaatagagcagcctgcgaaactaagagctagcctggtcaaatcgcgatcaagaataatttactaattaccgcttattttagaaattaaaacaggcgcctattcggctatcaggctactaacatccttcctaacatgcttttcttataacatattaaataaacaaactactaaagcaataaagacttactgaaccgtgagtcgagcttatctctaatgatgattgtacatatcgtgacgatctttgaaagacaacttgacagctctgatactaaattataacaccctactagcttaggcgtgttatcgtaattttatattaactgtgtagtttattgttaatcaacgagtttattgaaaatcatgcttatttaaaactttatttaaatactctttaataataaaagaaagtaacttatatataaccgggatcccgtattttaaatttttacaactaagttacaaaatatttaatacaaaagtttgtcccctagcgacaatacaaaacacagcctgctgtcccaaagactgtacgctccaggcctaaccgccctgatatgtacaatcttcatctgctcaaactcactattgttcaaccttagctttacccttacctacacatgcaaacaatatctgtgagtcaacaaattcagtaagaaaagcataatcataatcataaacataatctggattacaattaagcgctcatacacccaactgtaatcatatccccgcaccctaggcggtactgagtctagaacgttcatacgataatactatcgaccataatatcagcctatactcgataatctagtcatactctagttgtaacgatgtgatagtgtcgatagtatctgaaccaaacatacatctatcggtattcaatataactctacgtatattgataccgctatcgatgtaatctaacatgcttaacaaacatgtacgctaaacatgtaaacacatatgcatattattatactaatcttatctcaattctgaattcaagtgtgtcggttaacctgagtggaactgctgctcgacggtttacaggcctctaaatcacaatattcgtaaaactgataagtgatacgctaaatcactttctgtggactttaaactcaaaactaaaggctttcctattgatttctagcaatacaaagtcctaagcatcgaggaaacacgagaaaatcatcgaaatagggaacctgcctgaaaaacggtaagccgtttctaaaaaatggtagactatttttctagatgctgcactaggaaaaatggtaggccgcttcagaaaaaacagattgccgtttttcactgtagaaaaaaaaactccccctttttaaatcaaaactaccccaaaacttccaataagctctagaatacctatacatgttataatgaaccattcccaagtggtaaaatcaacaataacatgaaattacaaaaattaccatagttgagccaagtttgagttcttgagctcaaacttgctcaaagccaacctcaacccttaaatctaacccaaataatcttaaatcaacttaaattaaccttggaaactagcagcaaacaattcaaacctaaaaagcaactaaaactcaaagatgcatgcttaaactaaagaaaaattataaaaattataagagtatgttctagggttttacctttggatcttagctcccagaattctttgaatttcagctgaaagctactgaatttggagaagaaatgttctagtttcttggtgggccgaattagagaaagagagaaaagaggtggattatcctattttgtcattttctaactaaacaaataataaacttaattaaatactctaatattggccaactgccaacacaagaagaggccacctatcctcaagatccaaaaatgaccataatgccctcacacaccaaactaaagggtaaactaactttaggggcaaatggtcaaaactaaaatcccaaccaatcctgacgtttccaatgtctaactagatcgccccgttattctaaaaatactaaattacactaaagtgactttataggccatatgccgcattttactgttaccgaatataaaactatgaaaaagcataaaattcatatataatataaatagcacacctagaattcaaatattaaaagtaaaatcataaaaataataactaaaagtctactaatgaaattagaccttaattatctactaattctcatacaaaaagtaagctatctttacacctcatgactatcataggcatataaatagataaagtacgagttatgaacattggagaataaagttaggattaaatctaattaaattcataatgttttgaacattttatgttgaaaactcaatttagcacactcaaaattagagttttataactcctttccacccttcttcaattctcaacattatcaattcattttaatcacttgaataagtattgtaacatcttccaacagttatataatgatagcttttaatcacataataaaatttgtgtaataactattttattaaacttaatttgtgaccaaccaaaaaagttacaaatgtactattttgggtgatatttaagggagtttcattgtaaaatatacttgtgttacaaaaaaaatgtctagtactatttaaaaatagtgtgatatttgttgcgatatttagcacacgcaagtgtacgtatcgtttcaagtagt

SEQ ID NO: 308555 - DNA, 1431 bp, Cannabis indica
atcacatcacatatagaaactacactaactgttgttcaagttagctgcaacacgcgcctctctgagaaaccgttccatctctcgagcctgatggaccttgagagcgtccataaccaaccttgatgccagatgactgtataatcaaaataaccattgaagctttaacagtgatcatttcatacattgcatttataataatcataataagaataaatcttgtgtctcccgaattacctcattggatacatcaaacacgccttcctgaatattctgaaggatttttgcagcagttttgataaaggcctgtaagtgaagtcgatatagattagtttaaacatttcgaattttacctttaaaatagaggcttcactcagaattcgtttagcaacatcacctcttcaacattttgagcagttcttgcagatgcttccaggaataaaagcccattttcttttgcaaactgctctccttcctccttgctgacagccctccgatgagcaagatcactcttgttacctattagcatgatcgtcatgttgggatttgcatgctgccgagcatcctcaagccagtttgccaaatgattaaaagtttctctcctacatgaagaagagattccgtagttatagttgaatccaccaaaaacacaacctctatggattagctaatgtaaatttcggtcattcacaagaggagtaacaaaagggtctattgctttcctttcctttcatttctttaagcaacaatgtgaagtttcatctttcaagtatacatacatcaatagaattagaattatgttgataattacaaaatacaaagtacaatacaattccatatgcacacacgcacacacacctggttatgtcatacaccaaaagtgccccagctgctcctctatagtaagatctagtaatggatctgaatgattcttggccagcctgaaagaaaagaaaggttcctgacctaagatttcagtgcattaccaaacagtacacaaagacatgaattgttcaattcattaattgaaaaaccagttgacttactatattataaaattaagtttatcatatatgctaatgctacaggatgatcacccttcataaatatatataataattattaatatgcctaaaaactccaccacaaaatctaacacaacttttttattaatttattcatttcaaaagtggaagccatttaagatcaaagtcacatgggaacttacataatttgggcctgagaatagttagaaaatacatttataaaacaaaggaatattcacaaacgaattatattgaatttaaagtagttggtgtgtttattaaaaaaaacgtaaatgaaagtgtacttacatggtctagcttggtcatttcacacaaaattaaatttcttttaaaaaaaacacaaaattaaatatgtaatttttttttt

SEQ ID NO: 308556 - DNA, 1311 bp, Cannabis indica
gtgttgcttcgctgcattgcatacacttaccccctcgcatgcgagtctctcatgggctctcatgcgagccgttattcgttgccttgttgcttcgctgtgtcccacacactcacccgcttgcatgtgatcctctcatgggctctcatgcgagcccttatttgctgccgtggttcttttctgtgtcgtacacactcacccgctttcatgcgagcccttattcgttgctatgttgctttgctgcgtcgcacacactcaccctctcacatgcaagtctctcatgggctctcatacgagcccttatcttgatgttgtgttgcttcgctgcatcgcacacaccacccactatgcgagctcttgtcttcctaccatgttgcttcactgcatctcacacaatcacccgctcgcatgtgagcctttgtctcgttgtcgtgttgctttactgtgtcacacccactcaccttctcgcttgtgagcctctcatgggctctcatgcgagcccttgtctcattgtcgtgctgttttgctttgtcacatggtatgcccttgcacggatgttaccatggcttgcacggatgctctaccgtgactcaaatgaatgcttcaccacagctcacactcatgttttaccacttgcgtaaacgctccacagctcacacaaatgctctacgacccacccgaatgctcctcggctcatcaaacagcgcatgggctcacacaatagctcatgggctcgcgtaatagctcatgggctcatacactagcacatggcctcgcacacctagttgtcacaattcaccagtcttagtatttaagatataactctctcgatatatgtcagaatcggatgattcaagatgtgttggaaagatgagaaagggatctgtggatcttatgtttattaaaaattctaactctgaaagaatcattatgaaagtcctctaacatttgtaacatagtaagttgatcttactaactctactcgtgagttgttacgggattgaccttcgagttgcatggatataccctgagacttgcaagaattgattctcgaggttaatgagccatgggccatacacgtttatatagtcactccttgaccgactcttacagtcaacgtctctcaaccttcgagactaattgttgactattctcaaaagcaactctgtcaattttcagggttagcatatactcaggatttagactgatgtactaatgatcatcgttgtgatatgaataactctttcatggtaaacgacacattaatgaaagatgtttattacatatcggttcagtcatgcataatcaaattat

SEQ ID NO: 308557 - DNA, 929 bp, Cannabis indica
aagtttgactgaacttgatacttgacagtgttataaacaaataaatatatattatttattaaggaacataaaaaaaaaaattaaggcaaattcacaagtaattgtaggagcatagaggtaacgtgtggtcacagtctagcagaccacaccattttaaaaataacaaatgttatattagatgtaaaattaaacacaaatgatgattgatgaccgcactttatttttaaaataacaaaagataaatgagcgtgagtgtgttcctataccttttgtaaatttaatgataaaattttgattattttttttaatgtataaaatatctcttcatgtttgaaaaaaaaacaaaaaatccatacacagtgctgaaaagcacgagatttgagctgtgcatcaaagagccagaatatcagttcgtatttgattctctggtgcaccagaggagtactatattgaactctcttcacgtacatacaaaatgacaatgcttatccctcattcttgtcgtacgcctaactttatgtatattgatttaattttaacggctgtgattgattgcagaacgcggtggagcagccgtccaaatattttggaggatgggcaggagcgtacacgatcaacgccttcattgttgggtgggtcctagtggttgggtttggattcggtgggtgggcgagcatgacaaacttcatacaccaaattgacacatttggcctattcaccaagtgttaccagtgccttcctccacctagtgctgcagcccctccgctactcaactccacggtgggggcgccaccacctcatcaccaccctctccctcaccatcaccgactttgatttcctccatcaaatccatacatcacatctgccacgtcacttcttctctcgctctctctctagacagactcatcatcagtcaaaatgttatggtg

SEQ ID NO: 308558 - DNA, 2454 bp, Cannabis indica
atcattgcagcaaatgtcctctctagactcatcacatctaggaaagctgaagggtgtctactaaggctttaaaatttctagagaagggctggccatcacccatctaatgtttgctgatgacgtaatcttgtttggccgagcgtctgtaaaggaagccaaaggctttattaaatgccttgaagactactgctcttggtcgggacaagcagtaaactaccaaaagtcaatagtgttcttctctaagggtgtctcggtaaggagtgcaagggagataaaaaacatagctaaatatgaagagaatcaaggaagatgtaacttacctgggactccccctcttcagatcactaaatcggtcgagagaccttcggtcttggtggatagggcattgcaacgagtaaaaagttggaaaactagactcttatctaaagctggaagagcctgcttaatttagtcgattggatcgtctgtagcaacttatgtggttgcctctgatccaataccccttaatattgcgaataaagtggataaatgtctaaggggatttctggttggggggatactgaggagaggcgaaaacttcatcttttggcatggaacacaatctgccaatccaagatgaaaggaggtttaggattcatgagtgttgggattataaacaaagccttcatgaccaagtgggcttggaaagctctcaccgataattcaagtgtttggagtaaggtggtgaacgcaaaatacatcaaaggaagaaacttccttatccttgagagaaatggagaggactcgaccatgtggaaagccgtccttgatgcccgtaaggtgctagaaaaaggaatctgtaaaaagattggaaatggtgctaagacatcgatttggtttgatccctgggttccttcttctaaccgcacccccacgccattaaaagatgtgtcacatggtgtagcgtgggtcaaacagttcttcttgaataataacagatggaatgcccaaatggtaaaagattggttcagcccggcggatgctactgcaatactaaacattgatttaccggatgagggaattgaagattcatggatatggttaggtgagaagaatggaaaatttagtatacggtcagcatgtcaaatcttaaagggggaaccagcaggcattgaagatagcgaaatatggaaattaatctagaactcgccactccacacaagactgaaattcgtatggtggcaacttctccgagacatatttcccactaaagataagctggctccttttttagatggcattacgggaacctgtcttctatgtagagaggcttgtgaaacttcttttcatctcttttggaaatgcaactttgccaaagctatttggttcaacattggatggggcatccgaacggaactagtggctgcaaccaattggaagcaatggcttgacgggttctggaagggaccaaatcttccaccaaatgtagcgttttacgatttcagggttacatgtttgtgtattggggaaacagtgtagagagaaagaaaccgtagagttcatggagagaaggacatggatataatgcaaataacaaattctattcgccaaaggattaatgatcatgttatggtttcttcgaagacagttcaagaggttatagagtggagtccgccaccttcggattgggtttgttgcaattcggatgtggcagtctctgcggctggttttatgctatctgcagtgatacgtgatgatttaggaaacatcatttctatttcttctcgtgaaagcagagtgacacttcaaaaacttgctgaagctcaagcggtttgtttggcattggaaaaggcggccgagttgggattgcagagaatcacttttcaaagtgataatatctgtgtggtgaaggcgtttgaggctcctatgtctgtgtgcacggactttatgctgcaggaggctaaagcgaggttcactaagtactgttcgacattatgcgactgggggattgtacacatctctcgtaagtgtaactatatggctcataacattacaaaatgggcggctgcagagaactttgtgggatgcattaacccagtggatgttgacggctctgtccttgatgatcttagggagtgggatcctggctcgggaaggggtaccatttggtttgaggactgacttaggctagtttattatgttatgtcacttttgtttttcctttattttgttcttgttctgttgtttttgctggggcgttggtgactatggcactttcaattaataaaaaaaaacatttgtgtaaatttaaaacatgctatgtagtcgtaccgttataaatcgacgcaaactaagaaaaaaagctacaaattaaagctattatgaaaatatagaactacacaaaaatcggaagttaattccatgaaaaagcatgaaaatcgaagaaaaacgaaaaaaaaaaatgcgagctgtacg

SEQ ID NO: 308559 - DNA, 957 bp, Cannabis indica
atatagggtcatgactcatgtgtaacaccaaactgggatttgagttttctatttagatttttatatataagacaacaactaaagccaaattgttaataaataaataaaaagaaccaatctaaccatgaacgaaataacaaagtacctaattaaagactaacccttttttaattcactgagaggtgaaatgggattctttttatttacttatcaaccaaatctttgtatgattgtggtaacagagtgagtgaaggtaaaataataaataaataaatagagaatattttgggacccaagattttgattttgagtgcacatgaagggatatatagagtggtgaacttagacaaaagtcagtggttaagtctccattttgcacatggtcggatcacagagatatggctcccactcctctctctctctcatgtgccttgacttgatctgatgatcctggcgtagagataatgtatatcaacttaatgggaatgaaaaaaaaaaaagacaatagggaattttattttattttttcaaaaagtaaaaatgaaacttaatgtagtaaattgtttttttttttacttgtcgttgttgtcctttctcttttaacgttttaggaattttataagtttacggcttaccattcaacctcactatatgatgagtgacattactatcgagataaaatgtaattctttctgttatgaatatatatatcgagataaaaatgtactcttttaattttcttattattattattattatttatggatacatttttcgtataattagtttgatatgccttaccttttactcaacaataattaacagcatgaaaatatttatgtgttactattaataaataaacatagaaatgtataatcaacaagctggaatagctcagctggttagagcgtgtggctgttaaccacaaggtcggaggttcgaaccctccttctagcg

SEQ ID NO: 308560 - DNA, 1856 bp, Cannabis indica
atttaagctctcttcaactgtgtagtcccatacctacacagtctcaaaatcatcccacatgaccttctccaggcgatgtgggattgcacagcttacccgatatttcttcttacggatcacgggactactgactgtcacaagtgatctcccttttcggtatctgagcattccaattttctctaaaaaaaatatcaaaagcggaatgctcaattcttgttgagaagatggtcaagaaagttaaagtttgggggacccaaaatatctcttttgttgggaggagtaccttagttaactctaccttgttgtctatctatgtttattgggctcaattgttgattctttccaagagtattcttgatgaaattaacagggtttgtaggtctttcctttggagtgggttagcagcttctagaggtcctggttacgtggcttggtctgaggcgtgcaagccaaaatctcaaggaggtgtaggcattagaaacatctctctttagaatactgcaacaattggggagcatgtttggcatgtggccaaaaaaaaaagataatctttaagtgaagtgggtgcactcagtgtacttaaaaaatcaaaattggtgggagtattctcatcccacagatgcaagttggtattggaagagcattgtcaaagtgaagaatttgtaatgtaatctctcggttagatctcactttgatcggcccacttataacatttccaaaaattacaaggtattgcttccccctaacaatgagcgctttgctttctaaattatggaactagtctctctccaaacatcgattttttgtttggttgattatcttgaaaaggttgaaaacgaaagatagattgccacatttcgctataaaagttgatgttacttttggcttgtgtagggtttctaatgagagtcatagtcatctcttttttaagtgttgatatagcagtaggtgttttcttctcatttcgaattagccgagtattcgctctagattcctaattgttgaaagtattatgaactggattaaaatgagcaggttaagtaagtttcaaaaaggtatttgtaattaaggttgtttgtgctgtccttgcatatagcatttggagggttagaaatttagttctttgggatagttaagtttgacatattgatgttttgctaaagaagattcaatgtgatgtttataataaagtcaattgtacaggcttaaaaaattgtaagagtcataatttgagttatgttccatagtatttttgaaagtgtaaataggtgattttaaagcttgaagtatatcttagtttgtaacattaataatgagactttcattacagttgactttaataatcttgaataaatctaatgatagatactcaatcaaatctccaaattaccttattcttatatttttgtatcataatttccatgcaattcttgtaccattatttattttcccaataagatcccttgctccaaacattgagctcagataaattaaataataaagtagtattaattagtacttgatcttaattttcatcacataattaataagacattctaatatttatatatatgaaatccaaattccatgggcaagaagacgtacacgtaagtgcaatgccattaattttgtcacgttttatgtaattgtagtgtatataatataagcattgttactacttattactaggtagtattgtgtagtattttgtatagataacgtcttattatttttttgtaaggaagataacgtcttattattagtcattattagtcagtaatatttattaaaagttgttttaattatatgagatttgataattaattatactaataataatagggtaaatattattt

SEQ ID NO: 308561 - DNA, 2085 bp, Cannabis indica
tctctcccttatacgtaaagtgtcaactcgactacataaacatataatcatataacccctaaatgattaattatatcacaatcacataattaacttcatgctcttctaagcctcaattaaaaacttgcattccttaaggcttccgtagtcactccattgaagacaactaagtccaaacagcaaacttggtgccatgctcactctttgacatattgccctaaccagttgttcacgctgatcatctgcttttactacatacgttgattcattacaatatctcttgtgaacattaactgagatgtatcttagatcatgatgtccaattcatgaccctgagactcaaactcccataataagtaaatatccttcatggcatggagatagcgcaattcagtcactcatttgatccctcgacccagataaagctcaaatgaaagtaattttacttttccactgtcccacctttagtgcaccccaaattaaccaccctcaaaacaaagaaggttttgctttccgacccactcatacaacatttccacgtggtcctgcacatttctgcgacacaacccaagatgctgaagagttaactttactgacgagacaagcctactacttcgttgatttccctttctggttacagtactactagatagtcttccaagtgatagcgtacctcacttccctatttcatcgtaacgatgattatcattctcctaaccattcctaaacatagagattctcatttaagtctatttgattacttcagaggtattgctaaatacccttacggtccataacttacaatgatcgaaatttctgaccaaaataataatgttaataagcattttctcttatacattattaatctcatatctatatattatacttcttaataaagatacaatcatagcatgttacaaataaaacttatctcatgcttctctaatattacatgtaacatgtaaaaaatcacatataacaagtaaacagatatcacttactataccatgataccatgagtcgagcttatcttcgcagtaaatatacatatccaaccattcttcaacacctttaaaactgtgttttctctgataccatgttgtaatatcctaactcatggggacaccacaagtgtgtttttataaattagtttataataataaactaatgatttaatgacaattgtgatttaaattaaaactcaataattagttataacataaaaaggatgttgacactacaaaatatttagggttagggatcccctttctaaattggctgcatcggactggccatcaggccctatatcagacctttatcttcaacccatatctaatttttttcatcacgatgcattgcatcggggatgcagcagacctgcatcgggcctgcctaaaaaatgaattatagaggtgttgaggtaattgtgaaaaaattagatattctaaggtcatccgagctggacatctagcaccattaattaggcatcaagctttattaagcaaattaaaagttaatttttttctttataaaattataatttgcggatggggaataatggatgagcttttgtggatgaagagatctccagacacattctttaatttaaataggctttatttttattatatgccaattacctcttcccctcatgccatgtttgctccaccgtgccattaagctactaagtacgaatctattatagaccacttattcactgatgtggccaatgtttacttggaaggaaaccaatagtaaaaggaaaataatgttcaccttgttgtattgtaagggtataagaacctcacatttgtgataaaaatataaaataaaatagaacctggcatttgtgacaacatgtaccgcaaatgcaaacttattagaaaagatggacctaaaatctaaatgggctttattaacaatatacataggggaattttgataaatatagagattgagaatatagcttatttttttgatgatataaataaataacaccatagggttatgggttttttttttatttttttttttactatttatatggatttttttattgctatatttttgtaaaaaaagtggaaa

SEQ ID NO: 308562 - DNA, 7328 bp, Cannabis indica
atacatatcacatatatataaatatgcataaaactcacacaacattaatgtatacacattcatgtaactgctttggtaccaattgctagttttatggtactaaatcaagtatacatgtagaagagttttgaatcatgtaataattattataccatatcccaatagatatctagatgtgtgtaaagtcatttattgccatatttaataaaatagaaaaaaataatgttgtggtattttcaaaattgttcttatttgtttattcattattttcaaaaatatagttttcttttattgtgtgaaaaggctttccaaaataagattttagactcttttcacttattgtgaattaaatatgagttttccttttatagaatatttattgttatcttttactttttaaggaaattcttaatcatattttattccttttgatttgatttcttgaccaagaagccgtgcacaactatgggtattaatgtagtcaaaattgccttaattgtttatggaaactttactaaaaaacggtcatcgttttgtttgaacagattgtctatctgtttaaacaaattcttaactttcctttttggaaagattttcaattattgacttgatcatttcatggttattttaccacgacctagagggattctaaagtgtataaattcatccttaattaggtcgctggttttggtcagctctcttggtgtatcaattctaaatcacttttcaaagttggaggaagttttctttgttgtgtgaagaaattgagtccaacaagttcttagtattctattattgtgttactctatattgttttttgttgaaattgtacaggttgaacactttggatattgttaatcaagctttgggagaagtcttgttcgcgattcacctttcgggaggaattaaagttcatgtgagtcactcttcgagaggaagattataagtagttagtcactcttcgggaggaagattgcaagtgagtcactctttggaaggatgattgcaagtgagtcactcttcgggaggaagattgcaagttagtattttatgatggtatgtgcatgagttatatttgaatccaagacatctatggaaagttatgtgtttgaatttcaaagtgtgtgatcttaaacactataaatagaggtcttggttcacttatgaaaacaattttttgtgagtttctatcaaagagagcaccttgctagaaactataagcttgataaatttatttcttccctaagtgcttgtggtagggggaaataagcttttaaacaaatgtgtataatcttgttcaagttttgtgattctcttacttgacactttgtgttaaatgttaatggtgttgagattgttctcacatctatatatatactactagttatattgtgtttttgtaatattctcttcatcttcttttctatatttatgtgtatattttgtgaagagttgtaacattattttatcaattttattgttcttgtacttcttgtctttgagttatattttggcattggcctttctattaaagcacgaataattttttaacaatcaaaagcttatcattcttacctagcttcagtggaatgtgacattattaaaatgatgaatcaagacctagtgaggttggataggtttgatggatccaactttactaggtggcaagacaaagtgaggtttctcttgaccacactcaagatagcatatattctcgagtctactttggagcctctacccactcaatctgagaaagatactcttgagatggtagagaagagaaggaggagagaggaggaaaatctcctatgtagaggtcatattctaaatgccttgtccgataggctatatgatctctaccttaatactaaatctacaaaggagatttggggtgctttggaagcaaaatacaaggcgaaggaagaaggtataagaaaattttaatttcaccatatttttaattttcttatagtgatgctaaagattttcttcctcaaatctctgagatacaaattattgtgaataagttaaagattcttaagattgagtttctcgagacatttcaagttggtgcgattgtgacaaagtttccaccaactaggaagtgatataggaaaagaattctccatcaaaataaggattattcattggaagagatccaaaaatatatcaaaattgaagataaatcgagatggagagataagagaaatgtgaaggaacctaaagatgaggtttctaaggccaatgcagtctcaaacaagcatcccaaagggaacaacaataataatagtggtggaaaatatttggatccaagaaaagataatagccaatttaaaaaagtgagaggctattgttttgtgcgtggaaaatttaaacactacgcaagaaattgtaggcattgtaaggacccaataaaaaattaaattaatactatagttgatgaggaagtgattatggcatagtgcttatgttgttttgtgagatgattgtatatgtattgatatatttaaataatgcttgtgacgctataaataaataaagttcatttcacttaattctatgtgtttggtccattattttgagaatgagaattttgtgtacaataaatttacaaataattttattatttgagtatagttaaggggtgaaataattctattagtttgcaaataatatatatatgtgatatatataatatatagtatgtatatataatatatatgttaagcatatgatatatgatatatatttatgatgagtatttatttatttatatatgatatatataatatttatgatgagcatattatatatatgatatataatatgtatttataagatgtatatataatatatatcatgagatgtatataatacatatatcatgttattgcatattttatgagtaatataattataatatgctcctttgcagattaattaatgagttcacgtgacattttttttccttcttaaggtcctcgatttacttctcaagtttcaataaaatcatttccctaaaaagaaaagaaaaaacaattaaattatttgctgaaaatttaaaataataacaaaccaaaatcaatcaaataataacaaaccaatcaatttcgaaacttgatcgattaccatttctataatttatcattgaaaaagatcatataatattagctaagtttgtaattggtatgtggtttagctttccaataaaaaagataatatattatcaaggatggagatctcaaaatcttgttattcttctgaaacacatcctataatttattattatttttttttgtaaggatacctcctctaacacatgcataatacttacataatacgtacgcaaatggataataatatttattctttaactgttgtggtggtcctcaaattttgttttagtgggtgtaaacttaaaataattttattgatggtagatgatatgtgcattacccaggacattagagcatctccattaatagtgtgttatagaaagcttacttaataaaaaatattctctagttaataataggaaaatttaaatttatatgcatacattttgtgtacattaatttttttgatcacaaatttacaaaaattaaaaaaaataggcacactttatattaatatctatattacccttctctcttttcttctcttctaacttcaccgttcatactcgatccctatttttatccatcccgatgatggtccgatgggagtccgataatacctattttttctttatatttttgtacataagaaaatggtagtatcatgccattatcagactattatcggaccatgttctacatttatagatgttaagctccattcatcaagctcatcaggaaggcattcatcagactaccatcagaccataccttatatttataggtagcatcgggccaccatcagactaccattggaatttcgtcaaatttcccttaatatatgccaaaaaataataaaaatctaatacaatatttatcaaagtatgtctatggcatgacgtcatataatggttagccatttttttataattttaattaaattaaaataagtgggactcgatattgaattacaccaatagtgatattacaccttataagggtgctaggtactatgagtgccatttagtatttctctatttattataatacgtaaatgtaatattttattatttgtgtttatgtcattttattattttattagtatatttgactgacatgttcaattatgaaccatttatatatattttttatttttttataataaaattaataataaaggtattattttttatatttttaataaaaatattaattaaatatattaaatttttcatctgtgaaattttccattagagagttagagtacaatgttaaaaattgatataaataaatcacaaagtcattttttgtgctaaatataacacactttttacatttctcattggagtgctaaataagtgatgcagtactatattttagcatttttttttcataaatcagcaagtttattattaatccacaaaacatttacaatcaattacaatgaaagagcatatttttgacaaaagaccccaagaacatctttttacaacttttgaaaccaatctctatcttgttgaccaatcttttttggccaaaacgattctactctatgcttgacactatttttaattctttgtacaattacatctctattctctgtatgtttattcaagattggtcatttcttgcaaaccaaaccgagtacaccaaatgagcaacaccagctgccatcactctctttttaaacctgctgattttggctttgtgaatccactttagcagctgggacaaatcagtggtccgagctctccatgagagccattcctttaccttctacactcagtaataggaataagggcatctgaaaaatagatgctcatttgaccaacctgttgcaaataaaggctgcagacaacatcattaacaagctcaaacctctccaatctttccttggtcttaagccgattctgaattgctaaccaaagaataaaactatgtttgggaatgttgaatctttcccaaacctcatagcaccaatacaccctgttttgaatgggacaaagcagattatagccaactaagattctatacctggtttgggaaaattgatgtgcatcagttagtcttttgacttgatttttgggtgccacaatttgcttccaataccaacttccatggctaggttctaggtaatcccaccaatcttcctctttgagatacacactgtgaatccatttgacccaaagattgtcctccttgtttgctagagtccacacatatttaaaaagtggcgctgaattcctctcaacaatttttttaatgcatgaacgaccttctgaccttgattgacaaacactttcccaagccaataaaccagttccctgcatcatatattgtcctttccaaagaaaggccctacatatagcttcaatctcatgaattaccttctttggtagtttaaggatctagcacttataagagtggattgctgtgagaaccgagttgatgagcacaactcttccagcaaatgaaatatttctggtactccatgatcgagttcttacagtcattttttctgtcaaaatattgcattcctgcttcgagattttcttagtgcatatgggaacaccaaggtatataaaaggagcctgctgccttgtgaaacctgatgcttccaacactctaacaacctcttgttctaccatattgctgcaataagttacagattttgttttgttaggttgtaaacctgaggtggctgagaaaagctttaaaccttggagcaaaagaatgatgattttatagtcacctctacaaaagagcaaaacatcatctgcaaaactaaggtgattgaggttcaaagcatcacatctctcatgaaaggaaaaatcatctttgcaccccacttttttcataattcgagtcaagtactccatgccaatgacaaagagaagaggtgataagggatcaccttgtcataatcctctcttggattcaaagaaaccatggagggttccattgaagaaaagagagaatttttgagttataacacaatggctataagatcgtcttcaataaaatattttattttagcattttttaatataatatttctccaatgatgtgctataggaccatcttcaatacaagatgtaaatattatgttaaatttggcaaaaaaataagtaaatattattgttatcctaaaatccacacagagtgatgtggtgcttctctgagtgacacgtggattattgttgggcctggacgacgtattccttccttactatgccacctagatttaagtactcattagatactacttatttgaagaataatgtacaaatgttgtgcagggtaaatagtaccattcgagcagtgtcaatttcacagccactttgcatatgtcgcctagggtgaatgcgaaagaaagccttaaatataatttcttcattgtttgccaattaaatctctgtcttcatggtatttccacacgtaaatgatgtaatttaggaaaataactagtttgcctttttattctttatttatattgggaaacctaatgaatgtaataattccctacaaatagtggagccatttttactattggagggatccagaattcaataattaaaaagagctcttacactgtaaaaatcgctgtaagctttcaagagagatcaagagcttcttgcttcacttctcaagtaatacaagtaaaaggggagtaggctattaccactatcacggggtcgaacctctataacaaatctatgttcttattttacttaattactattcaaattcattcattctaatgactttaaagactaagtgtcctttgctaaaagcaaggtcaacattttgctgctttcattgagagcaaaagaacacaattgttgttttgaatctcttcaaaacacaagaagatggttgtgatcacaaggaggggtaatcctactgaaacaactgatacaatggctattgttgaccgagattttcgacaaccactagaatatgattatattaaagagctgtaagaaagtgagatgaagatttttacgtggttggggcgttaatgagccttagtccacgagtctttgttattaatggatgtatttaatacagattccacacttgagagaatgtttttctcataaatacagagaatgttcttggtgagtattttctcttcttgctcttatgcaacccaagattctcgaccccattaaatgagctttgagggggtatttatagtgttttggtggg

SEQ ID NO: 308563 - DNA, 4057 bp, Cannabis indica
ctgatatttttttaatcttcttctattttaaatctgcaaaaataaaatataacaagcgtaaaaatgctccaaacacgattaaaacttaattaaaaatatactaaacttaatctaaattaatactaaaaataatctaacacttccctttcttggatttgattgagtgtagaacttcttgagcaaggattgaactttcagcaatccatcgccctgacataaaagctaattgaaaaggcaatatcaagcgatcaattacacttttcatcctgtgtgtcaaaatgcgagagataactttatagccaaaattacattaacttataggacacaagtgatcaaaccttgaggcattagaattctttggaataaggcaaaggaaagtatgattcagcttcttgtttaagatatctaattcaaagaaacttttaaccatctcacaaagctgaggaccaacagtactccaatacttacggtagaaaatgcctgggaagccatccggactaggcgcctttaaagggtgcatcttaaagacagtgtttttaatctcctcagcatcaagaattctaccaataaactcattttcagcaatcgtaaccttgttttcaaacagtgttaaactcacttccaatattgctcccttccaaatcgaaaatgtcacaaaaatgtttattgaaatagttcctaacatcttcacgtttgttgagccaaactccaagtttctcttccacacttccaatgtagtttcatccgcgacggatgatggtcgaggtgtggaagaattttgtattcgcatctccaaaacggagccaattttcacgagattattgccttcgaattctgtccattctcccttccatttcaattatctccaattgaacttctgcttccttttccacacttgcttgggaaatcagatcaccttgaatccctatcaattttctcggaagctccatcaaccttctatcactaaagccgaaaacctcttgattccatttctttagatcgtacttcatacccttgagtttccccaggagtttagcagctgagcttccattgatacttttcatccgcgaattcttaataattttcccacaatcaggctgtgaagtccaaacttctaggaatcgaaacagatacttgagtttattcacttcgcccataacttgaagacagatcagagcatgatcagatcccacaataggaaacttaaccacccgagccttaagatattcagtgcaccaatttgcatcaacaactactctatctagccgcttatgaatttgattgtgagtatttctcaaatttttccaggtgacaaatcctccttcacaacccaaatccaccccccgtattgaaaagaaaatccctaaggaactccccttcttttctgtgttaaagactttgtacccccctcccttttccgtaacgcatcaagaatgacattgaggtcacctataaccacccacgagttgttacaacaagagatgttgtttgtgggccgattcccacgtaaggttttttctaatgcatgataaggagtaccatatacacaaaagacgtaccaaggaggtagacccccatgaagctgcaccttaacacagcaacctgcttcgaaaacttccgtaatattgcatctgaaacccgttctccaagccacacaaaagccacaagcaatgtcaattgctggtatgcaacatgaatttacaaatcccaacctattcatcacacccaccatagatctttatccaccttagtctctgagagaaagataatgtcagcgttactatctcgaattaaacccctcagggttttctccgtcgcgggtctacgaagttcgcggtaattccacgaaaggcacctctaatgatggtgggggcatgcttgcggccgcctcctcgtctgaaccaaaattttattcataagtaacttccatctccacacagttagccaaaatctcttccaaatttccttttgcagtcgcttcttgacttactaaccatgttatatttcttcctaccacttcgagttttaactcttgaggatcttcttgtggagtagagcttctcttttcctcttggtttcctttctcgattttcaatcttagatgacgatccctcatcgcccacaccaatagagaatttaccattggatgagggaatggcttcattttccctgttactttcttcagttgcagggcataaaggcggggaaaaacatgaatttacaaggaaagattggtaccacgtgtgggctttcctcttcctattattgcccagtaaatgagtaatcatctccgaaaggttgggggggtttgagagaagggattgttgggccttgtagaggtttaagtaatctagtttgtagagttgaaaaaagagtttttgggcttccttatcatcattgggctagtaaattggggtaggttcaggaaacaaatgtggtttttgagagacgcacaaccaatcatgaggtacttcaatgctttgggcaaaagttgggcccaagtcaggtatcaaatcctccctatgttgattgttagcaaaatcagggcttagtaaattcaaaaagttttggggtaccgccaaaatagctccagggtccccaccatttgacatgttgagcataatccatcaccttgtgtacccattcctttctccacattcccactactcgtaccaggatcgtactaatgattgtccttctcgccactaaccttgtccttcacatgacagctcaacgtcggagcttttaccaccaccgtcttctccccaatccccgtcgactcaccaccagtagtcgacctggatttaaccaccatacgctgcttccacaaacctctgcgatttcttccattcagctcccattcagggggtgtcccctgtttccacagacatcttgagaactcatttcccctttgagttgaaacaattgcttttcccaatatcacttttcatccataaaccgtacatttgcaccgcctccccagtctttagagtgaccattgtcatcggagcatggcatgttttgtcctagtgagccaacttgccacaattgaaacagagcatgggtagtttttcatatttaatctgcaccaaggactccgatttcccatctgcagtcaagaaaaacctcgccggaatcgaatgagatacccaaacatcaatccatattcttaaataacctcttcgaactaactctgctttccttttccatcgacttcaacaaatgatccgattttcttagcaacaatgggtgcattatcatttgtgagacttcaagtaaggagcccgtgtatctagacccagaatttggctactgcgaattctccaactcgaaccttcccttccactggccaaggtttgatgttcagaagcactccattcaccagccaaggcctcttctgcaggacataagagcagtcatcctcatgttcaaagaaaaaaccaagaactccattcttgcatttcttcatcctccatggcccaagtctacgccacacaccacttagaatcgttttaaccacagaggctggcatatctttgcaccctataaccttttccacacaagccttattagtcacaacatcctccagcgtgatgtcttcaaaaagttctagaatttccattttcaagggcattatctcgctccagtagtttgttcatgttctcatctactgtttccaccataacatccttacttaaagctctttccatggtgtgttcagctgacataaagacgacacactagaaaactcccaaaccaaaacaggacatatctcagagaaagaaaagaaagcaacgtgaaaagcagtagttgtaagaaagaaaaggcactgtttcataacaagaaagggtatatacgaaaccctcagctcataacaagctagactctatatggagccatttccttccacttaatattaactagtatacatatatatatatatatatatgggtatgctcttaatgggtattacccatgtatgggtattttattcttgaccattggatcaaatatataatggttgatatttataatcattaattaaatattaaaaaat

SEQ ID NO: 308564 - DNA, 1930 bp, Cannabis indica
ccaggttatagcaagcctaataaacccaaagaagttacagcaaacgaagtccaaatcgataatgagaagtgtgcctctgttggagacaatcacactatgcttccccaactcactgctgcataatatcagtaacttctcaacattcttacaatgcagtaacaaagtgtaaatacttttgaccctggaacctctacgggtaacactagtattgttctatctcataactcaatacaacctaaattaggttcttgtatattggattcaggtgccaaaaggcacatttattctaatattaaattttttcaaagtctttattctattactggtataaggctggttttgcctaacaatgacagtatcatggtttagcaacatggcactgtgtgtttatctaaacaatcttatcctacatgatgttctttatgtccccactttcacatataacatcatctctataagttgcctctcaaataataatgatgtttccataattttttatgctaaaaaatttttcatacaggaaaacagcagcaagatgatgattggcaaaggtgattccacaaatggcctctacattttggaaccaacaccagttgctgcatctgtctttctgtttctattgccacttggcatactaggctaggtcacttgtctcataaatgtttagatttgcttaaagatactttgcaatgaaacactaaagatttacacaaagatgaaccttgtcatgtttgtccttaggcaaaacaaagaaagttgcatttttcgaataaagacaactttgttgtcaaaaattttgatctcattcattctgacatttggggtccttatcacattacatctcactcaaaccatagatattttctcactctagttgacaatcattccagattcacttggatatatttgttaaagaaaaaatccgatgctatagcaattataccactaatttttatcttacattcaggcccaattcaattgcatctttaaattgttttagatcagataatgctcctgaactcacattcaaagatttgttctcaaaacatggaattctacatgattttacttgcattgaaacccctgaacagaacgatgtggctgaacgaaagcaccaatatttgctggatgttgcaagagctctctatttccaagctaaagttcccattaagttctggacagagtgtgtcatgacagccaccttccttctaattcgtacccccacacctaatttacaaaacaaaaccccccatgaaattctttttggcaaacaatccgattacacttgtctgaaaacttttggatgtcttgcttttgcctccacactcactgcacaaagaactaaatttgaaccacgtgttaaagcttgtgtcttcatggggtatcctactggtgttaaatgttactgattatatgatttaaattttcaccaatttttcatttctagaaatgtcgtatttcatgaaaatgttttcccatttcataaactaaatattgatcatgataatgctgatcctttctccacttttgtcttgccttcacatgacattatgaaaactcattgttgattatactactgctgttcctcgcaatattgctcctaacccctccattgcaggatgatacagcttcagtagaaccacgtgctgcagataatgctgaagatactgccgtgcaacaagagcacacatcaccttcttcatctgcaactactgcaccagctacacaagataatgttgttccccttcgaagaaccagcagaaacaccaagaaacctggttatctcagggattttgagtgttattcggctatacaagaccaaacttccactcctcaccctctaaataaattcatatcttattctaaattgtctaaatctcatcaagcttttattcttgctataacagctgcaatagagccacaaaaattc

SEQ ID NO: 308565 - DNA, 3343 bp, Cannabis indica
aatacaatacgacataatacggcattccaaacgagccaccaaactattaattattaattgattataaaataaaaatacctttaagctaaaattaaaaaaaaaagttagctttaaaaatctaaactaattaaatatttgtttcttttaaagcttgaaaaaactgtcaactaacttatggttactctttgttccctccaaaatgagctctaaactgttcaccatggccgtggcagtgccatagtctctttctcatctcactcactctcatgctcttttcttgccggcctaactcctttcctgtatttccgtacagtacctacctctccttccttagatggctctctactggaaccccagctaccggtgctccttctattggtcttccccaaaaccggctgaactatctccgtatgttctttcgtttgggcatgcagttccagaattatcaaaccaaccattacgaactcgcattgctatccgctctcaggtcttgttcctccatatccaacgattttctcggccaacaaatccattgtcgtgttttgaaatctgggctcggatttaataattttatttaccaacagtttgataagtatgtatgcaaaatgtggattaattggccatgctcgctccttgtttgattcttgttctagcttggatactgtctcttgtaatattatgatttctgggtatgttaaatctggccatttggacaatgcccgccaactgtttgagattatgcctgagaaagattgtatctcttacacaaccatgattatgggtcttgctcgatttgaatgttggactgaagcaattgaagcttttaaggacatgaaatcctctggtattttcccaagtgacttgacaatggtgaatatactctctgcatgctcgcatatcggtgggatttgggattgtcgaatgctccatgcattgctcatcaagctgcagttgctgaaatttgattttgtttccacgaatttgttgaacttttatggtgcttgttcgagtgttggggaggcaaggattttattcgaagaaatgcctgaacatgacatagtttcatggaatgcaatgctaaatgggtatacaaaagcaggtcttgttgatgtagctaaacaattttttgagacaattcctacaaaagatgtggtttcgtggggtacaatgattgatagctacttgcaattagaaagattaactgaagctctaacagcctttggtgcaatgctgagttctggattgcgggcaaatgatgttatggttgtagacttagtttcagcttgtgggcaatttacagcatttgctgaaggcctgcagctccatggtatgattgtgaaagaaggtttcgattgttatgactttatacaggcaactattatcaacttttattcggcttgtggtagaatcagccttgcacgtttgcagtttgaaattggtctcaagaatcatctcccatcttggagtgcactcatagcagggtacataagaaacggaatgattcaccaggcaaggggattatttgatgagatgcctgaaaaggatgttttctcatggagcgccatgatttctggttatactcagaatgagcagcctgatgaggctctagaactcttccatggaatgaaagatagtgggattgaagcaaatgaaattactatggtgagtgttttgtctgcaatagctagtttaggcgcactgggagaaggaagattggcccatgaatacatacatagtaactccatccctcttaatgatatcttaatgacagcaatagttgacatgtatgctaagtgtgggagcataaatactgctttagatatgtttcatcaattccgtgacaaagtttctactgtctcactgtggaacgcaattatatgtggactcgctgttcatggacaagcagagttatctcttgaaatattttccaacttgcaggggcgtcatatcaaactcaattcaatcacattcattggcgtcttgagtgcttgttgccattctgggttggtggaggctggagagagacatttcaagagcatgaagaatgtttacaatatagaacctgatatcaagcactatggttgtatggtggatcttttagggagggttggtagattagaagcagctgaagatttgataaagagcatgccaatgaaggcagatttcgtattatggggaacattattagcagcgtgccgaactcatgggaatatcgaaataggggaaagggctgcagatagtatagccaggttggaaccatttcatggagcaagtagagttctcttggctaacttatatgcagatgcagggagatatgaggaagccttttcagtaagaagaagcatgcaggttctaggaatgatgaattctcctgggtgtagctcccttaaattattaccttctacgtcgaaaaatgttgcggcccctgatcgtacaaccgcagtaaaccaggatgaaggggcatagggaagaagtctgtggagttcaatttgaaattgcagaataaggagtccatcaagaaccactccaaggagataaaataagctgtcaagtgctgtgggctgcattagaagttagtttgctttgattccatggcaaccatttctcagtttcccttgatcaccttatatttatttggatcactgttgttgacttacaactttgaatcttacttgatacttcttataattggattctgtagttgtatttaatcaaagtgatttattctcttgaaatatttgtatggtagttttaggagaaattgcaagaatgtcttgtattaagaaagtattacgctagatgataatggatgaatcgtgatttatctttgcagttttgattaatcatgatttatagtcaattacttagtgacctctcattggaggtaatgaaatggaatggaatggaaagaaaatttcattcttttatttggttgcatattaaagcgttgatatgtcatttcaatggaatgatcttttcaccattttagtagaatgactattctattttgaaatagaaagaaaaatcatttcaatgtattttttttataattttttaatacattttaaattttattccattcctatttttattcttattcgcattcctatatttttattccttccaaccaaaagcattagttaccacatcagcgactacaagcttttgtttttgctaaaattggtatatttcgtggtgcttaaacaaactaaaagttttggaactaattacatatataattacttatatatataattaatacaaacttgtaatcttgtggtattaaatataatttaatgctaataacgtaagttaggattttgggctttgtgccctaaataaa

SEQ ID NO: 308566 - DNA, 1622 bp, Cannabis indica
ctcaatttctgcctaactatttgccccaaggttggctggaaaataagagaacatgaaaattcagtacatgaaatagaacaaagaaccacataattcaaatgtcggatcaacagatcaaaacttactttcacttgttgaaaaaactcgtcaacaacattttgtgctctagcatcctctgacggcaacactccagatggtgaaaagggtgcatttgtatgtgaagtgatgctagaactactggcaccaccaggagcctgcctttttggttgtcttctttgaggtgtactgggtgatctcaaaagcctccaggtgaaaactattgccactgcaaggccagcaatagccccaaccgatcgcgcattctgataccattcattcaaagtcactagaaatcttaatcaaaggctacttaactgtgttataaataactcaaattgcattatcaggtaaataaatccactcacaaaatgtatgaacaggcaaatcaaccaactcaccagtcaccactcagatatttccatgagcaaaacatataaaaattcttctaaatttcataccaaggagtggcagcagtactaaatgtgaaaacaaagtcaaaatctttaaccttttatttaaggccacaatatcaacaacaacaaaaaagtttactttggttcttaaattagtgttttgaaaataaaattcagattcttcatccccagataacaaaaattgtttgtaaagcacccttttacacatcaaatgatctaaaaaagaaacctgtcggaatgaaatgacaaaattcgacaaaaccaatcgggagaaacaaaattggcacataaattggaaaaacccattcaaccattatgtaagaaaaaaaaaaagacaaaacttgatgggaaaagaaggtaatcagatccgtaaatcataaaggaaaataaaaaagagagagaaataatgagggaaaaaccaggttatggaaagagatcgagaagatattggacatcctgacggtgagataagccccaaaacgcttgataagctggacgaggtcgtctttggaagattcagccatggaagccagagatggagaaacgacgtcgtatgggtgtgtaaaaggagaaagggtttactgaatttgaggtgttgatgatggtgctgtaattgtatcccacatcgcttctgagttatcagctactgtggtgggtatcgaggagagcaaagagagaacaaaaccaattttctttaattaaaaataaaaaaatagacttaaaatagaaaaaaaaaaaaaaaattctttgctttaaccaaaccaaaggagaaagaaaaagaaggttatcatagaaaaaagaaaaaaaaaaaaaccaaaggagaaagaaatagaggacaaatagtacgatgctatcatatatatattcttaaattaaacactcttttattttattttatctattttatttactgtcaaaggcaaggggtgaagctgtctggtcggccaaaagaaaagaattgtcattataaaatagtttttttcttttttgttgacattataaaataattgttgtgctctaagaaagtaaatagcatgtggagtgtcttagccaaaaaaaaaaaaaataatagcatttggagtggacata

SEQ ID NO: 308567 - DNA, 1362 bp, Cannabis indica
attacgattaccattacaataaaccaaacatcacctaagatctttccgtttattttgaaacaggaaaccacctatccttcaacaaagttgctccatctgctttattatgtatgaagaaactacttggcattactccttcaggagaatatgaaagaccatttattaatcaatcaacagaatttggaaagcctataagccactgaaactagctcatcagaggtgtgaaggaaggcttgaggtggaggaattggaagaagagaggaccaatgaagaagcaagagaaatctagtgttcccgcattattgtgtttaatacatatgacaatttaataatgtaaagaaagaaagatagaaaagtcatgtagaaaaattggtgaatagtagaaaaacaagttaagaaagtgacaggaagagaaagtagagaatagaatttagggtaacccttggtaagaaaaaggaaaaaaaaaatggcatcacaattaaatctacacaaaagcaataaacaaatacagacaattttttttattataggattatactgaaaaagaaaaaagaaaaatataaagaaagaggaatagtttacctgctctttatctgacaatttggtaggttgtctttggatctatttaagatttcataccacccttgacgaagattattgattacagtgtgcaaattcagttttctttttctcaaaatttcctgaaagataacaataaattaataccagagaccaagattaatatgaacagagaatttctgagttccttaacgtaataccttgttgatatgaaaatggcaaacccaaggactgaattgtctctggctaccggccgtcgaggtgtagctaaagtaaaaataatcaaagcaataagaagagcaaaagaaggtaaatgtgcatgtaaagaacaaaaatgcaaagtacataagagggtagaaaccaacattatcatgactgtagaaacaatgcttgaaaacttcagtctctgcaaataattttttatttctaaggctccatactcaaaaccatgcatctgtctcccaagcttcttggacaaatatagtgacatagtttgactagctttgctttttcttgagccacactccaaagcattctgtatgaaaaaacaatttatagaattgttgtgggaaaatccaataccaagcatctatcaagtaggcaaatattccataaatgcacaaaaacatatagagatcactttgatacggtatcttaattacttttttggaacaaaaaacataatttattaaatgatgcaacataaaaggagagagagagagagagagagagagagagagagagagagagagagagagagagagagagagagagagagagaag

SEQ ID NO: 308568 - DNA, 1780 bp, Cannabis indica
gttattttcatgttattttttttttaagaaaagatcactattattataaatcaagagtcatttacaacaatagtgaaaataggataagaaatttctcctatccaacgtgagtcttgatccaactctaaagcatgttttgttaaaccatgagtagcttggttagcatatctcctaacatgagaaataacagctttaaggaaaaaagataaaagacaacgaatatccataattaaatccgagaaacacgataaatctgtcaaactagaatttaaagcattagagagtctaagggcattagtttcaatatgagtaatatgtagttgttcttgcaccacccaattaaggctatggaaaagggccttagcttccatttcatctgaacgaaaacaaccttgaactggctttgagagaccggctatcacgtgaccttgactgtctcgaacaatggcacccacacctagcgtttttgtagccaaatccagagcagcatcaatggtaagcatccaaactgttccatttagaggtttccatggcatctccccagttgtgttcctaattgaatccaaggtcgacattgaagttgaaggaaaaacagcagcaccttgtttttgattttgattagcagtaagaaacttgtccatataattaattacaaaagctgcagtttcgagaattgttcattctctttcctccatgaacaactttatttttctccctccatatggcccacatgatgcacacaataaattcaaactcaattttggaatgcaaagttgagagatagataagataatcaccattgtacatatactaagcttttcgaaaatctatggtaaaatttgtattctttgaaactgattttgcgtgtggacatgagaaaagagagtggcctattgactcccacgcatttctacacaatgagcacacaggcgaatcaatgaccttccttttgcaaagagcagcagcagttggaagagcattgtagaaatttttcccaaaaaatatttttatttttgtaggaagatgcaggttccaaaattttgtccaccagtttttttgcaagtgtgaagttgaagaatgatgttggtcatctaagcttgctgctaaatgaaaactggatttcactgtataaatatgtttgtagttatgtgatgccatattaatctatcaccacttggaaagaaacttaatgggatagtagtgattctgtcaatatccaactgcccaaaaaaattgtcaagcagctccaattttcactcccttttggcagtaattagatcagcaaccatgagtgtggccgacccattgaaagtgagtggtttatattctgtatgtcttggaatccataaatccttaccacactgaataccaaacccgttgcctattttgtatcgaagtcctttagcaagcaactctctttcccaaatgtatactttgccatgttagtgaaggtgagtgtcctgattttgcttcttaaaaaagagttgtttgaaaagtacccacactttaagagacggcttaatagagaatttggcatgtcaaggatcctccatgcttgtttggctaagagagcttgattatagtgcacaaaagatcgaaagcccattccaccttccactttagatttgcaaagtagattccatctttttcaatgaatttttgtaccatctttattagaaccccaccaaaagtttgccatcatactttcaagtgttggaaattattttaccaggatcttagatctactcacaaggatgctgtttaacaccctaaatatgaa

SEQ ID NO: 308569 - DNA, 1135 bp, Cannabis indica
tttttttaaaaaaaaaaagactattatatcaatttgaaaataggaaccaatatcttcttccttcacgtctataggtacaaaatatgctagcaaaaaaaggcaatggctgcagtattcctgtggcaaagctcaataataaagagcaatactgtagttttaaatgtgaaccataagaggagggtgatcctagtgagtagtgaacctatatttttgtgtaaataggttaaagtaaatggagaatttttttcatatataagttttaagtggtgatatatatttttttttgctagagaatgtcaatatccataactttcattagaacggtaaatattaagtcgtaacgtgcaaatttattattgcatttctcttatcctattcctgtagtttattaggacatcaatgctgtacattcacgtatttaatacattttggaggactctttataatattacagtaagaatcatttaacctttagaaaagattccttgatattgaactctaataataagaacaaaaaaatatagtatataatttatattaatctttgtaactcaaaagttgaagcaagctttaccatgtatctaaatctttttctgcttcatgttgatcaatggagtttacaaaacttctaatttatttttcaagttattttcttcaccagcaagccattacttaaacttgctttttcggtttaaaaagatgtataaatgataaatagggaaaagatgttaagtcgccattttatatatattttaaaattctaaattaattatagaaacaataaatgatgaatattgtgaattgttagtacataaatagtgtagcaattttaagcataatttagtttttaaaaaaaaaacttgtaatttttgttattccttggaatcatcattctatattattaaaaaaaaattaaatacaaattaataaattaaagggatatttgcagcataaataccatacgttctaagttttatacacataaataccactatattttaaaataccttaagtttacatttccgttattacttttctgttaaatcctattcaaacatagaggagtatttgctagcataaatacttagatgttttaaattttcatacacttatatatcacatgttttttcttttt

SEQ ID NO: 308570 - DNA, 4751 bp, Cannabis indica
aagatctgtactctgcctcagcagagaatttggatacagttgtttgtttcttattttggcctaggaagatgaaagccagtaagggaccttcttgtgtcagggcaggtgccccaatcagcatcagagtatgcctttaaatgaagtaattgatgcacagatagttgagagttgtgattagattgaaaaaagagtccttggccaagagtacctttgagatattgaaggatatgatgagcagcctgcatgtgtggttgcctaggatcactaatgaattggttaagccgattaacagcatatgagatgtcgggtcttgttattgttaagaaaagaagcttgccaattaggcttctataggatgcgggatcggatacaggtggaccaacatctttgctaagggagagattagcttccataggtgtggaaacgacttttgatcctaggagaccagtttcggttagaagttgaattgtaaatggcctttgagatgtggaaatcctagatttggacccagcaagttcgaggccaagaaagaatcgtggggaaccaaggtcttttagttgaaattttgagtttagaaaaaaatttgaatgcagcagcatctgtagtattgttactggcaactagaatatcatcgatgtagactagaagagcaagaaatttgttgggggtgatcggatgaagagagagtgatcataggcagattgtatgaagccatgttgagttaaggtggtacttagtttggcaaaccattgtctagaggcttgttttaggccatatagacttttgtgtagttcgtaaaccggattgggaggaagctccccctcattcacatatcctttaggaagagacatgtatacttcttcatctaaatctccatgtagaaaggcattatcaatatccatttggtggagagaccaattatggatggcagctaaggcaaggaagagtattaaggtgttgaattttgcaacagaggtaaatgtttctgcatagtcgatgccctgttattgagtgtattctttggcaaaccatttagcaaaagaagttgcaggtgctgtatctatcccaatgtcggcttgattccaacatgccttcgcaaaataataatccaccaagcaatgccacatgccttgatctgagcctagtcttcgtgggtaggcaattggtggcagcacgccacaacaggtccttaacctttggggtacactaagcttccaaagggtattccaaaaaactgaattatcatcctaagcacttaactctttactcaactgcaagtacctgtaagcggatttaactgaaaatggcctaaattttcccaacaccagtattacacatcatgtatacgacttaaagacaaggaaatgctaaggatcatattagcatctcgttcattaaacaaatcacgaaccaaatcgacatcccaagccaaattgcaagttaccattaacgcctgaacattttgatcaataagagcatgatggacaaaaattaccctcagattatcatcatttggcagccacgggtctaacaacactctaaccatagagccatcaccaactcttcatttggcccccttaaatactagctcttgtgtttcaaaatactacgccacacaaagctaggattgttatccaattcagcagtcaaaaagctaccattgcgataataaagagctttaaaaatccgactaactagggaatcgaaacgactaaagagtctccagccttgtttgcacaagctaaaatatctaagctttcgaaaccccatgccaccttttgacttatgaatcgtcaacttgtcccacttcttccaatgaatacctttaaaacttgcacatcaattgctccatttcattacaagtttccactagaagaagaaaaacattcatcgcataaattggcagtgattgagctacaatttttatcaacaattccttcctcgcctttgatagcagcataccttcccacccttgaattattttcctcattttatccttcaagaagccaagcatagcagttttattgcacccccacaatgtttggcaaacccaaataagtgtttccttcccctgcttcactaatacccagtattttgaatatttttgcaaattaacttgctgtcccgaagcaatttgaaaagtgtttagaagttctaacacattaacaacactttcctcagatgccttgcaaaaaatatagcaatcatctgcaaaaaaaaaaaatgtgtgatatcaccgggggccccttgcaaccttacaccctcgaatttttcccagtctctcataatctcttatcgacggcaaaaaaactttctgcacacagtataaaaagataaggtgaaagaggatcaccctatcttaaacctctagtagggacaatagggccaatctcttgaccctcagtagtaatactataggagactgagctaacacaattcataatcaacttaacccagtgtttagcaaaacccatcctcctcagcatggcttgtagaaaaccctactcaacctgatcatatgccttactcatgtccaacttaagtgccataaaaccgtccttaccagcttgcttccttttcaaataatgcataaaaacttaaaaaaaaaaaaaaaaccaagaatattatcagcgataagtcttccaggtaaaaaagcactttgagtttcagaaataacactgggaagagctgctttcaacctattggccaagactttagagacaatcttataaacaacattacacaaggcaatcggtctaagatcactcatacttttgggtttggacttcttcagaataagcacaatgtttgtatcctttaaatgatttgggaactcaccaaaggtaaaaaaatgttgcactaactgaatgacatctctgctccagaatttcggtagaaccctagattaaaactatcaggcccgagggatttgtcggggtgcatttagaaagagcttttcaaacttcatcagcttccacagtatacacaaacatagtttaactatttgggtagagtttcgatgggtatacttttttactcttttactgctcaacgcctatttctttgcttaattattggccattatggcatattttcaatggtgttttcataaaccacattatgattcattctcttgagagttgaaaatttaatcatacttaaataaatgaataattctaggaagaagttatggtaattaattttaaatttatcttgatttttattttcttaacttaagatatttaggtgtttatatattcaaaaatatttgtccttaatcacaagattcacaataaaaatttaaagaaattttcctatatatattgtcatggcgcaagtttaatgcctaaaaatatgagtataatcttgtaaacagctaacacgtggacccaactctcaataaaaaagaatgaagtgtcaatagatagctcctgtagagctaaccttgcatgatatgaacttgcgagaagaccgaaatatggtctaatcgtacactatgtacaacattatgtcaagaaataagcaagacccgaagaagcttttactgattgcgcatatatagattatatgcgatgagtaagtatatctctactgcgacatgtaaagattgcttctttacacatgtttggtccgaaagactaatatgttcgacgactcgttaagaactcgcaagttctaagttgtcaatgcaatgttcgaatatgggattaaggatagttgcagacattcacctaataggcccaaaggcccattatgcgagtaaaacactacaaagcttgcgagctcgcgtgtttagaatatggatagttaaatatgtgactcgacaagtcaaacacattcaggtaattaatcaatgaacagacaaaattgtttttacatttattatgttaacatttatcttaattaatgtaataaacggtcttatttaaccggttttgaaaaatcaaaggacatttactttctataaaaaggagtgatccgaatcaaataaactaagctgaaagaattgtcaaaagtcaactaagcagacttaatctgactgaattactatacttctttatctcatttactttttactgtttttattttgtctatttcgtagtttaatctttgagtatttgccactctaggtaaatacttgcaaatttgcaagtgtgtattcttgctcaactcgaatagatgttatttttggtattgtttaatttcttccaacaacatatattgataaattaaggaagtggaggtagctaagtgggctgagaatgtccaaagaaggggaactttttctgaaaatggcaaactaaacttggttgaaagttttgtgatttgaatagggccttcaattataatgttatcttgtctagccactactttggattggatttagtggatgacacatttgaatcacaataatattggcccaacttttttttagtaaacttatgtttttcatttacatcgactacacttttagtttttcttttttttaaaaaaaaatatttatatataatatgtatactagtttttttttttcgataaggtagttgtacatgccttagacacgtacttgtttgtttaaaagtgcttgtatacaaacatcaactaaccaaaagagagtcatttatatacagtgtttcagtttttacaatccaaaaaaagtaacaagtaactagttgtggaagtattcttaactttactgacagttaatgtttttttttttaaataataaagcaaatgtcattttttacttt

SEQ ID NO: 308571 - DNA, 859 bp, Cannabis indica
cctgcatagaaaatatctgaatagagcttcttaatatcaagcttggaaaagttaatgatggtccagcttaaccgaccaacattcccattaggtgtctcttttgctttatctatgccatatataatcgagtcagtcaacaaatataatgtctagaatgaacaaaacaaaagttacacgaaagaaattatccaacttcaatgttttcattcacccctttttatcaatttatttatgttcccttaaaaaaggtggtgccttcaagttcccgtgagtcgtgacagcgcaaaatattattatacatacacagagatgtggcagtaaatttgtcagcacacaagattgtaaaataataaactatatttttctttggtaaaataataaactatatattaacaccaaaagatttttgattatcacactgctgcgttcacacccataataatgttacagacatactcctcagcttaacgtgttttctgttctttaaactaccaaacacttttcttttttttttttctttgttatctagatcgagtgatgtttaatcaaatggacaaagggtttaataactttttcacagaaaaaaaaaaggtaacttcttcccctatctgatacatagcatgattccttgccttcaaatttccagataagtttaaatgatcgtagaaaacaaaaatgaatcatagataaaaaagaacaaattaattaccttccatgagccagtcaaacaagaaaacctcaagttattttgaaagatttttaccagagatttttgttcccttctgactaatacactatgtggaggacggacgtggttaggttttcgtaagaaattgataatttgatacagaagatggat

SEQ ID NO: 308572 - DNA, 803 bp, Cannabis indica
aaaaaaaaatacaaaccaggaagacttcatctcctgttgcatattttccagcataacctttcagcaactcttccagtgctggaacaaatgcaaagagttgtcatattagccacactactcatttggtacaagttacaacgaaaacaataaaacttttaacaatagtctattaggtaacaaatacagatatatctatatctatatttatatcctgtaattagaagtatccatttggctttagtgaacacgaacctgcaaagccattttcaataaaatgtttaacccaagaatctctatcttctggagtaactctatcttcaagttgtttctggaaatggatcaatgtcatgaattaattataatagctttcttctgaaataaagcagcaatgaaaccagataattaccacttaccagtattgctatattctgaagaggctgtatgcttgaggaaacaatgtttgcagcctacatgtcagctcataacattaattatttcagctgaaatataccaccaacccaataacgtaacaaaagcataaacaaaatgaaggatgcacaagtcatgaggcttgaaaatctagtggggttgtcctttatccgattttgattatttcagagaataaaagctcttcattatggttttcatagggttcttaagctctctctcaaacacgctttattatgctcaacacaatgcttcaccaagcttaagactatttgcaaagagatatttgattttttatgcttacatttagttaaaaaaaatttcttaaacaaataataactaatatttgtaggata

SEQ ID NO: 308573 - DNA, 1674 bp, Cannabis indica
aaattaatttaaaattaatataagttcaattaatttctaaaataaataatattagtatcatatatttaaattaatctaataaaataaataatattaatatttatatatatttataaaattaatcttcctaataaaatattttattaaactaataaaaattattaaatagtaatattttatatatgaagatatattaatttctaacacgtgcatgatgaatttccaaaataataataatataacaaaaaagtgtaaggtaataaggtatattgtttgtgacaagtttttccaattgtcttgtaagtcaatttaatttcagtaaaagttaatttccaaagaatcatatatatattgttgttagtaaaagtccaaaatgataatagttcatatatatataagttatagactatatatatagctaccgaccaccaactccaagatctcatttcgaatataaataaagtcttattcaatttttttattttttattttttcgaaatttagtcttattcaattgtaaagtgctattaatttataagacaatcactaagtaaaaaataaataaaaaaatttaacagcaattgatcacaaaaatatataagaaaaatttagatctatataataataatttttaaaaaatatcactaattaattaaaaaataatacatttaaaaaatattaaatattactgatacccaataaactaaaatcaaatatggattaacaattccaatacgcgcctctaatcaataattttgtattgttttaaatttcatcaacgtgttttgctccaaagaaaaaaaataaatagtcataaaaaaaatcatctcaacgtgtttgtttccaaaaataaataaataataatgatcataaaaaaaacatctacgtggtgattttttattgtttttgaatagcaaacattagaatttttttttaataaacatacaatataaattaattagtgacgagttttaaacttcttaaatacttcatatttttttatgtttaatttctgtaacgataaaaataaaataaaacttttaaagaacgttgattatttttttcatttcaaaaaaagagtgttaattttattttttttcaaatatctaaaaaatatattttccgtaaaatatgtttatatctatttttttcgctgaaaatatattaatgtttttagaggatttagaccaatttatatctattctattctctaaaataactcactgttttttttttttaaccttctacatttatattacacaacatatatttatatcttctcaacatatcatttaaaaattatttattttaatatattttatttattttaataagtaaatataaattaatataataataacacttataatatttatagcttaattgcgcttcttacatgtaattaagtactatttaagaactaaatcttttacctataataactaatttgatgaagcaatatttttttttatcagttttttacctcgtaactaaatagtttagtttttagctactctattgtgtgattaaaatatctataaaatatgtgtatatcatcactactactcaggattgttcatacaatttataatctacggttcttataaatttcaaccaatttagactaaaccaaataaacatgttgtcaatagttggtcaataaacaattctcta

SEQ ID NO: 308574 - DNA, 888 bp, Cannabis indica
aaaaaaaaaacaaaacaaacaaaacaaactcttctcatctctgttggtctcctccttcagaaggttgggtgaaaaatgaaactttgatgtagtcaagccattgataattagggtgtaatgagtgtgttacatagctatgattctcactatccacactagggccttttgctttgctagcttcccaaagctatgtgatggtagaaggtgattcaatttgagttattgaggcaatgcaagaaagttttgatctgtggaagattattaattggagactgcatcagtcaagtggagatgttaaaaccttcttttaatttctagttgtctgtttaatttattcctacagcaattaattccctttcatggctcataatgtagcaaactggactttaagctgtaaggcttcagaagatattgttctgaattctaattctgagggtgttatggggtttgctggtttaatgttgaattcacatttatcaatttttcatataacaaaaaattaactgtgaaaatttattagagacttgtcctctttaaagtattgtgtactagagagtagaacagagcaattataacattatatatatatatatctctagaaattaatttccagtcttgaagatactgtatggaccgctaaagatttagaagcagagcaggcatatatatacacatgaatacataatatgtacaagttaaggaggttaatattagagtctcactgaagcaaagtggattcagaatattgatgttaacgtttgcctgggattttggggtaaaaataacctcacaaaataactccacctggctatatatcttatatctaccatccattattccattcattacggtgccgtttggtaacactttttaatcagttttctgttt

SEQ ID NO: 308575 - DNA, 1523 bp, Cannabis indica
ataaaagtgtcatatattttttagtttgaaatgtattggtttaagaataaaatattaagattttttaagtataaaaaatcaaatttctctaagtgacacctaacgagtggtttaagttatataaaacccgatacttaaatacactaatattgatataacaccaagaaaaatacttaaaatcaataatatcttttaacaattctcataaatttaataagacattaatcaagataatgacatttaagtaattgtaggtacaaaattaaataagaaaatgactatttctaactaaaaatcataatttctattaaaccacaaactttccggaatgtaaacgacacttgcctaaaacgacaaacgacaccccttcaaatatatatattacaaacgacaaacaaaaataagaagacagtaaaacgacaacaatttatgaaatcaattctacaaactagtaaaacgacagcctaccaagaaaagacaaacgacagaaatttgaaaaccaattagaatacaaaacgacaaaggggttcctaaactacaaagttcttttggaatatcttgaattttggttgatatattattagcaggccagctttgaaatttagtgggtcaattttttatttttaatttacacctagatactaaaaattccaatttgttttcttttttattgtgaagtgactggtttttactattgttctactgttattttttagttgttcctctgttgttttaattgttttgctttattgttttacggttattttataaaaagataatatttttgtaaaaattccatgtgatcaaggtaaaattgtaaatttttgtctaaaatccaatatttttgtaaaaccctccccaaaaaatatgtttaggcctttatttaattttttttagtattttttttttataatcaattaaaaaatgtgtattttaaaaagggttatttttttggggaattatcactattttttaacttttttttttaaaaaaaatttatgagatgagttgttccggtagttgttatgtgggttgctatgtatatcgattttgattgcgatttagattgctccgttagttgttataggggaaactgtgtagaattccgtaaaaatacaaaaaaaatacactattttaaagtgtaaaaataaaaaatttctaattttttaagtatatattaagtaagtcttaattaaatacaggcttaacccgtctatactcatatagtcactcctaattattagatttgattttcattaaatgagtcaatatctagagattaaattttgtatccataaaatatttggtcccatgtgattgtgattaaaaatcttatacataaaagccacaaattttttcttatacgtatacatgtcggtgtgtgaaaattattaaatataaataagttgttttttagtaatttatagtgtaaatatttaagtttaattctcggttgtagataaataaataaatataatttttaacggtaataatacttaagttatatttttgaaacttttata

SEQ ID NO: 308576 - DNA, 3768 bp, Cannabis indica
tggtggtttagaacttcgaggcacatcattaccattaaatgttctgactgttctcatttgcaatgtttccatctgttagatcaattttcttttgatttaacggtggtctgtaacaggatataaaagtcaaaagtagcagttcattttgccatttttggacttcaaaccatcaaatcttttctacaaatcatgattactccttctttcaacttgcatgccctcactatcattgacttatttgttgcgtatttcatcagattacatcttcaaccttacagactctatgaactcatcgtttcaatcatcaaaatctcaatcgcgaagttctctattgcccagaactcttcatcaaaacagtaagtggctcattcccttcttccttatgctttacttttcggtatttgtagtttggtcttcgtgattgattgtttccttttgtttttctttgtttggttattttttaggtaagttttgtttgtctgataattttagggttaaggaaaagttttaggttattagattcatagatttctaggttaggttgtatttaatttttccaaaaatttggattacagatgttcatatgtatgccccaatttattccagaaattacaaccccagaattcttagaaactgactgtcctgaaaatttagcccttccattcgagtccaaaacttatgtacctaaaacttcttgagataaacgatgccaaaattagggatcatctaataaaaagcaatcacgatgagattttaagtcgctataggcaatttttgcaagaaataactgaggctaaacatcattttctacgagatgtagcttagcctgaatgccaaattttatcttctattcctttagcgagacccttgtttttacctcgagtcactgttgctttttcaccagatgacttagattttggaattatgacttctaaagcttgaaaatccaagactcatcaagatcccacagtcactttcgaagcagaactcatcaaatcaaaagttagatccataggagcatatgtgggagatgaactaagatcctgtggcatcaagtacgagaaaggatgtcatgttaggtctgtagctccagaggaatttagttgtttctctcctgaaagaataattcgagaagagggtgtagcactaggataggcgcttggagccttgagcacatcagaggtggagtagtactccccgtaagggactattacaaggatttttgcaattatctcaaaattgccccttttaaattaattatgggttcatatagacttttggcctgcttgaaggtcttatatcaaattatggagtgggagtgtccaactcctttcgaaattttttatttttactttgtgaaggcctgtcccgtaaggaagcgaggatcaggtgggtttctactatctcaagacccacataaatgatcgaaggatcatcgtgaggttaccgaacaaaactgaattcaaggatgatttcttctagacatccggtctctcaccaatcaatatcattgcattttgtttcttacgtaagtactaccttttctcaaaaacctagttttgagtttccaatttataaattgtaggcatttacttatttttcttattgtactgacagcggtctcaaagaggcctattctaactcttgagaaggagaaatgacacaagattctccttggtcttccgtttggattgcgatcacctgattttttactgaacgaaatcaatctgaatacgtgtaatcttgttggtagcaaacaatctgcctgcgcctttaagaatccaaaatattctaggtggcagaaagttccagttccagcttacgaggaagatagggattatgtggctcgcatttactacatgaagaaaatatccccttgggaagctgaagaagaagcatcccgtggtaattattgtggatggtctcctactgtgcttagagccaaatgtacctcattaattaagtttaaggatagcatgtataacttttacatctgggatcatttttgtgtagatcgcatagccggtttgacagctggtaccccaagaatcatgtccaattaagttgtaatagctcctactttggaattattgaacattatggtactaatttggatagggcgagccatccagactcagacttggatttgtctccattaaatccctttgacctatatatgatcactggttctagggagtttagtagttataatagttcttcctcatcctcatgataattatggtaacccctttaagtgggagtttactccccaccttctttttgtttatttgggataaatgctgacatattttcatttttcctcgcatatatgtattttgaaaacctcttcacaagccctttagtatctaagaaaggtaaaaaacgtgttgtgggttcggaaacttcctcgggaatgaaccctgaactgttagagctaaaaagaaaacaatatagaaaatgtgcctaaaaaaattgttattgagcctgataatcctcagacaatttctccaatcccagctgttgcgaataatgatgaacaaaagttaaattctcaggttttcaacccgagatctaattcttggagccttcctgccctttgttggctcatgtcggcattatgggctcacaggcttgttcacagcttgccacttcttgttggtgtcacttccaatctttcagtaggatgattgggcttttgtaaagaatgggagttttgagagcttatatgagaggagtttaaatctctctttctcggtaatcagtaaatcttcattttgttttccaaaacttttttctttcccttttaatatcctcttcctgaattatttttatcttgtaggcatctctcttttctcagctagcttatcaaagaggcctttagagaattaaacaactggagtttgagctttgaacaaccgttgagcaaagtgaggttattatgaggcaatggactaactctcgaatcgaagttactcgtttaatgaaggacgctaaggaacagaagtaaagccataagaccgagctcgatggtgctaaaaaggagattaaggatctctgcgatgctcatcagaagctcaatgaagaacttaacgaggcaacccaaaaccttaatgaaacaaactagaaactttatgaagccaacaagaaacttgatggggctaaagaaaatcttatagcaagagttaaatcaatggctaaatgttctatctatcatgcttggttagccaatcacaacatgaatttaagcttttcaagagaaggagtcgtgaagatgctggcctattttgagcaaaccaaaaaagacggggttgcggaggccgaggaagaagaagaagaagaggaagaacaaccatccaagtctctaaccatgtagacttggctgtcattttttttttcttcagaaaaatggccattatgcctagacaatggttgccccttgtggcattttgtaaaaaattttgaattgttgcatgaccaacttttcttatttatatatttttactttttatgccttgcatcttgcttatgacttaaatttgtttgttaattgcgttttatttcacaatctaaacatttgtctctcgatttagcttaagatactttgagttgcatggatttccaatgtcattttctgtgagatatacaagtagttaaaaatctaccatgtctttcacgagcagttttcactctgccatgttctacgggagcagtagataatctgctacaatttttagagcaaacttaaaatattttgaataattcacttta

SEQ ID NO: 308577 - DNA, 1537 bp, Cannabis indica
ttagtaggtggaacttacatcatcagtttggatcttattagagagaaaattatgcaaattttataaaattatttcgtgactaactcaagtggttaaacgaattttaacgaaataggattccagttcgagaccaacaaatataattaaaaaaatcgagagttcgaaatggattgaagaagaatcataccttgtccccatataggcatagccaatttgcaagagccaataggcaatgaaactttttgatccaatttggtcatatcaggctcataaaaccaccaatttccttctctcttaaccaaatcattacacctaaacaattccaacattggcctacatttactccaaaacaccactttagtactttttcccctattccattctttccttttccatttcttcacagccaaattggccacaactagatgaacttggagcctaaacacattcctccccgccccggcttgttcctccatacatggcaacttagccaatatcacatccattttcttgtacttgtcgaaatcaggcataggtatctcgggacaagatggtacctcgctctcttcctcttcatccacccactccgggaacaaatcttcccacttgaaaaaatcggtgacatgatcgaaatgaataggtatagcttctccaatgtttttgtgtcttgtgttccactcattgacatcttcttcatccatgttcaccatacctatcttcttcttttttcctttccctatttcttttaagaagtttggtaacacttctaatttgttactagtactattatttcccttagatgagttataatttggctcctctatcacagccttgatcaccttcaccccattttcaccctaatcataaaaatgatcacacaacattaataaaaatacaaacgaaaatagaacaattttcaaaatgttactttacgaaaaagcccttcttttcttttcagaaagggcatcagggctttttaaaaagacgattttacaaagacttatcagaaagaaattatcgttcaaaaaagtaacgggatcaagctcaccttaccttgggatggcattcactaaatgagcatctaacaagataagctgcattttcatgataggttgataaagaaggccttagaagaagaactgcatagatgataatgaagaaagcaaggaacaacaagttgattcttagcacaagagctttcgaaggagctgcctttatgatcctttgcgggaaactaaccgatccttcgaccattttagccgatacccagatcaaaattctcaattttgtgtctgaattctaatgagtttaaaggtatacaatgttgtacactatgtgtttgtgtagatgaacattatatatatgagactattttggctctttctttgtattgtgtttaattagtttaataaaagtggttaattaataataatgatgattagaatattttctaggtctggttttgggttttggtcgactattatagtagtagtaaagagttaagaagagtaaaaataaataatttgtaagtaaataa

SEQ ID NO: 308578 - DNA, 1640 bp, Cannabis indica
gtaaactgtgtaaatttccctagaagaagaaggttgttaattaatttgactgccgtagagtatactgagtcagagtcaaggcaaccatgcgcccccgcttgcagccaataatgacaccttcttattttgtttgtttcacaatataatttatttttattatatatagctgcccatgtgattctatatttaaaaatacaacaacaattaataaacaaatgatttactcctccattgtactctttggaaataatattaaccgccactacattttcatatttcaatgtatttatttatctatttttatgaatagttaagatatatagtattgccacaaatttaactttacatcctaatagcaccgccccatcgttctgagatctaattcatgcttccctcttttcttttttacaattgtaatatccattctcgatctgtttatggtattgattttctttagaattttaacatgaatcttacttctaatctctactttaatagccatctcttagcctcttcaagacacctgttgctaacagtgttgtatataatcaactgttttaggtaaaagattcacataggcaactcactctaattattaagaaaacatttaatataataagatatataatatataggttctagagtgtttaatctaccacatgttttgttaagttggttatgttaggtgttagttagttcttagaatcttgatcactctcatctataaataaattaagcgactctcatcaatagtgttttagcatttactttctacatggtatcagaagttcctgactcatgtccatgttgtcttcaacatccgatcttacacctatggctattctcgttgctatcgttgttcttgctccctctgaatggaatcccttctctaaatctcaaacttgattgcctcaatttcctttcttggaaatcacaagtggttcctacgatcataagtcgtggccttgatgagattttattcactggtgtccctccttctcaaaccttggtcactagtgccccaaattcggagttctaacaatggtgtcataaagatcagctcctcctctcttaataacaatcgtccatgtctgaaagtctccttgcttcagtttcaaattacaccacttcttttgcagtgtgtcgtgctcttgagcgaaaattctcctcgcaaacaaaggctcgttgtctgtaactaaagggtcagctttctcgtgctcaaaaacgaagcttcactatatgtgaatacgtagataaatttcagtcaattattaataatgtccttgctgttgcagattctccagtgagtgatcaagatgttgctctacagcttttgaatggaaatttcgactctctagtctcttgaatgacctcaagaagtgatactttgtcgcttgaagaagtccagaaattactcctcttccacgaaagtcgtctgaagcatcacaatgccatgataggtcttactatcaaaatgcaagccaatcttgcatttatatttattataatatttgataatgatgatagtataaactactcaaactgcaccacattttcacggtgtggtttttgtagttttaagatctcgtggtacgattacggtttgaaaaactacaaaaactgcatatgcagtttggttt

SEQ ID NO: 308579 - DNA, 770 bp, Cannabis indica
gggtctaaattttaatattagggttttattaagaacaaaaaatgaaatttcccttttcttattagagtgaggttatatataaaagttaaataaaatgtaataaacttccaccatagacactctaaaaagggttatacagatgtaacctcattttttgttcaaataaatttgattggttgttaaagaggctcactttattttcatgtgggctggcatacttgattttctctcttaatactatctatttaaaactaataatatttctttaaaaattcactctctcaaactcaaacctcgtttgctttacctatgactcatctcattttgggaaactgagactgcaaaatccccaactctagaaatagttaacaaaatcaactaattaggtgattttggtgtctaaattttccgagataagatgagttgtcggaaagcaaattgggttttgagtgtgtagagagagacaggttagagagatattaattttacagtcattattaagggatagcatcaagtgtgccagcccacatagaaataaagtgagccttttttgatgaccaatcaaatttatatataaaaaaagaagttccattagtgtgcactattttagagtgtctaatattgtagaaatttaccaagttttataagtaatacacatagtagggctttgtacatcatttctatgaagaggtcaggttaggttcctttggccgatcaaagtctccttaggtccgaaagtcacttcttggctggccaacatataggcttct

SEQ ID NO: 308580 - DNA, 2024 bp, Cannabis indica
gagagagagagagagagattcaaaaatatgaaaggaagagaaagccttttctcaaattcagctgtctaggtttcgacatacaaagaaagtgttagtgaattaaaatcctttttgttccttttatagagtctctctaggttttgatttagaatataattggccttaagaaaatgacaataaccctaaaaggcgataacttggacgaaatccatatggcctaatttaatgagactttcttatctttttccaaaaataccatttttttattctaattatttaaatgctaattttatctatttaataattataaatacttatcaaataaaattatcatttaaatatttttttattaattagtcataaaatatcctaattaacaattaaaatctctctttatttctcttctcaaattttccttttccttagtgaaattcatacataagacatggtcttcttttagaatcttaattggtttaagaagataatttattgagtaaacagccaaagggtcatatgatcttctatagatgagtaaataagatcatattagaatgagttttatttagggcataaaaccccccaacaatcccacatgcactaatataataataaaagtgtatttcaattaatcattgatcttgatatatatcaattgtagtgtgcttgactttatctgtgcaaaaagaattggaaggttgcaatcagcatcaaccttcttcaccattacagtctcttgagtcacaagacttttcgtgcagctttagtggccacttcatcagaagtaaacttagccaacctatcaaacttggtagcatatttagtcacagtcatgctaccctgtactaactatgcaaactaatctacttgggcgacacgaatggaatcgttataatacttctcataaaatattgcctggaatgtttctcaagttatggtattcaaataatgaccctgagatgcctctcaccatatccaggcatcattatgtaacatgtaaacagcacatcgtggccagtcattatcctcgcactgcataaagtcaaagacagaggtaatcatactcatccactattccgccttcagtggatttggaccaccttcaaatataggcgggtttggtttcctaaatcactcataaattggctccataagatcccctatattcagttgcactacctgaggtgccaatataggtgcaggacgagcttgttgctctctctggcctcgaatctgcttttccttgctatcgaattgtctcttgtgttgcagtaaatacttatttctagttttgaggtggtggaggatgctcttcctcaccacctaccccgagccccaactcgtggcctacacagccagatcatcactgcatgatttaatgcacatgcgatccaaaacttctaaccatttagaattcaacatgtatcaatatcaatatgcatatgccacacatatattcctatcacaatcatctctatgttactttccctaacatactttataatagtctaggtaggtatttcaatagaaaataatctcaatacttactataatatgagttgacttgtcttcacatcatatgtacatattttactagtctttaggacctttaaaactatggttgctctgataccaagttgtaatgccctaatctataggaatgccacgtgggtgaatttataacctagtttagtacgaataaattaatttgttattaaaatctaagataatattaaaaacttcaataatttaaaatacaaaaaagaacatcataatgacactaaaattatgttatagtgatccccgttataaaagttttacaaaaagattatatacaatgacaagtcaaaatgcaaaatcaaaatacacagtagatacagcctaaaacaactcctaacaactcggctgtaaaaaccgcttagctttaatttagaaattagcagataattagggatttattatgaaaattaattcttaatattgaattaattatttatgatgattaatttgaattcagaatgcatttt

SEQ ID NO: 308581 - DNA, 1293 bp, Cannabis indica
gtacccgaaacccaaacccaggtgactcgacggccgactcactttcagtcgaaatccgatgagattcaaatagaagagaaggaattagtacaagtaaccgtacccgaaacccaaacccaggtcactcgactgccgactcactttcagtcgaaatcgttggaattggtggaaacgatgacgacgttgccatctccgccatttccgctaacgactcgaccgagttgttactcttcttcatcatcatcatcagaaaccgaaaccctaacccttcctcccctaacacctgaagaagaagatgaaatagtaagtaagcttaaaagcccacaagtattcgaagtcgaagaagctctaatcacaatgagaaggatcacgaaaaccagagaagaatcaagggctcacctctgttcttatcaattgctctcagccctaaaatcgttgataatctcgaggtacactggaattcaggtgaactcagtcgctgctctgttaaatctttctttggataaaaccaataagatgaagatcctacggtcaggaatcgttccctctttaatcgacgtcttgaaagggggttcaatcgaagcacaagaacacgccgtcggagcaatattcagtttagccctaaacgacgatatcaaaaccgccattggagtattaggaggtttacctccattgcttcacttgctccgatccgatagtgaacgaactcgtcacgactcggctctcgctctttaccacctgactcaggttcacagcaaccgaaccaaggtggtgaaactcggagctgtaccgaatctcgtccagatggcgaaatcgggtcacatgaccagtcggattctgcacttgatctgtaatttagggtcttgtacggaggggagagtagcgttgttggatgccggcgcggtgggttgtttcgttgagatgttgagaagtgggaatttgggttcggttagggacaattgcgtggcggcgctttacttgcttagctatggcggtttgagattcaaggcgctggctacggcggcgggtgcggcggatgtgttgtggaagttggagattattgggagtgagaaaacgaaacagaaggctaaggtgataatggagattattaaagggagaggtgacaatgaggaagaagaagttgattgggagaatttgcttgattctgactctgattctcattctcttactctaatcggtgacgacgccggcgccggaaacgaccataactcgtctgagttttgagtacagttatttatttatttatttattttgagtttctgtttttagttt

SEQ ID NO: 308582 - DNA, 1764 bp, Cannabis indica
agagagagagagagtgagagatagagcgaagtaagagattgagtgaaaatggagagagcgtaaatgaaagagagcgattgaggaaggagagagagcggacggagagagcgattgaggaaggagagagagtggacggagagagtgaggacgatagagagcttgaatcggtggaggggagtgtcgatagtggtggaggggagtgtcgacagtggtggaggcgatcgctgataatcgtggagggcttaaatcggtggtgaaggcctcgaatcgccaaagatgacaaagagaccagtgtgagagagagaaatgaagttaagatctagaatttgggggtttaataaggctttggcattcctggcgattagaaaccgtcaccatagtatgcccgacggtttctaaccgtcgaagttcccattacaaaagcccgctcaatttttatgtgactatattaaactatcagggatgcgatacgtctatttaaaactgttgagaatacccaattacagtcgacgatttaaacagtcatgtaactttattagcgacagtcctaaaaaaaatcaatttgaggaccgacgggaataagtcattttgtagtagtgtagggccgaatgtgacatttgaaagagtctgacaaggccaaattagaaaatttgtgggtgtacacatcagaaatttgtggattttttgaaataggtcaaaggacccaatattagatcaggcacatattggccgaaaggtcccaaatggaggttaaaggtagaggcaacaaaagtttttgtttggttctgataccatgttaaaatttaggaaagtacgtagggtttcattttaaaatcaattgacaatagagagagtaacacattcattttatatatgatgttttatttccacacattagtaatttgatactatttctaatatacctatataaaatatttcatcaactagactacagaatagcataatatttttttaccatatctctgaacataatatgaatattttattaataatttaaaactgtctgaaaaatatacttaataaaaaaaatatttagtaaaattaattgattcatatgattttaaagacatatttaaactaagaaaaaaagaatatccacacacaaatttggattaaattacaacacaaaatataagttagtaagtttttaagtttataatactttatattttcttagaaattaatagataagagagcagtgattttttaaaaaatatatcttactttatttttcttaaaatataatagaaaaatattttgtttagtaactatcataagtaactgaataatacaatatcataaacacttcatatgataatgttctcgtaaatatgtggaactttgatttattattattatcttatcccatttttatttaaaaagagagtaactagttcaatcttcataccacatctgtagaatagtctttagagcatctcaaggagattgtatttctccattttgctgctccaacgtagctttatatgtgtgctacggtgcacgacatatatatatatatatatatactatatatatatatatactgttagagtattttattacaatagaagaaaatcaagatattgcaactctattgtaatacaccaacaaagagattaaataaatgttacaacaacataatatacaatatatattacatatatatatgaaacgtagaagagaagatagagtacacaatattatataacacacatattatttgaagaaatatatatatatata

SEQ ID NO: 308583 - DNA, 1734 bp, Cannabis indica
agaagtgaaaattgtaacaaaaacataattctgtgatgcgtttgaatcaaattatagtattctgctctaatgcgcatagatattaattaatatttttattaaaaatataaaaaataacaattttattattaattttatataaaaaaaaatataaatagtttataatttaatactatacatagatatattaacaaaataataaaaatgacaaaaagttaataaaaaatttaaaatttaatacatagatatattaacagaaaatttatgctagcaacgttaagtgctcaagcaataatactataggcggacttaagagtgttgaaggagggctaaagcccaccttaagatttgataatgtattaatatataattgttggttgcacatatatatatatataaatatagtagttaaatagaataattagttaagatgttttgagtttacggagaccatgtttcgaatcctcttgctcctttttttcaaagtgtatttttttttattaaaaaaaaaccaacaaagtataagattttaaccaaattcaaacttatgaagaatagggagatgttgttaaacctatacttaaatttagtttagtcatttattgttttggatttttttcaatgtataactaagcctactttaaaattaaattggggatccgccactaaataatactaatgtaattttaccttatatattaatttataataaatcataataaaataaataataaatattaattattgaattaaaagaatatttagtatgtttagttttttttaaaaaaaatattctgactatttaattaattttatgaaatcgtttatttaatgtttttttaataaacatatgatattataaataataaagatatatattggtaaaaaatatatagaattattatagatataaaacatatttataacttgcaaaattatttgtacggttatttttttttcttaattttaattaaacatatataattatcaagacattgttgtttattatttttattaaatatttgttaaaataaatcatactaaaatagataataaacatgtatactataataaaaaaaatagtatgtttattatatatcaaactatttattatttatttaattttattttgaaacatgtttatttatatttaaaaaacaacttatatttgtaataaattatatattttctaataattatattataaaataaacataaatttataataaatcatattaaaatagatcataaacatttatattataattaaaaaaatatttagtatgtttattatataaaataatttttttatttaaatgacatattatattattattaaaaaaattccaaaacattactataataagcctactacattattatattattaatataattcttctaaataaaaaatgtagtataatgttgatttgggtttaattgagattttattctttattgagtaagaaaacatttttgaatatcactaacatgattagaatcatgtccacatatttaatatcaatgtgaatatttattgtattgtattacaattctaaaaatatttattgttaaggatagtgttatatatatttatagtaaatttactcattaattcataataatatttaatgatcaatttgtatagttttatgtaaatatgtcttcaaatgtatacattttaaaaattatttttttgacatattttttgtaattatgttatttttattgtac

SEQ ID NO: 308584 - DNA, 1337 bp, Cannabis indica
attccgctgcacccaatgtaagctttctaatactttatatgtgtttatttcataatctttttagaagttcatatttacggtgttaatcaacatacttgtgagtagatctaagactttggtaaaataatttccaataccgcaaaccacaaattcttcgaaactgggcaatccttaaaaacatgtatacttgtttccaaagcctcaccacaaagcaaacatgatttctcaggacagaaagggagtttggtccttagagggatgggctcattgaagattctccacaaacacacccctatcctaggatgtaactttggactccatagccacttccacaatagtttcttttgaccaaaacgatactcttgatccaaccgatacgcacttttaactgaatagagcccattctcattacctctccatatcacttgatcttgatggttaatgggaatccttggaatttccaagattttccttccaatttcttcaccgaaaattccaaccacaacctcattgttccatcctccactagtagaaatattggctacagagttaaccataattctgcttccatcaagacttcccataagttgaacaaagcctaaataatctagccaaaggatccaaggctgtgtccaaaagtcaatggaatttccttctacagcaagagtaaccgagcccttctgaataatgtgtcgaacatccagaatactttttcatagaaacgagtccccactctttgattcaactgcccaaaaactttccttgccacaatacttgctcaaaaggcaggacacccatgactttctcgccttctgagccaaattccacgccaactttgataaaagtgctctattcatgtcttcaaatcgccttagcccgagtccacctaccgatttaggttgacagattttatcccatgacttataggccatatatttatttttttcagcattgcctatccaccaaaatcttcttataattgcatctagctctcggcaagtcgatatcggtactttgttagtagccattttgtacaccggcattgaagcagcaacagagcttatcaaggttaatctccttgagtaagaaagcagcaacataacgaaattaaacaacgtgtttacaactttaaaataactgtaaaacaacaaataatgttatttctaaatataagcaatttttcttcatatttacaatctatttctattaatgcccccacttgattaaaaatcaacataatgtgtgttctcttattatttttcatatctcaatgtaaaagataagataaatttttgttttaacatgtaaaaaatgtattcttttaattattgaacaac

SEQ ID NO: 308585 - DNA, 1191 bp, Cannabis indica
aatgcttatttttataaaaaaaaaaagtttatttacgtatttattttttaaaaaaaaattaaccataaaataatctttttaaacaaaaataatatttttacaaatttataccttaaaactataaaaataaaattttctgtggagtaattggtgcgtacaagtgcatgctcacattaccatatatcgcctaagaaaatgaagtttacaaaagtggctgtatatgtgtgcaaactgtatgtgagtacatatgggggaccttgccagcccaactgaaaatgacataaactatgtctttgtccccttattctaatcattatatgttgtaactcgtgactaagtctaagatatttatttagatttcatatatacataaacacatttttcttttttaacaggggttgaggttttggtacaacgtatttgttgtgatgttatacatacatacaatatacaacacacacctattttttctttttgatatgtagacagttataatctccttttaatgacactttgtagttgttattatttagaatattttactgatttcaagaagatttagataattttgtgtcaaaataaaatttaaatcatggtataatactatacattaattaattctatagcttccttttttgacaattcaaaatccttaattgtgaagattgatttcatacatttttagggtagctagctagctacttacctttcaagaaattgaccaaatgctcactaattaacaaataatgaatacaaaggttaaagtaacaatttttcaaacttagataacatgtataatttatttttgaataaaataatatttttacactcttgcctctttaatagtattcgacttgttaataatactctttgaaaaataaattttacaataacatagtccttctatcacattctattcaattttaacataaacaaaatacaataaataatagttgataaatagatgcaaagtaaataccttttacttatttttaccttaataaaataaaataaaataaaatattctacttcaacgactgtttcacttttaacagataagtatttcaagtcttttaagtccttatatttagtatgaattgttttaccatcgttctttcacattatctttttcattatattaggtgataatagagttttattttttgttattttgtaggttggtttgtggag

SEQ ID NO: 308586 - DNA, 835 bp, Cannabis indica
tttttttttttttttggtaaggattcaagttgcaaactcttaggccaactccaacgctgtaaattagtgtagtgccaagcaggtgttgtcagatgaagagccaccttttaaaggtgctttagcattggagggaaaattgaaggcagctaaggtagctgctgccaagcatcggagtttctatttttttttttaaagaaaaaattaatactttagtgtatacaaattgataactattggtaaaaattagagtgtgggaccatagtagctatttttagtgttgctttagcattggagtatttttaggtgatatggagttctttagccacttttagagtggcttgcattgttgatgctcttagattctcttttgctacacaaattgctcaaattaattcattgaaggaattaggtaatgcctaggatttataagttgtaacgtgtgtttttcttttgatttgtaagttgccaaatgtcaacttcatcgtcttttatagatgataaataatttagaattctacaaaaatcagtattatatattattacaggcataagcttcattgaaactaaatgtacaattttcaaaaaattcaaattgcatgcaaaaagttttttaatagatttcaatcataaacataacgttaatccaattaccaaaactctattatggggttaaggcttgatagtaattgcatgcaaaaagttgatttgtgcacttcgtagaaatgaagtttttgttagagccatgtagagctcttcaaatttttctcttgatacatggaaccttccattgtgtctcagggggtagtggagtttttacaaaggtataagaacatgt

SEQ ID NO: 308587 - DNA, 2331 bp, Cannabis indica
aaaagacaatatataaaaaatataaaaataaataaaagaagaagaaaagaagagaaaggtgcaatcccaccacttcaataaagtttttaaataattcagaaaaacaacaaataatttcacacctcaataccttagttagtggaatctctatctctctctatataaatatatatatatatatatatatacaaaagatttacattattatgaaatgtcataagtagtgaaattattagaattaaaataaattttataatatattttttaatttaataattataatagaaaattgttaattaattataaataatactaatcatataatattagtatatatatatgatgatgcttgatttgtaattacaaaattaattataattattccatgcacaatatatattaaagatgtgtttggatttattctaaggttataaattaataatggtaatttaacaattattgattctgttcctttaattaggctatcgtcactatatacccataaaaaagatgaaagagatatttaaaaagctatgaaaaagaaattagaaaagttatgaacaatatatatacataaatatatatttatataaagccttatcttgaagtccataccaataatattagtgtgagcaaattattagaagatgcgttactcaactaaaaatatataaagagatttattaattgatttgaaaaagaaaaataataaaattagtactaattgttctacactttgtcatattcatatgcatgttaattagtacaaaaacttttattttgaaattgatggatatttataaatgtgagctgataaaatgtaggataaatactattttagattttgtgttttgtaaaaattattgattgaactatttgttttgttaaataataaattggatcctgtattttttaaaattatactaaatagtattttgaattttgtcaaaataaaaattaataataacccgatttagaggtgttatgacaaaaatatatgggaaatgctaaaaggtaccagtggtgcatagcaccctcccatgtgtcaatattggtcaaactaagtatcgggtctcatatagtttaatataataatttttaaggagtatcactagccaattgcaagacgacatgtttagaggtgttagacaccactggtaccctatagcaatactcaaaatatatatattctgcatctgtttgtactaggagttgtttttaagttgattatattaaaaaattatcgaaaattaaactaaagttgttatttgtctattttaaaaaaatacaagatcatttaaaaaatagaaggtctaattaatataacttttacaaaatataaaatcctaaatatataatattaacctttaaatgtatgtatatatgttaatttgtttctttttagtataacaattattcaaggttttttttttttaattaacctatcataacactttctttttttataatggttgaataaaagtaaagaaaaacaaattggcataataaaaggaactttatttgaaagctaataataataacattgcttataataatgccttgaatttccaatctcttacgcaacactacctaattaattagtacttataatctttatttctttttcagataaatatatcaaacaaattaattaaaaaaaaaaagttaaatttgattagataagcaaatgaaaaatgaaaacaccaactctaaatatatatatatatatatatatattttttttgtaacaccctactaatttagacgtgtcatcgtaatttcatacaaactgtgcaatccgttgttatagtcaatgagttcgttaaaaaaaacgtgtttaattaaaacttaacataattaaactttaaattaaaataaataaactttacataaaccgagatcccaatatttaaaaagttacaaccataataccaaatattagttacaaaagttatcacctagcggccaatcaaaatactgcatgctatcccaaagatcgtatgctccaagtcgatctaactgtcccggtatgtacagttttcatctgctcgatctcactgccgctcagccttagctttgccattacttacacatgtaaacaataactgtgagttgacagactctgtaagaaaagtataatcataacataatcttaaaccgaatcataactaagcgaccttacacccaatcataaccctatcccgtgtctcatgcgtactgagtctagaacgtttgtacgacaatactattgaccataatatcagcctatactttgtactctagtcgtaccgatgtgataacgtcaatgagtacttatgccaaacatacatg

SEQ ID NO: 308588 - DNA, 1126 bp, Cannabis indica
tttaaataataatattagttgtactaatataaacgtgtcatgtgtacaatagtgtacacatataaacatctcacagtgacagataactgaatgataccttaataattaaatttgttattagttcagtattttggagagttttactttcaaaatttaaattttggattaaatacaagtgaaacgacagctaaaaaggtttagccgcaaaaaatactataaacaaaaatgacctcaaatccatatatacacataattgccacgtttttatatgtgttatttttatattgcatatctttttttatgttgtttttataacaagggtaagacaaattcaaaggacgactttcacaagaaggtgaagggttgtgataaaacaaatattgttcaattaataataaaataatttacaatataatttatttaatatacaatataaataatataattaattaagttctagaatattttcaggagtttgcttctacttgaaggcaacaatttcgtatctggaaacctttcttttctctctctaaaaaaaccctttctttttttcggaaataataataataataataataataataataataatacaaaattataatataaactatatgacattaaaatgtaaaacttataaagtgtaagaaatgaatattttaaaaataaattaaaatatctgttaaaaacaacattttaataagcctatgtagctttttttttttttaaaaaaaataataataatattattattattttaaatggatacacagagtacgtaattcaaatcaaatgataaaaatcatttcatgatcatattgtaagtgtatattaattaaataacatatcattaattgttttgtaataagaaatttaagcatatggtcattcctatcctatttcattgaaactagctaatattgaacttcaataacttaagttcttatttttatttaattgctttttctagctactatacaattcattgtataagttataacactatatataactaagtggtacgtcacacaacttagtcggtattattaattatgaattttttaaatggttcaacacatatatatatatatatatatatataaactagtgtattgttacgtgcgat

SEQ ID NO: 308589 - DNA, 1425 bp, Cannabis indica
accccgaccccaaccccaacccctaaccgtggccccgactcaaaactccaaccttgatgtcggaccccaaccttgacccctggccctaaccccgaacccagtcctcggaccctaaccccgaccttaaccctagacctgaccccagacttgggtcgtggaaccctaaccccgaccctagcactagactccctgaccctgacctcgaccctagatcaagaccccggacccgaccccgaccctagcactagaccccctgaccttgacatcgaccctagatcaagaccccgaacccaaccctgatcctcaaaccccataatcttgaccccggaccctaacctcagcacccacatcggacccgacctcgatcctccggactctccaccttggacctagaccccaggcccccaatccctagaccgcaacttcgactttactacaatacaacctaagtttataaatattacgatagatgcttatatcccccatgtcttatgtctttatcataatacccaatgagttgtatcacaaatattagttgtataactaaaacaatacaacttatgctttaaacgtaatattttactaatgaaaggcttatacgaagtaccaaacaacaaaccctaacttatatatttgtactacaccaaggatttgatttcaaaatatatatttattggtgtacaattgactttatttcatgatattaaatagtagtatttgtcaaaatttgtttgttaccaataaattatatatgtaccacatgcagtaccagcacccccaccccattactatagctaattctctttaaatttattgccaaatgaataatgccaatatctctactgtttccttttgagagagagttaatgaacgttacactaaaataaataaagttaaaagaaaacaacagctgttagctaatggtcaaacttattgtgatgaatgtcaatgaagacatttatatatataaattattattgtcgttttctaattgtttagaaccttactggtttcatgcaaactatcctatatttctattcccaattgagactaattgacagagagaaagagagagaactacctgtgacaaataagaaaagagaagaattatatatatatatatatatataaaaataatatgatgaggatatatcgtttgaagggaatgaagcctggtccgatatcacttgtatattttcttttttatatttatatatatatgatcaaaacattcatcatcatgatcatcttcatatacatataataaatatatattaaatgaaaattgtaggtgatatcgagccaaacaacatacccatcaaagccttaacctctcttgatctttacatatatgtttgatcttataataaaactctatacttgatttcatctccttaatttgtagagatcacaattcacaatata

SEQ ID NO: 308590 - DNA, 3156 bp, Cannabis indica
aaagagttttatttagggcataaaacccaacagttaatgaaacatacttggtagtaaatctagatcctggtaaaatatttctaacagtttgttccccagatgtgctgacggatttgaaccaattgggttgttgttcttcccacttgatgaccctatggtgagtctttctagcttgctatcaaagctcaatagagtttcttggagttcctgccatgtaacattagttttggcttcaagtggacaaacaatggttagatattcaacatctaacccactcaaaacatttgacactaagtgtgcctcacgatatgggtctccagtaaagcaagcatgtcagcccatggtcttttctgtctcaagtagtcagtcattgttgtgcttcctttgcgtactgtctgcagcttagttctggtatcatccatctttgacttagaatgagcttcatagaggtttctaaggcaatccacagggccctagcagagttacatcccatgatctcagtggcgatgttttcagtcatggaaccatataaccaacccatcaaaagttggtcacatatgatccattgctcgtactcgggattgagttgcactccaaaaccgggtgtgtcgtctgtagaagggatgcctgctgcaacaaactctggtggacaaggtctaatcccattgatgaagccatccaacctgtgtcccctcataatagtcgacaccatagttctctaaagagagtagttatgtctatcaagttttaaagcaaaaggctgagataaagtattaccaaaaggtgcacagctgaatcctcaaaaagcattcgaagcaccaccttgattggacccatttttgatttgtggggagctggtttgaccgtgtgtttgagtaccctgatataggccttttgtaccaaaatttccgtgattccctctgactggagtctgctctttgccagtagacatggggcaggcctagtcgactctgataccaagtaaagaaacaaagggaaaggtgtgtgctaccgtatattgcaggcagacagctcaaataggcctactgttctattgctttatttataacagaggttagtacagagaaatattaaagcagagggaaatactcttgggaccacaacaggtgtcagccaattacaagaaatatatccgttacactaacaaaatagattaggacaaaatagtaaaatgaaaataagaacctcctggaaccatttggtcattagcacctgattagatcagctaatagaaccattactctgttattagtttcttaacacacgccatatgagtatggtattgggtaccataaagtatctaatagtaatgctcttattgctaacataaatgaggtttgataattaacacttaatattaaatatataatatacatatatatatttatctcactatgaactataataagaagatagaaatttttacgtagttttttagttaaaatctacgtactccacgagtcattattacttctaagttcctttgttgagattacaatttggcaaaattctctctgttagaaatttggtcgtccgtttttacaaagtttttaatgctgtttataggagtagaatattagttacctttgatctaatcaatgtaaatattttgaaacatatatactccccacctttcaaatatttaattaagaagcaggaaataaacatattcactttcatttaaaataaaatataattcctatctttgacttattcttaaagtatcatagtgcgttgtagtcgaactaattcatataactactgtgtttgcttataaatagagtatcaatagatcttttactgtttcagactagtttgactgaggttactctatctattttattgcaaaaaatttgttggcatttgtatattaatatttaacctttcatccatattaatcatagttcttgttgactcataaatctagactaaacttttaagccacacccgctcgctagattggcaagaatgaaaaagtagctaagtatttataagagagacacagtaaatttatagtactttacccactatatcgcgatagtaatgaggctatgtctactttgagtttttatttctcacgagatggtaattacagtaatagaccaagtgtcaaaagctccaaattctagagagagaagttctaaccttgtgggtagtattctgaatgtgaaaaatgagctaagggatctctccttttataggtgtatttgacctcagattcggtcaactaacagcggagccttatttatgactaataatcaccacgtgtaaattgtaaaagctaataataaagtcgacagtaatttatagaggttcgacctgttgagaattattttaccaatatctagatttactaacatatatgttgtttaacaccctaaatatgaattctctaaaataatagaactaaatacatataaagttaagaaaccttacattggtggcaacaaaattatatgtctccttccgctcagatctctaaccctttttcctttctgacgcagagtattatcaagatctgagcccaattctcctttgagtgttggattcttcaaagtcttactgtaacgccctaaataattaggcacactacccaaaatacttatgaaaccctaatcccctaaatgggactactaaacaaaatagcgcagaatttaaacttttataataaatagaataaaaataaaacttgtaataatttaaactttactacagttgggatcccaaaaatatttactaactttattacaagtctttttctttcagccggcctaagcggcaaaatggaatttcaaaatacatcactggtagacccttaacctgcttggtttgatgtggctcgaacatgtacatactttggccagctcctgaactcatggttaatcagctaaagccttacccttttttgcacagtagagcacccgtcagccaagcctagcaagacagtataaatcataacaagaataatatgctcatcatgctatttacacagtaatgcccttcatatatgtctatgtgtcacagaccttcatgttacactcacatgtctatttatgtctacatggcgtagacctatgtgttgcgctcacacatttatttatatctacgtggcgtagacctacgtgttgctctcac

SEQ ID NO: 308591 - DNA, 1746 bp, Cannabis indica
aaaaaaaaaaactagtttttaaagtgtaaaaatgaaaaatctcttttttaatataccacctaattaaaaataatatatataaaaaaaaatattatattttttagtatttttttccttttaaaaacaccctcacatttaaaaaaaaaaactctctctaattctctcactctactatctcactctccgacattgaaccttcacctagattccctatcgtcgaaaccagacccagaaccacagtcataagctcctgccactgccttctctcacggtctctctctaagtttcaccatctccacttcgaagccccaaaatatccactggctcaatcactccgcaacccccgaaatctccacccatcgtcggaattctcaacccatcgctcattttctgcattttatttcttctagttttctagttttttgcgatgttgctaaatcacattgctcaacacatcgttaattgtcgctaaatcacactcaaattttcataatgattagcgatgtttagcaatatgtattttgcattttttagtatcatattgcaaatatattgctaaacatcgctaaatacataaaacatctctaaaatgtcactaaactttatctttaacctcagattgagtctatcattgcaaatacatcgctaaatatcgtgaaaaaaactaaaaaaaaacgtagaaaattcaaaattcaatttctaggtaaaaaatgaacgaaacacaaaaaccaatgtgtagatctgttaaaaacaaactatatacatatattttaggaatcacccaaatagagagcaagagaatgaaaggtgtgtggtggtgagcaaagcacggtgttgtgtgtggtgcactgtggtgagtttagctagtctttcatgagagggataatagagagaatgaaaggaagatgagaaagaatggagaaattgaaatgaaagtggtatttttgactttatgtgaaataatagcatatctttattatgtgtttaatgagtggattaatttaggtcatgctttactttagtgtaatttttactaatataccaaattaacaaattaatattatagttaccgaataaaacaaaaataccttatatatgtatatctctaccgaaatttaggaaaaaaattcctaccaaaccaaaaaaatgggatcaacccgtgcgtatcgtatactgccaaaccgtatataaccatttgagaacaaaaaaaataataaaaaaaaaaccttcgaatattcaaacctccacaacctgtaccattgaagctctgcaaaaatgtcgatcgaatctacaaaaacaaaacaccattaaagcttgacaaaagcttcgatcaacaaaaatcaaaacaaactgtacagttgctaatcgaaggtgccgagataactcatcattgaaggtgactaaattttctactgagaaatatgtgcttaatcaaatcaaaaacacctaatcatagataaatccacaagcaaatattcaccataacatcattaaaaagcaaccaacaagtaaactttatgcaaaaataattaacttaaaaataaaaagtaatacaacaatactacatagatcaagcacatacctattaaaaatatacttaatgaaaaagaaaatcaacagaaactaaatagtataccaacaaaaattaaagcaaaaaaactactaaatcataaattaatcacaaacacattaaaaacaaaaaaacacactaaaaattctaaataccaaattgttgggttttatgcc

SEQ ID NO: 308592 - DNA, 1764 bp, Cannabis indica
aatttaagctcaaacagttaaaattgaatccaactaattttagagacaacaaacactagactcttgaattctgcttctgttaaagatttggagattgtttgttgtttcttgaactgccactctatcatattatcaccccaaaaaaatgcagtaacctgtagttgagtgcctgtcatctagatcaccaatctagtttgcatcacaataggcttcaagattgaagtgagttactagtttgagaagtagaccatagtttaaagtttcagtaagatacctcaatattctcttcattggaacaagatgagcttactaaggattgtgcatgaattaaaaaaccttattgacgctgaaaacagtattaggacgagtaattgtaacatataacagagctctaacaatggacctatattcagagacattaagaataggttcacttcaacaattggaaagtctaaggccactgttcattggtgagcattgagttttaactgcttgcatctctatcttgcaaaggagatcgtgaatgtgtttcttttgagaaagtatcacaccatttgaggtaggaagaacctaaatacccaagaagaagttaacagtgcctaagtctttgagtgaaattttttctctcaaggaaaatatgagagaggagacttgggtgctaatgtttcctgttattaagatgtcatctacataaactagtatgtagatgtaggacataggagtgatttggataaataatgaagaatctattttaccttaggtgaagccaaagctgagaagagttgaggagagcttctcaaaccaagctctaggagcttgttatagaccacacaaagccttgttatgtttgaaaacttttttaggggcagagacatcaataaagctaggaggttgtgtcatgtaaatttcttcatgtagattccaatttaggaaagcattgttgacatcaagtaacctaacaagccatccagatgtaacagcaagagagagtacaactcgaattgtaatatgcttgaccatacggggggaatgttttattgaaatcaaatcaaacttgttgatggaagcctatttccacaaatcatgctttgtattgactgccattgcaatctacattttccttcactatataaacccatttgcatccaattgaggttctattaggtggaggtccatgttttagtcctcttcaaggttgtgttgtctatgtccatagtgttgacccaaactcttatgtctccttgttttcataattaacaaatattttattattatttgtcactaatgatttgttaattgtgtagtacaaattaaagataataagcatttttaaggcaaaattaactccaaggatgaaataataattttttaaaaaaactcgaaagtgacccaaagtggactcaaaggctcaagtaactcaagaaaagactccatgaagatttattcacgagtcttagtcttgtacagtgatttacaagtccatacttaaaaaattctaagtataaaatttgacacactaacttgtgcgacaagttatttcacaaaaatgatatctaaattttttaattagtttttaaggtcacataccatttaagagaacaaaaatgaaatatctaaaaattggataaacgagtggaaagttatgcctattttaaagccaaaaaaaattgcattttaaactgtttactttacaagcttaattatttgctttaaatattttcttgccatactatttgtattaacttgattattttgattaattgc

SEQ ID NO: 308593 - DNA, 1136 bp, Cannabis indica
ttgctagaaaattacctaatatgattccatgttcttttaaatcataaaattgaaattagtcaagaatgtaatatcaccaagcacacaaatttttcaaaaaataaataaacttttcaaattatgcttgccccttctcttttcttttctatctcatgtgaaatcttggctgggatggaatgttgaagctacagcacttaacaggctgttaagatggctataaagagctaaaattagcaagttttgtaaagttgttcttactgctgtagtagctgcattagtgtatcactatggaaaaatcgaaatgaaattttgtggaattcaggacagcaaacacaggaccaagtaactcatgaccaagtgtaataaagtgtattttgctaataccctggaaaggacattccacttatataactttaagtaaatcacactgttgattatcatgtcagcgtgaatctagtgcactaatttatcgtgggactaaacaatcatgattatttttcacagtgtagacaacactataatcatgaataataatatgttcgaggtctaaatcttccatgtcgatgctttgtttatcagaatcatttgggaggtttttccttcctctaatggtagagccccaatttctgagtatggggcctatcatcctgcaaaaccctcatttgtaaatcagttgggcagcctattcctagggcttagtcaaccctttctctctagaagagtggatcgacacgatcttgttgtccctgtgagcatcatgcgcgagtctagatggaggtttcttctttagggcttcgccattttgttttcctcttatcatttactggattggagggtccaacccatggatgattgaacttttccactggtgggttctcagcacagaggtttccctttactgccaagctctgtagctataagagggtttcttgcatctagcgtgtggtttcttctttttctagcagcatcctttgttggtctaagactatctgtctcaattgtatcagctctgagtcttcctcgcaacactcctcttggtagattttgtcataatctttattgtaagcatctcgttagtcctcgtcgtggccttcttggtcatccttgtttatgggggtttctgttgggttttatgc

SEQ ID NO: 308594 - DNA, 1573 bp, Cannabis indica
gttaattttgtactaatttactattcaattttactgtttcagtgattgtttatagtattaaaccatgcttcttagattttagatattgtcaaatcatgttacttctaaacttaaatatgtactaaatctatgattacttgaatttcatcattagtagtaaaagttttttttttactaaaattagataaaagtcgttaaatctaataatctaatagttcagggagaattttaatggacaaaaaaagtttaaaaaaatcctaattagctttttttaaattgcatcttaaaatggctaaaagttgtcatgatgtattttaaatttctttttggatcaatgtaaagcttctcatgtgaagtactatttgtttttttttttttgtataaattatattcaaaatgaattaatatatattgtgaaatataatattttaatgtggacaaaaaaaaaatagagaatttgatgcgagtaatcctatatgttttatcttcctctacttttatgctcgttaaaaattattatttatgctttacatttaagatttatttaatatgtttgtattgtattgtgtgatattatattggattgcattgtattgtattaatattatttaatataatattatatttggtattgacttgtattactagtttatgtaaaattattttatctttattaaacttgattctaattctgactcgggtctagttttgggtcggggtttagggttggatcttggtctgggtgggggacggggccaggtttggcgttctggcttcgagttcaagggtaggttgaggtttgggtttatgtcggggtcgggtctagggttctggtttgggttcaactcattcttggtacatatgttgtttttgtttaattttttaaaatacttagcaaaaagttacaatttttttcttttaattgatataagtgcataaaaatatttgttttatcatactcgagatatggctaaagatttaaaattataactacgctattatttacttgtctctcatgctttcatggttttggatatgatttttagtagattgaatgtttaaattattttgactatataaattttcattttttttttatgcattttgaagtttctctttacctattgtgcttaattggtataagtgataccttgtatattaaggaggagaagtatatttgtttgactttgcttcctatgccactctttttgataaaatcaaaagggaagaaatatttgagttgattattttaacattaatcatatcatgttttcaagtattaacatgattcttttgacattaagggggagctaaactcaactagtttaaatttttttttttttaaataatcaaatattttgatatcatcaaatcacttatttattttgatgaaaaataaatattttattataatttgttacgaatcatttcttaatcattttgtaagcaatttataaagtattaatatttgctcgataaagtcaaacataatcaaataaatggattcaacaagtatttcaactatttcatacttcataagagcaaaagtttcatcaagagatcaagaactcaa

SEQ ID NO: 308595 - DNA, 1818 bp, Cannabis indica
tctcgtttcaacacttcctctaccttaaagccttccctcatcatcacccccgccaccgagtccgacgtctctgccgccgtgttatgcaccaaagccactagcctccgcctcaaaactcgaagcggaggacatgactacgccggcgtatcgtacacctctaccgtcccatttgtcatccttgacatgttccagctccgatcagtcaccgtggatgttgctgatcaatcggcttgggttcaggccggcgctacgctcggtgagctttactacaacatttggaacaaaagcaaggtacttggcttcccggccggaatatgcccgactgttggcgcaggtggacacatcagtggtggaggttatggtaatatgattagaaaatatggcttggctagtgactatgtcattgatgctaaaatagtggacgccaaaggtaacattcttgacagaaaacaaatgggggaagatcttttctgggccatccgaggtggtggcggagccagttttggtgtcattttgtcttacaagatcaagctcgttcaggtaatgttttgaatttaaaatgaagcatattgctagcttgtattaaattcaaattaatttctttacaggttccggaaaccgtgactgttttcaacgctgaaaggaccttagaaaacaagaatgatagcatgactgatttcgttgtccaatggcaaaaggttgccccaaccacagatgaaggccttttcatgagaatgctcgtacaaccatctacttctactgtcaccaaaggagagaagacaatgaaagtaaccatcgttgcccaatatctcggcaatgctgacacactcatttctgttatgggaaaagagtttccactgttgggattgaagaaggaggattgtaaggaattgagttggatcaattccgttctttggtggcttaaattgaaaaacgacactgctagccccgaagttttgctggatcggaatgttaactcggcgattttcggcataagaaagtcggattacgttcagaaagaaatatctgcaactgtgttggaatcgatttggaaaaagatgactccaggtaaagtaggactggttttcaatccctatggagggaaaatgaacaaggttccttcgacggagactccttttcctcatcgagctgggaatctttttaaggttcaatactcagtaggttggaaagaagacgaggctcaagccgagagcaaatatttggaagagataaggagtctttatagtttcatgactccatatgtgtcccaaaatccaaggtctgctttcttgaattatagggacttggacattggtatcaataactttggtaagaatagctatgaggaaggaaaggtttatggagtgaaatactttggcaacaattttgataggctggtgaaggtgaagagtgcagttgatccagagaacttctttaagagtgaacagagtatccctgttctaatttctcctgcaaaagcttatagaaaaactttacaatagagcattatactagttggggaacatgatgaataccataacttttgcccaatatttagcatatcttatattcatgggtgattatttacatatgtaacttttatgtttggctataagagcatttccatgcaaacattaagggtgtgtttggaaagccacgatgtaattacacaatttggcatgtttgtatgtaattacactgtaactgtgtaattggaagtaattgaggggttccaattacactctccaattctcatggcctcccataagaattgaatgtaattacactgtgtaattactaaaaactttccatattaaa

SEQ ID NO: 308596 - DNA, 2042 bp, Cannabis indica
taaattaattttttttttatgtgaaaataaataaagaatgtatcaaaacacctctttacgatcctgtaatgtagacctaccctatttttattatatgagtacaagtgattattttgaagaatggtgtactagttgagacaaaagtgagagcatcatattttaagtgacaacacctcttttaaccttacacatgaagacatttatttagtatcgatttaattgaatcggctacatttgatttttgtattttatgatattttattgtatattcacgtgcattttgtttccttctatcatgttgcagttttaactgcccattcttctcatattttattatatttatacctccgtttttttggtaactattattttaaatattgtgtttttcaaaaatcactaattggattatttatttggtaaataataaattgaactatgtattttcaaaatcatacaaaataataccttaagtttaatttttgttattttctgaatatataaccaacctaaaattattttctagtacaaatatatataaaaattgtatttttcaaaattatacaaaataataccttcaatttaatttttataaaacacagaatctataatgtcatttaccactcatttcccaccttccattaagtactacatattcatatcacttttgtaaggtttccatgatattttattaatgcggttggaaacaacttttgtaagtaaaatttagtgtaattaatttagaatgattattatgtttgaagtatttattcaatcaggtaattaaatagttattatatatgtagttagaggcagctgaaatttgaaaagtctaagttacactcttcatgtaatattctgaaaataagatatggattagcaattctaaataatgtgggattatattatcatataatccaatatgtgacgttatatgtaaatatttgagtttaagatctcatttatatattatgtctgtgacaagtatcacaaatatgaagcaacaggaacgagaaagcttgcaaagatacatccagtgctttaacactaaagttgctaaagtaaggaggatgtttgacgataaacttaaattcgccatagttgttggagtatgtcctgaaagtagactatgagggaacatgctgaaagagaattggatgtcatagaagacttctatgagagagcgaaaaattcattcatgtcgaagagggaaatcgaatctcgaaaatagatacaagtgagtattcttcgagaagctcgtcagagatccctacatcgtctattagacaataccccaacactcacaagccaatgaatccaagtgaaacatctgctctaaaatccataaaaattaaatatctaaggtgttcctcaaagtgatgtcctattgtacgtacgggaaagtgtccctagtgatggaaagttcatttttagtacgttgtactgaactaaagagggcacaaagataggcttccaaatgtagcaaatgtattcgggcaactacatgttcgaattatcaacaaaatgtttagtttttactttacatatgacattcatcattctccacacacttgttcgactcgctcactatacttgtcaattgaaaatgtcaaagtgattgatgcaaaaaaaaaaaaaaaaaaaaaaggaaaaagaaagggaaaatagtatgattatgagagagacgcctctctaaaaagaatacctattttctcgcattcaaaacgcactttaagtgccacgaatgcattgtaagaggtcgagcaccacctaagggctaaaactccctcaagaaaatctgataacttgagaaaggctgagcgcgacccaagaggctaaaaagctcccttaacatccaataagtagccgataagaggtcgagactgctcaaagagtcgatactccctttataataaggttacatcaaaaaagaggtggagagagcccaaacgaaaaaaaactaccctcaaaccaaagagtaacactaagagtcactcagccaaagagtaaccctaagagtcactcagtcaagatcagtttttaaa

SEQ ID NO: 308597 - DNA, 2489 bp, Cannabis indica
tctcatagtcgcgaccaattttcatggtcgcgactatggtcgcaacttggaattttggcaaaatggtgggtttcaatcattgaactatggtcgtgaccagcatattatgtagtcgcaaccactgtttgcatctaaaccctaaattacacatttcacttataaaaaccaaattttacccctcataacctaaacctaaccctcatttcaaatttcattctccctctcagtttccctctcactaaatcaccttcaaatttcaaattcttcatcttaattcttcattccacccataaactctcatctccaactaaatccctctcatcaatctcttatttaccacaaaaattacaccccaatttcctcatcctcaccgaaatctgaattcgctatttatcatcttcaagcttgggaagatcttcaacaatggtgcttcattaagagatttctcactttgtaagtgctaattttagaatttttctatttgggttggtgaaattaacactattgtcaaatatttgaagagtggattttaggtattaaaaatttgtgattgggattttgtgcataattgggattttgtggattttgtgtgtgatttattttgcaatttttaatctgcacttgttgtattgttgatggtgctttgttttgggaattagtgttattgggaagtgaagaatttagggaagtgttgtcaaaatttacctagaatttgtgttgggattatttgttgtggttgtttatgaatatgggaccaaaaggaactagggtgagtgaagagtttggttcatcatccaacccatctcgattcgctcaaaagtcgcctttcgacaagacttgatttgtaagtgaagcggtgcaagagaggttcctcaacttgaaggataagccttatattgaagaccggggaattgactacaccaataccccgctgaactgccaaccaaggtttgaaattattcggcgtcaaattgatagcttgaattggaccacctttgtggatgccaaagaacgagccaatgtcattatggcttgtgaattcttggctaattggcctgaaaggaagaatggcatggtcaaggttcgcaataaggaaatcctatacacgtctgatgctatcaacatgccttaccaattaccagatcatactaaagatgaacaatgattgagagtgattgagggggatgaagaacttgactatgtagacattgttcaaacagttgggtcccagagttaaggtttcatgaattggatgggtcaccgaacttgctttataggtgtgagatcaatcttgtggccaaggtatggctatactttgtgagtgcccaattggtgcctagcaagcacttctctgatgtgtagattgatcgctaaaaatatgtgtataccatcatgaaagggtacaagataaatgtgggccaagttgttcgtagaagttttgacttaatggttcaaggtgtcacaggaggtagagttggcttagctggaataatcacttacctttgtggaacttatgggataaaacaactatcttatgacaataaggtgatgtcacaaaggaagatggatgtgagcatggttaataggctcaaggagcctcatccttatgggaaacccccacttgatgcccatccacaaggtagaaggtgccttgttggccaagaagaagaagacgaggacatgccacaacgattgaccggtcccattgatccaataatgtaatacacgcatgcccagctcaactatattatccaacagaataatcatatatagaattacatggttcaaataagtatttatgatgacgatcaagtcactcaactcaactctcctatcactcgcatggacattgggatcgaggatcccaactatttagcaccacctcaatttcacccatatgatcagccgccgccaccgaaccccttctgatgggggtctcagataagtctctttccctttagctattataccacattggggacaattcagtttggggtgggcttaaattttttattttttttttttgtggtagtttatcttgttttagtttagtctatttatttggatgttagtggattaaacaagctgaagataattttgtgctgctgttaattgtgaaatggcttgaaattttaaactgtgtgcttgattctattaactctttggattaattcagatgcttgtaaagactttgtagtgatgaaaattggcaatgtgtacaatatgttataattgttttactttggtttgtggtaagattgactgaattgcttagaacttgcatgtcttattctcttgaagccaaatctttgacagtatttactaggaatgtgatttaggaaatttttggatagtttgagcctttcaagcctaccattaaatgaatatatgtagtgaacccttttgagcctaaacctgttttatttcttcacctgttgaacaaaaaatatatccacaccgtgttctatcctcattgtattttgaatgat

SEQ ID NO: 308598 - DNA, 1737 bp, Cannabis indica
aaaacacaactaaatgagattatttttgggaggtaaacagaaaaataaatgggtttgaataatagtacattatcaatcaagcttatgattaattatttatattttttgatgttttgtgagaaattagtcttggagattttgtgtatcttaaatccacagttggtataatgcctgtttgagtgccatcgctatcgttatcgatctccccttctatgctcatgaatccttctattcttgctgatatcaactcccctttattataccttccatctacacatatacatgtataaattataaaacacaaaatgtacttaaaatcaaaatctctaaaactttcaaattatacaaaagatattgaataaaactcctcacatttataccatttattaattaattaagaaactaattttttctttaccatactccatactagtatacaaattattaagacgtttatctttgaaacaaaaaaataaattatttgatttttctgaaaatttgtatgagatttactataattatactattaattaaaacataatcatgtcctagtagagtatacaataataattttgtattcatttagaaatatattttatttttacaaagaaataaaaagtttcaatatatttattttttactaggattgtagttttccatttattaacctatttatataatttatatatgtacctggaggtgtggtagagaagaaccaaagaataaaagcacaaaaaagaagaacaagaggaataagatggacagcattttcagccaacttgagacgagccctctctttcttggccatgtcacccatttgcatatcatacaaaggaagttgctcatcctcctcctcaaacgacgacgtcgttctcattgaaggcggcgactgaactgtgttatactcatccgaaactcggttccaacttgcagatctatacatgttcttatatatatttattaataattagttactcttctctctttatatgtttaattatatgtgtaatacttatgaaataaataacaatgttagaaacgatattataaaatagagataggagttgatgatgattatgaaaaggtaggagtaggattactattagtgtaatttgttcaagagagaaaataaagtagtgatattagggtggagagtaaaaagtggctggaaattgggagattttattgataatattgactgtctttttctgttttggtttattgatatgtacgtgtttagattagttcactatattaggtctctataaattcacacttttaattatcctttacattataataccatttttttattaccatatacttttatcaattaatatttattgacattaacgtgtacataaggtattagagttagtcccacattgttaatgtatggaaataactttgatatatatgataaatgagctactcctcccactttcctaattaatttttgggtatggaacccattcatcttatcccaaaacttctaacataaggaaaaaacttgattacctacttatgatcaaacctggccaaaacatcattacatttaaagtcctcataaaacacatctaatataaacttgatttaaaaagactagacccattgtataaattccaaacaaacatatatgctacataaaacaagtactaagaagatacaataatgtataaattacattcgttaaaaccatgtcaaattagttatttgtgtaatcacatctaaacttca

SEQ ID NO: 308599 - DNA, 2413 bp, Cannabis indica
gttaaaccaagaaactgctaaaaatcatttaaaactgctaaaaactgccaaaaaatgctaaaaattgtacgtcgggtttatacaattataatttctaaacggtcagttatgaatttcgtaaaataagattttcgtaaaataaaaaatgtaaccgatcaattagttataaaattataaaaaccgctaataacagacccattttcaccctattggtgtgatgttaaagtgacaaatatatagtaatactcacagtgaataagtggtaaatgaaagagaagaaagatgagaagatcactagtctctaaaaaaaatatacattttaattagttatttgtaacaaaaattaatatttataaatataatattaattttgtatttaaattaaattgtatattcaaatatctgaataacagtacttttatctttttagtcaaaaaaaaaaaaatggtcgcctgtgtggagtgtggtagcttgaattataatgtcatcatcaccgtataattcctattattattattattattaatatttatttatttatttatttatttatttatgatgagaattgaattctcagcagaacgaataagacacaactaagtcggaattcttcagagagaaacacagaccagaatgaacgtacactactcttctatctaaacgactcgcatctatggcacgtgttggacacgctctctacctatatatattactgtagtgcttttaaatgcatgcattgtcttataaaaacaaatgtcaaaatacttttttttttttaattaacaaattgctttaagattgaataaatttatatatatatatatataaagaacagtattattgtatttattaattattaaagagctcattaagactatgcaaagtccagtcgctataaaagagttgaaataagaaacttagacaggaaaattattaattttaaataaaaaaaacaacgagttaattcgaaaagagaggattataaaggagattaatatgtgaaaattgttaacgaatactattatgtgagctgtcatatgctatgctggtcattgatgcattcatttttaagctcacatgttttaatgggaaattttatttattattttattcttttgacaaagttaacagaaatatgttttttttttttaagaaaaaagaaattcttttaatgagaaaaaaatatatattttataagtttttggctagtaaaacataactaactaatagacattaaaacataacaatatcaagcaaacattataaaaacttaactaactaattgtaagattccactagtaaaaccgatacatgcaattattgtctattttactcgttgaaataaaaaaaaaaaaaataataaagttcaaatatagccattatgtttttcacaatttgaatattttgtgtcagatatatatattaattaatttggcgtggggtattaattatacagtgtgattacaaatggcattatatactggtaagaaagagacaagtaaaagagaaatatatgtgtgtgtgactagtgataaaaaatgtacaatattaatatatatatatactttcattattgtgattgagctgaagatttgcagtgattccaaacatgaattccatacatattgcatgcacctttaccaaagagactactttctcatgatctttctataaaactgttcttcttaaaactgtttacaatcaaaccaaactttttgttgtcttttttttttttttaataaaactgtttttcttaattttaagtactttttcaacaatattcatagtacgtttatatagctttatttgatttttaatgctatatacattaatggattttatattagaaaataaaagatggatatatatatatataaaaataaagacgcgtgtaggtatagataagttatataattaatagtgaaaaattgaagggttgaaataatctataaaatgactgtggagaacgtaagaattccacatgcagagtcttacataacaataaatgcatgcagagagagagagagagaggaatgccatgtctatttgtttggctctctttttgccttgtccctctctttaacattccttctatctccaccgttcatctattcccttttgccctagtatataagagcattcttattgggtattagtggagcccaaaatattttataagtgacatcatacgattggttagtgatatttcttataaaaattattttcttagattatatgagacttgatacttaattactcgtgatttcacacgcaaagtttcattataggatgcaattgtttctagcaaataatgattgtcataagaatttaaataaccaatttcaataacatttgaatttaaaaacaaagtaaactgattgtttccaaataaacaacaatatccaaatttgtc

SEQ ID NO: 308600 - DNA, 2608 bp, Cannabis indica
gtttgggtctgagtatgggttcggtgttcgggtgcgagtccggagtcctagtctaaaactggggccaaggaccatgttcgggtttgtgtgtgggtcaagggtccagtttgggtcaggagccgagagccgggggctggggtccacttctaggtctagggccgggatctaagttcgaattgagccttgttcatatcaagatctcaaagtattgaagtattttttagaaaataaaataaaaatgaaactattttcaaaaaatattaactaaacgtgatttgtgttttaaaaatttcaaaaattattttttattctattttttaaaacataattttaaaagtaaaaaaaagcaatgtaaaacatgctcaaatttttgcaatgaagacaaaatataataaatggtatgatttatctactcacaaacaaaaaaaaatattaatatctgtatttcatatccccagccagttatggcgttaaactttatctgcaataccccaatcttagctcaacaacaacgtatacttaagctatattactattctatactttttcttcttatttttactctcttttgttcaaccttttcctaatctttttttttttttttgattcagtgagactaggcctcaagagcaagtacttagctctaaaaaatgtacaacacctggtcaagactattggaattccttcaattgcgtcttctccacatgaatccctccaaaatggaaactgggtcaagctcatttgtggtgcaagctttgaggtactactaactatataactataatgcctacaacccatttgacaaaaagctccaattatgttttctattgctttaaagtttctaactttttttgtatctttctctaggatgtggttgatatcagaaatctttctcttgtttacactcttgctggaggtgagtacataatatgaacatcatatatgtgtgtgtgtgtgtgttgttttttttttggatagtgaagaaatgatataaatcattactgttgttgcagttgattgtatagattgtgctgctgatgcatcagttgtgagtgctgtgaatgaaggaattgaagtagccagaaagattgttcctcttagaaaaccttgggtgatgattagtgttaatgatgatgaagatcttcattttcgtaaggctggtaagagtgtaataatatttagctgtgttcatattggtattttccagcatgaatttttggatgttacctatgaaagaaccaggttttgattaaagtagttgattgattttatttagagctcaagttatttgctatctgccatgttaacagaatttgatccggaggattgccctgttgactgttccaaaccttgtgagaaggtttgtcctgctaatgcaatatcattggaagatagaaaaacatcacaacaatcccaaggcaccaatgctcatgtcggattcaaggttttctgcacctaaataattgttttcattatagaaaatactcatcttgaatgccccttttaagatttatgatcaaacatacagggtggagttctaaccgaaagatgttatggatgtggccgttgcattccagtttgtccatatgataaaataagtaattgttatattactttgccatatttccctacaatacatagaattctagcataatataatgcatgaaattgtaatgagtttacacattctgtataaggtgctgttacatatataagggatgttgctgcaactgctgaactaattaaaagagatgatgttgatgctttggagatacataccagtggaaggtatgatttattgagggtgtgtatgtatgatgttatttatgtacttttgttgggtttattatgaaaacttttgtgcttacctctctgtaggcagacctctccatttaaagaactctgggatggtttggaagattcaatcagatttctcaaactagttgcggtgagtgtaaaactatccttgtttggttaaatgtaattgttcatagggactttaacactcatcaagtttggttattcttcttcttttttcaggttagcttgcctgatattggggagacaaccatagcttcaatgaatacaatgtactctattatggagccacatctacattgcccgaatctgtggcaagtgcgtcctcaactgcttggaacatagtactattactcgaaacgcaaccaaaaatagcttatttgaaaatctatctatttagctatatggtgatgtgacttgcagttggatggccgcccaatgagtggagatattggtcgaggcgccacaagggaaacaattgcatttgctcttcgcatggctgctacctcagaaaggcctagcggtttgagtgaaattctcctatgttttctcgagatttaactctagtcctgctcgcagctattgcatcgtttccttggcattttgcaggtttccttcagttggcagggggcactaatgctcacacagttgatgggttaaaaaaagctggactttttcaaaaaccgtcgtctctttttggtatgattagattatccttctgattttcctttacttctttcacattgaagattactgtttatctgactatcttatcttgttttctttcaag

SEQ ID NO: 308601 - DNA, 1662 bp, Cannabis indica
cttgtagcctatcctctgcctccttaaagattgtcaagctttctcttgcaatgtctttgccacacggcttgtatgaaacaagcctcccatgttctcccttgtaaagaatagaatctgaatagttacaaaaaattaccagattaggtctttattaggaatctacttaatagtattaacactaatccattaaaatagttataataaaaaggacacttaatatccacaaacaatattgagcatgttaccattgaacacatagcagttaagcaagaaccacttaaaaagttttgtgaaacatttgatcaggttaaaaattttggttgtagcatggtttcgtttttatttacgagagataaaaaaaatcaaaaataaaggtcaaaatacatacctcaacttcatcaagactatcaaatgtgtcaaatgttacatttgaaagaagcaaaaataatgctctggtaacttatttctataatcgagtttccaccaaatctgtcagttagaagagaaaatcagtacatgaccaaatttgggcagatcaacaactggttatttattcttatactaactacagttagacaaactacaatcaaagcaagattcatggatagttgcttttgaaatgcaccatttttgaattcttaatttttttgttaactcaattttatcaagaaattattttgtgtaaacttaaattttataacagacttgacatgccattttaagatatgcatcaaagaaaaatcattttgagagtaattaatctgcaacttcttttcttcctattagtggttgaggtatgaatagtaattgtatatcaaattcttcagagttttttctttctttttcttttttatttgtttaactatttagaaatgggacattaataaatattacatatgctaaattttgaagtcttctctatccacattcagtcactaaccaaatagatgttgtaagtcaaatattaaaaatacaatgtaaaatattaattatcctttgaagaccaaactgaaatgcctccaagcatctctcctctttgttcaatggcttacttggttgattttttatttttactttttaaaatattttacattctggtgtaaaattcttgtctagtttcttaaaacagtggtacaatattgcatattgaagattggaaaaggcaaaaaaaaagttatataggtaagtagtgtcaatcaagcaatcattattgattataacattgtaaagattatctatccaacaaaagtgtttgtcttgagatttttgcttagacaactgctaaagagaagaggtaaaatgagtttttatggcaatcactttcttaaacaaagaagactcgtatgaattgtaaggaatgatcgatcaacttaagatttcgtagtccccaccaaaaacagtaaaaaatttagaagaaagatttgtgctttcagccatactagatcataaataatgagtgcaaatatagtatgttattattaatactaaagactagactcaaatttatctatgaatccaattcaaccaaatacattttgattgaatcagcaaaaagtgatgaaatcaagaaaatttcactaccctacattagtccctacaaaaattcagcaattaaattaagtatatgacgaattatctattttgtatatcacaagacagata

SEQ ID NO: 308602 - DNA, 1078 bp, Cannabis indica
ggtgatatcttgccattagttaaagatattttataaaattattacattgaattataagggatttaatacttaattacataaatagcgatatcatttcttagaaaattcttgctttttatagcatttctcttaactcatttggtatgtaaaattagattagattagactaaattctttatttttttttggaaaggaatatttaatattttttgacaaaatagttaataattacatgaataatattgtgtaataaatgatatatactacgtaataattaatatttaaaataacaatatgattgtcattaaaattgaacaaatataattagcacccttaaattaattaattagtctgggcaattataaatttaatatgtgatatgttttaaaaaagtcttcaaatcaagctgatcattatgtttgagataagagaattaaaaatatagtatagtccgtacttctctatctattgatagtatgtataatttcctatgttaaaataaataataaataatggcttttgcaaatattcctatatattataaaagcaattataatgttccttcaataataatttaaagaaaaacaattaatttatatatgtatatactaatataattttttttccaataatttatatattttctctggatccaaaccaaacaaagcaaatctttaatttataagttgttttgatgtcggaataccttgttagaatattataaatttattagaattatcaaaactataaattctctaaataattctaaattaaaatcaatatttaaataaatggataagatgatctcgtctcaccattaattcaaattattcaattacaaaattattctatataaactcaaattcaattctcaaatatttaaatgtttattgtgaatcaaattttgatctttataagtataggaatgatcaatatttgtttcccattaattcttattttttttgaacaatcccattaattctcgggataattttacaaatgcacaaaaacaacaaaaatacggtttcactgaattttaaatatttttacgatttttttgattttatttacataaaat

SEQ ID NO: 308603 - DNA, 1591 bp, Cannabis indica
agtgtagaagtattgactggcagccatattaacactgcttgcatccagattgtgctagagtctcttccttcgattaacctcaacctttgttgaagtggggactggcatttgctgctggttcttgatctttgacagaagcaactggatctttctttttagtgttctgtttttgtttgtgcttatcctttgtgatactgaattggagagtgatttggatttaatgtgtccttattttattggatggctgagctgatacactaatttggaaactttgaaattcagcaatgcttaatgcctttactcatttgtcatttgtttttaatatctcgtgtaatttaatcatacaatggaagaaattctagcaattagtgtagtgtgtgtgcatactcaatatgcggcaataggtcctttcataaatctcttgtgccagcgagaccttactattctagttctttattgatattgaaatccttaaatctacttgtcaagcctatgagaccatgactgtttgggttacatttgataatgaactagtttctagtgggaatggactataaattattgtttatggagaacctgaattaccggccttcttacttaaatctgtataaacgagcatgttgctttctgcagtctcctgtttaattgtaacatgtggcaacacattatttctagtggggatagactactatagttgttgatggagaatctgaatggtatgaccatctttctccaagctgtttttaatacttggatcagacatgatgtagttgattgagataactacggaagcaatttatttttaagacgtgttttttaatagatttgttgttaggatatgttagtggctgttcaatagaccaaatcacaataaacttggtcatttgctaattatgaatgtggtatttctctctacatattattgtgctttattggatagtctttgatgttcatgtcattctctcttctcgtgtgcatcaggttcaggaaactgatgaagcaagaaagaagttttcaaatgcaaaatcaatttcatctgcccaatttttcggagatcaggccaaagctgatgccgaaagtcaagtctccttgcagaagttttcagtatgtatctttgccataatcttttaattttgaaaatatagcttaataggataatgatattctagtgatctttgtttgacagaatccttttgtttttgaaaaatgagaaacgtcattgatttttaaattattattatgaaaatgcttcttacaatatatatataaatatatatatatctatatatattattatgaaaaaccatgttaatagatatctcatttgaagttgaactaaacctggaacacatatataaagttaagagtacagtttactctatgctgggatgcacaaagattagtttaaaatctattgtaaaactgatttgtcatttgaaaaactcaaatgttttatcaaatttaaataataattcagttttccattgcttatcaatttactcaatttagtgtacatgagggtcaaattttgttttcaatttacaagggttttatttatttatttattgctatttttttcaaaaaaaaaaaa

SEQ ID NO: 308604 - DNA, 2210 bp, Cannabis indica
catatagtttattcattttttcccaccattcaatgaaagttgttgaacgatttttaatatttatgatttatttggttcagaagaaaaatggatgttgtaaataggaaaagtgaagcgattgagtcgagccctttgatcggagagtttgtagcataaatttggtataccctattttcttaaagtcaaaacaaatcacaattgtaataatggaccaatttccgatgggaatgtttgatgattcacacaatattattaatattattcgagtggacgatatttataagtcattcattcagtggtcctattttttatatatataaataatttaaatatatatacatgaaaagtgattggaaatgcattcatggtttgattttgagtgtcgggttacatatatctatttaaggttgtcactacatatataatgacctcttttctttgagacccatattattagcatcaaaaaaatttatagtttacatcgtaattatgtatggtgtattcgtgttattgtttaagccacacaaattttattacatacattccacttttttttaaaaaaataataataaataatctaatctacatacttcatgtcattcctttgatgggacaaaccctcaaatttggatcactcaacaaatccagttgtaatagtttacataagtttttttttaatttattaatttttagagataaatagatcgaagacctgaccgaattaattaaataacacctcgagtgattaaacttcatatatcgatataataaatatatattgtgcatgtgtgtatagtgaaagtgaaactatatcttatatttatatatgtatatatatacgaggtcgacatgtgaaagtttggatgagatcaaaccttttacaaggtgggcaataaaaaaaaaaaaaaaggatttttaacaactgtatgaggtcccgaatgaccatgaaatctcattaatattaacgattttgattggttagaattcattgatagtcgttatcacatcgattgcgcgatacacccaactaattaatattatttatcataagtaatgacatacaaatatatataatatataattaatatcaatctttccagctgataatcgaccacgccaactactacataagtttctccctcttctctacccagctagctagttttgtgcatctaaatttacaaatacataataatattttaattaatttatttggacaacaaattaaagatcacatatattacgcatcttaactctaaattaattaattatctcaaaaaaaaaaactctaaattaattaattaatatccgttattatatttatagtaatatattactaaaatatgaattgtaatatcatactgttaccagatagctagttagttgtaaagaagaattaagcttacgtggttccaataatcttggtcggaaattcatggttacaaaaattatatataaattaatttataataaagaaatataccacaaaataaaattccccgcaaaatgatcagaaatagacgacagtacattaaaatttaaaacatgacacatttcttggttttcaatttaatattttattattactattattgtttgatcaaagatgcatgtcgatttcaactcaagtgaaattcgtcatgtgttttcttgcaggctattttattttatattttttaagctgaaaacaggaatacctaattaatatatattttcctgaaaaagtaaaagcctaaatacgacgacagggaatcatttttggcaatgaaaacttttgctttataatactaatgttatttatttataattttgttgggactgtttttgtcgttaactaattataactttaattttgccggttgaagtcacaatccaattagacgcccactcacaaccaccaccatggtgctttggctttgctatttaattagtttgccatactcatttattaattaatgactactggattttggattcaaacacaatacacatctctctctccccacatatatatttcctattaattaatatttcttattaatataattagaaatcaacagtgtttattccatcaaggccattcacgaaggtgcccaatagtgtttcctttccaccactgtatattataagagtattgttattcgacactccaatccaataacttttattgatagtgttctataattgtttaacaatattttttaaaaatt

SEQ ID NO: 308605 - DNA, 759 bp, Cannabis indica
aatattattacttataatttatgctattgggaagttagtgtatgtatacttggaatcaaatacatatattattaattgggattggataaggctagctttagggtggttttagactttgtcaacttacaatttaatattgatacgtacgtttaatattattcaattaattattataattagcacattagagattgataagtcttgtatagttgtatgtataaaaaatagaatatgttttcttttcttttcttttctttttcacatatttgggaagttgatttgaatttagaataagatttgaaagagactggttttgactacaatgaacacggttaaacaaaaaattttaaaaatataactatttatttttggtaagtaagaaaacttgtattgataaaaaactttacaagtaaaagggaacaacgtgcactcactgccaattgcaatgcaagaagaaaaaccaaaaagggctcaaaactagagcatgcacaaccaccactcacagctatatctaccgttttagttttggaataagaaatgaattgattaactcttttgcgaactatacactttgtattttcaacaataatatctcttctaatggatttatgctcccaaaaggaaacatttttagctctccaaatctcataaaccatagccacaaggcactacaagaaatgtcacttttatcagcacagttcgctactgtgctggtaaaaataacttttaccagcgcatttcgcaaactgcgctggcaaa

SEQ ID NO: 308606 - DNA, 2310 bp, Cannabis indica
aaaaaaaaaaaaaaaaaaacctacatttttacaaaaactataagaacacataaaatttataattttctcgttattaaattgttgtaaactaattaaagaagccttctttaagagacatttttttagtattgaaacaccaaagcctagtttacaacattctaaatccaaacaaaaccacttaatggacccaccacaaagttagttggatcatcttttagtgcaattaactaactaattatctaaccaccaaatacttattttttattatgtatcccaaatcatgacaatagcaatgaccccaacaccaaccaacacagccaaaaatttaatatgagacttatcaacaccaacaggctttttgggtgtgtagcctttggctaaaagatggttaattgagacataaacaaaaaccccacaagcaattcccattgaaattccaaagatccaatcagccacattgccttgtgtagtggcatcaatgatgattcctattccaaccccgaccgggctggaaatggcgaaggcaaaagcgtaggcagcgcatgacaacaacggtcggtttgggatcattcgaagtagagctattcccattgctatggctgcaaatattttgtgtaaagagattgtccataaggctttccaagcatcggatttggtctcggctactccaatggcgattccttcgaaaattgagtggaaacatagggctacaattagcaaaatactgtctgataatgaatcaattgatgctacacttgttgctgggtttgtatgatgattgttgttctttgttccatgctcaatactatctgaaatgaagcataattagaagtaatttagtgaataaatagtaaaaaataaatcttttttaataacaattttgtgaattggccttcaaaagtctccaaattgaaagagtgtcaagtgtatgcaatccaataacaaaagaaaaattgtaaaaactctgttttttttaaagacactttgtaaagaaatattaaaataaagtcaatatgcaaagtgattaaaaattatatattttgtggattaccctttttgacaaatgagccattaatcaaaacccaaattaacaaaatctcaacttctcactttctttttctttctaaattatcaaaagtaatttaaaaagagacaaaaagaaacaattttgcaagcaacccttttctcaaataccccattaaattaaacccagatgaccaaaatcacatttttctaatctaccaaacaaaaaattaccaatctccaaaaataatcaaaataaatttaaaaagagaaaagaagaaactcttttgcaagcaacccttttctcaaataccccattaaattaaacccaaacaaacaaaatcccattttcccagtctaccaaaccaaaaattactatcccatcaaaagaaattactaatctccaaaaattaaccaaaattaatttaataaaaagactaaaagaaactattatgcaagcaatcctagcaacccttttctcaaatacccaattaaacccaaacaaacaaaatcccattttttcaatactaatctccaagaaataaaaaataattaacagaaatcaaattaaaaattaccttgttgttgatattccttatcaatatcttgatgattttgcttagaataaacatgagaaacaacacaatctgcaagcatagttaacaaatatccaaaacaagcaagcataaaagcaaatggatatttcttcttagtcaaatcctcaaaagtctcattagcatcacttaagaaatgcataagagcagtccctaaaaaaaccccaccggcaaattgtgtgccaattaccaaaaagccctcgttccatttcaaaaaataaggggacaaaccggctagaaatgtcccaataaatatcaaaatcaagcaccaaactttggccaaaatcaaaggccttgaatgaagattaacagacccttttgagtcaacatcaccatcatcatcatcgacaccgccgtcgccgtcgccgtcgccgccgtgggccaagacggcggtggtgaaaatgaggaagagaagagagagaaggagaagagttgttaagcggggcattttgggaatttgggaggtttggcttaaattagctgagtgaatgaatgaaatgaatatttaaggttttgagtttggtttttgagagtagtacgacaatgatgacaaaagtggtcaattttctgtactacaaaaccttagaaattttatgttaatttacattgttgtttgtactatgcaatttagttttttttttagaaattaaaaaaaaaatatgaaagaaaatta

SEQ ID NO: 308607 - DNA, 1476 bp, Cannabis indica
aaaaataatagattgaattagatacccacccctagttaagggtacctccacaaaataaattagcttcacaaatcaaaatagaaaagagatcaggttgtgtgtcttcaaacctccattaaaatattttttatttcaaagaaaattaatttagactaaccatcaaaaagaaaaaacattactagtctttaattgttttttattttgttaatttaaaagaaatctaaatcaagaaatgaaaaagttgcataaactaaaagaaaaagttaataaaatagaagaataattgttaaaatattattaaaaatttgaagagatatgttaaatgtgtaggaaattttacttctactatcatatttctcataatcatcaattaaagtataataaaatattcttaaccataaaacaaatattcttattataaaagtatcttatatatatatggtagttctataatgcactctctaaaaaaaggatttcttattattttggcattccaaattttttttggtttaatttatttcatgttcatgtacgtgatagttatccaaaatattttacaaaatttgagaaattttaaataatttaaaatataaaaagtaatgttcaaataatctatttcacacacgtagaaaataaaagagtcgcgagtacaatagactatttaaacatgtatgttaaattttttcaaatttctcaaaaaaattcaagacgtcttaaaacgtagagtataaaaatattgaataaaaaggttctcctgataccgaaacaaattaattatttcaccgacatctaatcttaccttacaagtgtagacctattttctcccattctacttaattatattttaagtaagctaaaatggactctaattatcaaaaggtaatttaaaagccagcaatttattcacgctttagtgaagaaatgagctgggtaggaagagatagcacatgctttcttggagacccataaacaaacatcatcataatgttaacatgccaattaacttttcctttattttacttttttggtatatataaaaacataggaaatatgtaaacataaatgtggcctactatgagcatggatcgatgagcaactttttaagccagagtagtccacaatagccttttggtgaactttgcggctctatttttctcacttgcatgaggaaatactattattttttaagccagagtagtccacaatactcccttttcgtccccaaacaaaataaaaacatatcaaatctacgtgaaataataacaataataatatctataaaaaataatcaaaataataatgaaaaaaattactctatatattattattttttaaaaaaatttacggtttgagttgcttcggtaattacttcagtagtttctttgtaggttgtagacccacttacattcaattggatgataatccatgataactgaccattgtttttgttctggacttgccattgcctatttatgg

SEQ ID NO: 308608 - DNA, 1294 bp, Cannabis indica
tatatatatatatatcaatgtttataaagatgagtgttggttttgggttttggtcaaattattttgtccaatattaataacttaatcaaaacacatccatcaatcagacttagaaatacgcttagcacaaatagaaatgctcgtatattttaaaggaagggagctaagagtaaaactcgagctatccaaataagacatacccgaacaataaattgaagtcttgctaggattattttgtaaactagaagtttcagagaagcgctaaaagtcctaaacaagagcatcacagattgaatctcctttagaaaacagcaaaataaagatggttaagatttatacttctacatcttagatggaagttgaaattatccttcttagcaactttagccatcaatctaaaaagatatttcatacctattacaaaccggagggaagaaatgagattttcttgacgaagatgtcttttgatggaaataaccattaagagcgccattgatgagtaaggagaacttggggggagagacactccataatcatcgatatgaaagagttaagaaaatgtaaagcttctaacatctcatggataaaattacaatccactatatcattaagcttttttatgttccattttgatcatagaagaaggagagtttcatttcctactataaaatttaaccaagtcttgacaaataagtatagtatgaccaatatacctaccatgcacaaattaagccaccttagttatttgtaataatatcaggaatcactctttttaatctagcacataacacgtgatagtcttgtaaactacattgcaacaagcaatgggtctaaagtcattaacactatatgggcaagtactcttggggataagagtaagagtagtggcattgatctcgcgaatcttaccagaattaagagcaaaatgaaccgcaataatgacatcttcacccacaatttcccaattctttttgaagaaaccattagtgaggccatcgggattctggactaggggctttattatcaggaatggagaacaatacctctttaactttttttgtgtaaggactagagaaaaacttgatttgatcttcatgaagaatcaaattttctctaatcacactagcaaggacattctttctactcatctttgagcaaggcatttttttatagtaatcaaggaaagcattattaacatccttgatattattctaaactccatgctcattgttgatggctgtgacagtcagtagtcccgtgatccgtaaggggaaataccgggtaagctgtgcaa

SEQ ID NO: 308609 - DNA, 1486 bp, Cannabis indica
atccaaaatatgaaatccgcacttagtacggattggatgttgtttgactaaaaaagtgcggattggatccgatgaacatccctaaacccaacataataaaaaagacgtggtaataattgacaaatcacattattcaaatattttatatttgtaatttaaaaagaaattatatattttttagacatctaaaaatagttattcaggttttttaccttgaattattacaactatcaatcctaattattttgacactttttctattatcattaataatttcacttcaactatttaatatacaataatgttgtaatataaaattttagttatgccatatggctcaatgtgatacgtcattgctacatcaccatcaattacatagcgccatatgtgcattaatttattttttttatgaaatatcaacaaattaagtaaattaccttaaaaaaaaaaaattgttggttaaaaaaagtaaattttgtacagtaatatgtaagtgtttcaagctttagataggtcagtttattattaatgacttaagtggcgtgattatttagaacagtgatcacttatttattcgtctcttttgctatcgcatatgttcaatactaactatttataatcgatatcattttattgtaatgatataagtatccaatcttatatactattttgaaaagttcttatcatttttttttttggtgaataaaaaatatattatatataaaaagtgtgcactgtgcatattaatgtgcatcacaaaaataattaaataatataaaaaaaaaatctacatttgatggaatgataggagtgcaaaagagagtagaaaaatgatttccttaggatttgtttttttcgttctcaaaaaatgtgccatatttcctacctagttagtaactatacaatcatatatgcatggataatatatgtatatatgaaatcagtttttaataaagccattacgtttagttcatgaaactcacctttctcgtatatataaggaccaataataatcgaatatatatttgtgcgtgttacacgactggtcccactaattattttattttagttttccacttaccaattaataaaatcaaattaatgacatattgatgagtatatattgacatgtgattgtgcaggaagggtaagaaggaaattttgcattaaattagcatatatatatacatagaagaacgtacatttttttcttctttgtttcagggaatgagacaactcaattaattcaaacctataaaagagccaaattaacacaaattttacactatatatttagagataatcttaataattgatataatatatatttattcttattaattaaagtgtcaaagcatgcaacgacaatcaaataactatcgtaatgttaattatcttctcaattagaggctcgtgtacgcagggacggacccagttaagttattgtgctaataaaaatattgtcttttaaaaattaaatttaatt

SEQ ID NO: 308610 - DNA, 895 bp, Cannabis indica
gtacttacgttattactactacgtattacgttagttacttacttacttctacctccctacccgtacctacccaccttctctctctctctctctctctctctctctctctctctctctctctctctctctcctatacatatttttaagccaatgtttaattagttgaatgcccaggtatgatgcaacaattgaggctcatactccaattgggtattacgttgcttatgttgaatggggcaataaagaagaggtattatttttctctaaacattccattaagtcattatcttactactttgaactcatttatgagcttttcttctaggatgtatgtgatatcatatcttatatcctagcctaagatgatgaaactatgaagtctcgttaatgattttgttggtttcctatagttcattaattatcttctggtcttcattagtgtcttttttttcttcatagctgtgctttttgaacatttatcaccgtggagtgaatacctgcagtgagtgctgctacttatatatacattttttttttaattccaggtggatcctgataatataaggccaattcaagaaggcgctgtgaatgcattggtggaagcagagaaggtagctgaagctacaaagcaagctattaagagaaaaattgctcaagctgcttctgttgacttccaatctcgaaccttgccagctaaacttcgtatagaacctgatgaccccgaggatgtggtaagctatctatctttttgtttaaaaaaagaaaaaaaaataaaaggaaaaaggaaccctcaagcttgctttggttagaaaagatttacaagcacaagtaggaaaagatcctagaacaaaatcccgaggatgtggtaagctatctatctttttgtttacaaaaa

SEQ ID NO: 308611 - DNA, 1358 bp, Cannabis indica
tttttttttttttttggtggggggctattttctttccttatcgtttcgttagttaaacacaatcgatagtaacttgtaatggaacccaagctcttgctttctacaagcaaagcctcagtatcttcttctttacccttcttcctatctttcaagacttcatttcttcgaatacgcaatgattctgtcaaaacccatttctctggctcaacgattcaaccagaaaagtcaccatttttgggcagaagcctggtcttacatgaggagagaagtgtttttttcagtaaccccagaaaaacccatgttccatttgggccaataagagctgtagtgaagagaaggaaagagcttcctttcgataacgtgatacaaaaggataagaagctgaaattggttttgaagataaggaagattctggtgaaccaacctgatagaattatgtcgcttagagatttgggtaggtacagaagagagttgggactcaataagaagcgacggttcattgctcttttaaagaagtttcctgcgatttttgagattgtggaagaaggggtcttttcattgaaattcaaactgaccccagcagctgaaaagctttactttgaggagttaaagattagaaatgagatggaagatttgttagttgtgaagctgaggaagcttttgatgatgtccttggagaagagaattttgcttgaaaagattgcccacctgaagaatgattttgggcttcctacagaatttcgtgacaccatatgtcatcgttatccgcaatatttcagagttgtggcaactgagcgaggcccggcattagaattaactcattgggatcctgagcttgctgtttcagcagctgagctttctgaagaggaaaatcgggagagggagatagcagagaaggatttgattattgataggcctcttaaattcaacagagtcaagctaccaaagggtctgaatctatccaagggtgagatgagaaagatagcactttttagagacattccttatatttccccttactctgatttctcagagttgagaccgggtacaagggagaaagaaaaacatgcctgtgctgttgttcatgagattctgagcctcactattgagaaaagaacccttgttgatcacctcactcattttcgagaggagtttcggttttctcagcaagtgaggggaatgttgattaggcacccagatatgttttatgtgtccttgaaaggggatagagattcggtttttctcagggaagcatatcgtgattctcagttgatagacaaggatcgtttgttaatcatcaaggaaaagctccgttctcttgtttctgttcctcgatttccaagaaggggagctcctcg

SEQ ID NO: 308612 - DNA, 758 bp, Cannabis indica
ttttagttacaaataattttttgttgtgactaaaagtcacatttaatcacaaaaaatttatgttgtgactaaaaagttgtagtagtagtttcttgtagtggacgtttagagagagagggaagaaactaagaaagattctgtaattaatttattattaaaagaaattaattacattgtggttttatatacaatcatgtactgaaattagctaagataagttgaacaaaaaataattagccagctcaacaagcttaacaacaaactaaccgaaatgtacaacttatcatgactaactaattaactctctgtaatactcatagtcttaggtgttggaactacgcgaatcaggctagatttctattctgaaagatgaatggcaataaagtcaatatagggagtttcaatttctccatatctaattatataaaataattagatcaacaatgtatatgtttaactatttaattagaatacttttaaatttaaaaataaatattacatttataagaaactagccccaaaagatgagatgttcataaagagaaatatacaatattttttaattgtcattctgatttcgatttgtgtttcaaaaacaagaagacagactcaaactcatattaattagtggaactcaattattataccacaagcaatatatatcctatttataaataattaatgtacatgtatatctatattattatacatattttgagagctagtatctctctcttgttggattaaaatcctcaata

SEQ ID NO: 308613 - DNA, 1371 bp, Cannabis indica
taacatgataatatgactctacaaaaaatcagcttttaatgataactttttaatcgtaacttaaatttttatttctaaatattttaatcttgaatattttagaagtctatcctccatcttgctttagtgtacaaacatccttccaagttatttatatatataatttcccaagaactagtccatatagaaaatctctaaaactcaaatattaaataaaatttgtagatttgtaaaaaaaaacttaattgtctattaattgaatgatttaaaattgtgaagaaaataaacttgaataaatttgtaaaatttaattttgaatagatgcacttttaagctgtataaggtataaggtaaattaataattaaaaaagttatggagaaaaatcaatcttccaccatcgatcatttttcatttatctctttgttctaaattacaatagaattttggtagtatatattcagatgcacttattaatttaattttaattacaataattatgttgtagttaataaaaatatatttaatgactaatatttgttgccgtaaactttttagtaacaacataaaaataataatttacgtctaaccacaataaacatttttatatatagtatgacatcgatagcttatatacatggtaccaaaaccaaatatcatatgcgtcacaattttagttttgatattttttctttcacatttctccatatgtttattaattacagttttacgagttcttacaatttacgtacattagggttgacaattaagtgcttcactattaatcagactattaattaaaagagaaaaagtaacaagctcgattatcctactattttcaacttgaaaatccaataaatgtaagcatttgaaaattagtgtcaacctgctcatgtaacacaacctaaccaaatatataataaataacatatactaattctacaagaaaaaaattgattttttcctacactactttttcatcaatgaagaaaaattattagtaggatagcaaattcaagaattatatgtaaaggcatcggtaacttacatgccaaaaccagacatcacatatgcgtcacaattttagtgtcgaccgataactgtaccaatgctaatttgttttcgcttcacttttctattaatgcgaaattttcttttctctttctcttcttttttgtagtgttcattacagatttttgactgagaagttaggttggttgaaccaaaatctagaaaactaattaagaaacaacaatgggaataagtctagacaacaaaggaaaaaagagatagttcctttcactactacaaataaaggcttttaatcccggtttttaaggccttttatcccggttttcgctaaaatgaaaacc

SEQ ID NO: 308614 - DNA, 1368 bp, Cannabis indica
cggtggtagcaacttgggcccctttagcagtatcagatgcaaatctcttcctctttaattctgattgagccaactcatcatcatcttcttgttgattctcataaacaacaactcccttatttttgctatgtgattgagaaatatcaggggggactattccatgaatgcaacatgattggaattgacattattgtatcctgaattgctagcgttcacactagaaaagagttgtcaccagctttacccgatcggagatatggtgattcggcaaagttttggtggcgacggggagctgctttcatgcctaggacatatggtttaatgatgagatgttcaggagtatcaaacagtcaaggacagaaccttttcgagtgccccataattccgtaaataaagcaaaaagttgggacatttttatgtcggaaagtggcgtaaaaagaaccgccatcgcacttccttaatttcgttcttcttttcaaagggagatcaagggataatgtaacacgtacccgcaagactttacgccatacgcctataaaattgttaggagcagagtcgataacttttctcacataattaccggcatctttggcaacttttatagtcaaaaaaacctgattgtaagtcattaatctgaactcatagatcgagagtgttgagttgcacgaccctaggattgtcaccttcgttgagacgggcgattatgagttgtttacgatcataagtccacggactgcctttgataacacgctgaatgtctatctcatgatagaattggaacaaaaagcgattttgatcgagttgtttggcgtacatgcctttcccgtgtttccacaagtctgccatgatgttttggaatatgcaaaaatcagagattttccctgttaatagacgcccaactagacaccatttgctgtcattatgcaggtcatcttttgcctctgcatcctcatagaacgtttcctctatttctttctcttcaagtagtatgtctttccagccatcctctatttcttgcattcgtgcactgcttgaagccattggacaaaaggacctacgcgtgtatgagaacaggaacaggacaagaaaagcacaaaaaacacacaagaacaaacaaccacaatcactcacaaaaggaggaacacgacatcacactttaaaaagagaccttttttttggattttttactataataaactaacattagagtacattttttgttaaatgagctacattttaacttttcaccacttatttatacttctatttagagatgctcttaacaattgaagctagctcaaggccctcaagtggcaacagtgacgaagcgaaatttagctaagtgaggacttgaataaatattaagtc

SEQ ID NO: 308615 - DNA, 1112 bp, Cannabis indica
caattgattaattttgataggaaaattcctatcagatacattgctaaaagaatgagatgaaaaatctaatatattccatgtgtgtacctgaagtaggagagtgcaaaattggatatattccataaaagacatgaatggcaaatagacggataatgcaggagaggtcactgcggcttttttgcaattttacaagagcctttttagatcaaaattggagaataggaagaaggtagttctcactagaatagtagcgtaagggccaatactctcaacggttaggcttttttgctactaaaagaatacagtaaagaagatgttaaggtagaagtgtttgaaattccaagtaacaaagctctagaaccgaatggatatgagagctatttctttcaagataatcgggatattattggtgaggaagttaataaggccatcctagacattctacactagggaaagttgttaaggaaagtaaactccacaatcttaactcttattcctaagattaaatgttcagacatgggccacaatcacatattatcacgtattgtaatgttctagcaaagtggccacaaaaatgaatatgttctcaactgagactaattcttgtagagttgatagcacaaaaccaaggaaggctagctaaaggcagatatattgcacatattatcatggttggccaagaaggcaacatccttgaaatctagcaagaaagacatatatccattggagtcgttggccaaagtctatcgttgccccaagtggtccttcgatggtcagaatttttacacatctgacaagaaaattccatgaggcaatggtgtgacaatgaatggatatattttctttttctttttattttctatgtttcactaatcttttttgggtactcaaagtcactatctttttctcttagagaatttactaagtctataatattttagcttcctatacctataaataaaaaagggaaacttacaaaaatactgtaatttaggttaacttttacaaaaatactctcacacggaaatctttacaaaaatactgtgtttttataaaataccagtaaaacacaaagcataacagcttaaaacaacagtagaacaccagtaaaa

SEQ ID NO: 308616 - DNA, 2749 bp, Cannabis indica
cattcactttctctttctctcttcatcttcttcttctttcttctcatctactttatattattttatattatttcataacaattagttattttttgcaacaatttaaatctatatatagttgtaaatctttgtaacctgaatgcgtgagagacaagatttgtttgagtaaaaatcgagatagtgtaaggtagaatctaaactaaagagagaaatttcctcttataatctctgataagtttgtaaagattcttgtaactttttaaacgctgataataataaaagatatgattgttgttgttctaaccgagatgtagagcattgcataaggttcaaactcgttaaattaatctagtgtttttttttctgttttactacttaattctttatatcttcaattcttgagattttttagtataatattttttaattgtgttacgtatttattgatactatgataaatgactaaaaatatcgtctattaagttattaaaactatctatcacatttttttgaactacaatactcttgctaccagttattgggacaaagctaagttttttattccgtttgatcaaatcagcaactttcgatcattgtgttgaccatttgttcaacaattatgatgatgatgtttcttgtcgtgttgtcatggtttgttgggaaatatagaaggcgcggaatgcactggttttgaacagcaaagcctcttctccaacacaggtttttgtttcagtaaggattacacttgaccattggcgcaaagctcaagataagaacaatttattatcattgtctctccaacaaaatgataataaattgagcaatggactaaacctgaattaaacacggtcaagatcaatgttgatagagcctcttttgagaaagaaaatgcttacagttttgtgtggttgctcgtgattcatctaggcatcttgttgatctcacatccaaataccaagtcggttcatatgcggctgaggtgatcaaaacacttggggttaaggaggctattagttggttaaaaggcaaaggctggaataaagtcgaggtggagactgatagtatggttacagttcaagcaatctttagtaaacaacaaatgacttctgtttttgggttggttattaatgattgtaaatttttattatcatctctacaaaatgttagtcttcgtttcattagacgatcagctaaccgagtcgctcactttgtggctaggtggtctcagtttttctctgatcgtagcattcattagaatattgtccatgatgatcttcaaacactcttgtatgatgaatgctaaattttaatgaagttaataatttcatgttcaaaaaaaagaaaagttattaaaactaaatattgtcgatgtagaattatttaaagctgtaaaaattattagtgcatcagtttctacatgtgatgagtagttttagctgtaattttttttagggataatttgttaagttactttaattttttttataatgagaaactaaacttcataaaaccagaactgattttctaatctttagctactttcctttcattgcagtatcttacttatgattgtggaaatattataaaagagcaaataaaaagaaaacttaaagattaggaaaaataactagttcaagtttgtttttttaatttttttttattttacaattttatgacttaaaatttttatttttaaaaatacacttttaaagttaaaaattaacgagtaatcaaatttacgacaactataaaataatcagaacttcaagacaaatatatatataaaaaaacagtttattattttgactgagagtgtattttggaaataaaaatatataagtgtacaaataaaaaaaatcatgatgtatttttgtaaaaaaaattcaaataaatagaaaacctaaagattaggaaaaatagctagaataagtttgttttttttaaggggaatttttaaaaaaatactaatttttattttttctatgtttttttttataatttaatttttatttataaaaatatgcttttaaatttttaaattataaaaatacgatttttttcaataataaataagaaaataactaaaaaataacgataaataaatttcacgacaattataaatcaattataaataaactataaaacaaccagaacctcaaaacaaccataactactataaataaaccataaaataataaaaaaaacagtttattatctttatgtatttttgtaaatggaaagattcaaagtgtaaaaatgaaaatttttcagtgttgatgtatttttataattttttttcaaatttttgttctatgtaattttttttttatacatatataaatataacacgtaactagattaagtttagtgtgatttatcaaaaagaaacaaaagtttgaatgcatgaagttggaatttctggaaactgatattttattcattagtatgggcgaagtttgaaaattttatgtcgaagtttgaatatcattccaatactttaaaatgcaactgaacatggaataaaattattccttttcattttattccatttcattacctctaaccaaacgccacttaagttttaataataaaacaaatacatgtgaataacctaatcaagattcaataaacttggctaaattataaagtaagtaacaacagatcaatcaataacaattaataaaaaataaaataattaaatcataataaacaacaaaaaaagaaggaaaataaatcaaatagtaacaat

SEQ ID NO: 308617 - DNA, 1203 bp, Cannabis indica
atctcattacttgcagcaagagaaaacttaataaattttcaaaactaagctttctaatattccaactaacatctcctagattaaatgtatgtaataagttaggcactctttgaatcaccacatttgattttgttttcattattaaaaaatggaatgcattttattatgtttaataagctttgtaggatgtactttgacttctaaccgttagatcaatgcgatcgtgatccaatggttccggacacgggacaaaatcctccatataaattggttggaagggagcaaagtttaatagagttaggaatgtgtctcccaggttggtcagagaaatgaatggaagaacttgggtatcctttaaatgataaatcaaaatgttgttcacctatatttggaaatactagttatagttttcaaaagatgtgtagccaaatttgtgttgagggtgtagagcactaaataaaacatataattatcttgtaatatacattatagtatggtaaaatgttgtggtggtaactgaactaacataactgaatgttggagtattttggaccacttttaagatatgaaatctgaatgattgaaagtgtgatcctcctcactactactcatcatcatcatcatcacctcagacacttggtttttctgctagattcatgctcctttatatacatatttatatatttatatatatatatacatacatatagtatctacctagctgctcaccaatttatggttgaactgcaccaagcttctaataattaataatatatgtattatatatagctaccactgcagtgaatagtgatttggttttttagtacatgaatgaataggttgtaactacatttttttacatgatggtgtataatgttcttatagatttttagaaatttctaaataatttaagatatcgaaattagaattcaaataatgcaagcaatttgaattttgatttcgacgtctaattatttgagatttcttaaaaatttgtgaaaaattctttttcactatcatattaaaataatgaaattataatttatctatgtaccaaaaatactttaagttatctaacaatttctctctaaatatatatatatttctatcccattatagatgatgcatgctacattccacatattatccgattattaaattaatcgaacagttattattaattaattttttatatatttttta

SEQ ID NO: 308618 - DNA, 2061 bp, Cannabis indica
gacctaattttctagtaaaatttaagttaaaaaataataaaaataaaaaagataaaaatgttgttttacaaaatattatttgttatactatttttctcacactacccagggtttgggtcgaggttggggttcgagatcgagactaaatcgtggggtttgggttgggttaaggtttctaaaaaaccgtatttttgcatatgccaataagtttctttaataatagtaaaaaaaaaaaaaaatgaatataaagatctacagtagcagaatggaaacttgttactgcagaacacagatttacagtaacaaaatagaaataactgtacagaatataaaaacttgacacaagagaattatatgtggtatcaatgttctttcaaacactcctagtccacgagaccacgcccaaagaatgaaatcaatcagtaaattctcgaacaattataaaatacaattgacttaaacaagtttataccccctctaaagctttgttgcaatcctttgtaatttactttgccaatctaatttttgaacaccaccaaacaatgaaatccctttatttttttatgtgtgagttcttacttcctcctgaagtaaggctttgaaaagtcttcaccagaagacccttctcttgtttaatgaagttcttcaacctattctaaaaacagtataagaacaataaacgaagactaaaacctagcttaacactctaagttcttacaaaataaattctctccttacaatgataaaatatgaaaaatgaaactagaagaggtgaaaaatatttggctactctcgaggtcctatttatatatcataaaaaccctaaagacagccacaaacacgttttcaaagttgtacaaaactttcctaaaaactccctgatttgcagcatcaaatttgaattctgctgcaacagatcaggaccagacaaaaaacttttcaaattggtcttcaatacctgtcaaataaagattatttgatttgctatgtacatagcaaaactaaaattaacaattagaaaaagggaaagtaaatttttccattaataagtaatttttcataaagaaaatttcttctcttgtaagacaagttttctaaaccaaagataacaaatataaaataaaacttatcctagaagaaaaagaggcaaccatagccacaaaattaacacaagaaaataccctttaattcacaaataaatgaaataatattttgacaactaaatttccaaaaaatgacctaacatgttcgagtctgggtctaaggtcaagtttgagtccgggtctaaggccaggtccgattctgggttcggggctaatctggccccaagtttaggtccaagttcggcgcctagttcgggttcgaggtcgggtctaggctcttaatttggggacgagtccaaggtctgaagtttgatgtttgggtcttgagttcgggatttggtccaagtccgggtacgggctcgagatctggggccaagtctgcgtcaggggtccgtgtctagaatcgacatccagggtccatgccgaggtagggtgggtggggttgggtttgtgtcgtggtgtgttgtggaaattgaagtatttttttttagtaaaaaaaaatctaaaaacagtctttagaaaatattagccaattaccattaaatttttaaaatgaaacaaaaactgttttctattctcaattaattctagaaactaaaaaccagaaacacaaccaaacgaccttttaatgtctggaaacagaatttgttacaagcttttctatttaagctctggtggttttcagctagatttcagcacatttcgaaggtctttcattgcctgccacagtattgtcgatatcattctgaacatcgcaactgttcttaaatcgagcaatcaaaaccagttcaagaatgactattttaaagatggtagaaatagccagaggctaccatgccgatatacatggcagaaattccattctaagagataaaaaataggggttttttcatttttacacttcaaaacaatttttttttttttgcatttttacgaaattctacatagaaactcctat

SEQ ID NO: 308619 - DNA, 2083 bp, Cannabis indica
aaaaaaataaaataaaaattaatcggttggagtccttacctcttttaagtgtttttctaaagattattattttaaaagacaaattatatttccttgacttgtataaatttaggaattttccaggtttttaatttctttggctatttaatgattgtgtaagtgtttctagcaattttacttgtgaaacttcataactcttgtcagtcatattgctattgatattgcaaaatcatgtaaatttgtaatggtttttcaatggtactttcttggtaattaatgtgtcaggaagagagaaacaaagttcgcaaggttgatcgatatgatgataggaggtaaatctagatactgtcttttacttgcttcaatcattgtttgtcttttttttcattcaagcacgcacacactcgatatttctaactatttttcctttgtttctcatgctgctctttataatctataattcaaaggtcaaaagagcgaagtagggagattgaaagggagtctagtagggatagagaaagagcaggtagccgtgatcgaagagattatgatcgcaagagcagagatcgtgatagacatcatgatcgtgatcgtggatatgatcgtgaacgtgagagagattcagatcgctcccgcagttatgattccagaagtcgtcgtgaccgctctagatcacgggagcgttcaagggactatgatcgccacaggtactggcttcaaattttccctatcaagttcccactatttcaaatggtcttatttttggctggtcatctgaaattaagtaattctatttcagcaggcgttatgatcggtactagacaaattcttatgcagagaagaagggctacgagggggggtggaaatttgatctttttctaggtcagtgttgaaactaatgtaggaaaaaataacagtttgtgtttcttcctaaatttttatctatttatctggagttgagctgtttctcctgtggaggacgtaaggaatgctgcttaggttttctcaacttcgttgttagagactaagaggtatgtttgagaggtatgttttattctgttttaagtcattgccattagcttctttatttataatctatggctgaaagtttagtttgtttgcttacaaactcctatctgtggggtaatttggcttctaatttatgaagttgcgttgaaaaaattgacatggaatgtcttgtggggtaggtaaggaggatggaacatctactggttttaaagtttgtttcttttttacttacaaattggcaaagcatggaatccggtaaaattattcaatatgcaattgcctttgtatatacaatgacatttgctcatttgagagatactagtgttcaaaaacatttgctcatttttgttttttgttcttccattgggttggggatttaagccttgaacttcgacaatgaaggtcgggcggggttgtgaatgatcacatttgcgcagtcattttataatagtcgggagttagaaccgaaaaatgcattaaataacgaagtctctaatgaccttgaaataaggtgaaatcgaacattaacaagcaagaatggctactcgtatatcctaattttctaaagtactctccataagcattttggatattttaaatgcgcttactgcgataatgaagaccgaacaatcagaagatgaaaaagcattgtttcttgttcttaccagaaatatttgctcaacgaatttcacaagtaggtattggtttcctctgtaactaacaatccagtggcgccttccaacaataaatcaaccggcctagtaactattaggccacttttagcagcttctcttccctatttattaaaatatattattaaaattctactttttttattttacactaaatatatataatatattatatatttctttacatcatttaaatattttttttttttaaatacaatattattaattaaagtacaaaagaaatgtaataaaaaataaaaaataataacaaagtagagataggaaattatagtaaatgaccccaaatcatagaagtatgttagtttatgtcatttttttaaaaaaatatagcaaatgaccct

SEQ ID NO: 308620 - DNA, 1263 bp, Cannabis indica
atgaaggagcctgttattaaaaaccaactatttaccatttcttgttaattattatctggatttaaggtttttttctttttttttttttttttttcaaaatgaaattcgacattttaagagttatgttttaatatggtttccaataaaaaagttatgttttaataattttttttttttgaaagaaaagttatgttttaataaatgacatgatttttattgtttttttttttaagtaaatatcattttagatcttatattttgtaaaaattattaattggaccataacaaaacgataaaatcgactttatattttttaaaatggtaaaaataggatcttgagtttcatattcaataattttttttaatataactaacttttaagacaatttctaatacgaacagatacagaaaatataaccagttttgtcataataacatctatggatcatattattattaagtttcattttgacaaaaaatcagttcagggtcttatttgtacaattttagaaaatacatggtctattttatcatttaacaaaacaaagagtccaattaataacttttacaaaacaagatccaaaatgatatttatttttttcaaaaggtttccattgatttattcaactaatttggatagaatttagatgtcttattcaaaataataacaataaaattatccaaatatactcgataataatttaacacttttcattttttctcttaatattaacaactaggataagagctattcaaccttaattgttactttataaataattttccactattcatttttcttgttgatgttgatttttttttcttttgtataattaagttttttattgtaaagcaaaaacctcaacgagcagtacaaggggaacggccttcattacaatcaaatttgagcacacattgtttttggtgtgtaaaacaataggctctatttttaggtttcatgtgtactataaattttcttgatattttagcaaagaaaaattgtgatatgagtacaagataaaagttattgtttatcaatttaccaagctaagaatatagacttatgtatgtcatttgagactatcatattttgttatatgtgcatgtgggagtgagtgagaccacaacaaaaaaattatcattttcattgggaaatttgatattctatacttatatatacctaatattttatttctaaactaatacatatcactattgaaaatataaaaaaaaaaacccctctcaaattttccatactttttt

SEQ ID NO: 308621 - DNA, 819 bp, Cannabis indica
ttaacccgctaacccgaccaaccgaaacccgccaacccgtgacccgccaacccgccaacccgtgccctattcgggtccgggttcggtttcaattttttgaacccgaaacccgccaacccgaaacccggtaaacccgcccgatgtaagaagtaaaagtctaaaactttatatcattagaccatctcctatatacatactctgtaaaaggcatggaattgttttgattgtgataaagtttctgaaaaaaaggggtaaatcggtaaagttagtaagttattttttcacacattttatattaattatttaaattaataaaataattttgtaataaattcaatttatttttttctcacatactagacaactaagaaaacatatatagtcaattaaaaaaagtttccaccaaattcagttgatataatttttgatttcatctacattttaaatttagtactattttcccaatattttgtattagataaaatgctagctattttttttaattattttttattttttggaaattttattttgaaaagaaaaatgaaagagtttatttctttgtgggggatactttcttcttttacccctatcaagtccaaattgtggctttggacttagcagcttgaaatgaaagcaaaaaccttccattttcctctagcccaaactgtggttttggaatcagaagcctaaaaataaaaacaaataaataaatttaataaaaaaaaaatcacataaagtactattttttttaaacttttacgttcatttttttttttttgtatttttatggtgttatataaaaataacattaaaaca

SEQ ID NO: 308622 - DNA, 3016 bp, Cannabis indica
aagtctggaagtaaagattctttgtttccaaccaatctctccaatacaaaaaagaatgtatatatatacatatcaatggcgtaacctctttaaaatcatataaacaaaaaaaaaggtaaacaatgtgcgttatactgtgtaaccttttggaaatcaaaaccttcattgatatatgattcgaccaaaaaacaatggaacaatcgtacaaaatgcttttaggtaagactatcaacaaccagagtctacaaagaaaaaaaaatatatcatataagaagataaaagacacatctcaggcccaggctgcaaagggaatatataatctgttaatctgataaaataaaaaatttacacttcaatgatcatgaccaattattatacaaactcttctaaacttttggggactgggaaaaaggggacagaatgagttcctataatcccaaagaataatactaagaaaaaaagggtaaattgactgtgctaccatggtttcaagtcaccaacaggtccagctgtccaattcaggactttctcacctggcttaaggaaaatgcttcggtcgtgcggcaactttcttgccagtccattcagaacttgatggaaggcatctcctgattgaacaggctgtgggaataacatagcttgtttcattgaagggttggcaagtaatctctgctttcttaagatcagatccagtgggattgaagtgagtatggtgtccaagttgggcacatctttctcatctacaaacacaccaatttcttcccagggaattgcatcagcaaagggcagaacaatatcgtcagctatgataacaggaatgcaaccgaaaatcacagcttcgaccaatcttggactccaaggagcccagccaagtgggcacaaacaaaagactgcccgttgcatatcttcataatatgtggttggatgttctgtagagatgtcaaaaagaggattatccttgaagttctcccatactgctgcccgcgcacctctaaaatgttacaaaatataggacttagtatatcattaaaaaattaatttcatctcaagaataattattcaggaaactgcggaagacataaaatcatttgcattgtaagtagcataagctttacatgggaactttgcaaccaaattttactctgatcctctctaacttatagcataaacataagttttacgtaaaattctcaacccgaatcgccctccactcctctctatctgatggttttaaaatttgttgcaagaattacctggcatagtacccgccttctggatcatttccaacatcatagaacaagcctcggaagtaaacaaaaatggacctaggagttttctcaggaatcaggtgggcttgcatcttctgaggtggtgcataaggaggaatagtaattgacccctctttcaagcaaacatgatttcgttgcccaaaagtttgaaccaaggtagcccgttgaagcaagggaagaattcctctttcaattgccttttcctcctgcaatagtatcaatgaataaacaacatcaatacaaaaactcctcatacatacaccaaactagaccaacctgaacattgcattgcacactttaacattccatcatacattgatccaacaatgcctgcagcgatcagaaagacacaaaaataatgaaagaatgatgctacttacttgataatggaagcatggtccaaaatcatgaggcactacaaaaaagtgatcagctccttcggtcctattccagtaaggccagtttgatgaaataagctgtatggcacttctcatcattcgtggcgacttaaaaggcaatgggaggccatttggtgttaggtcacaagtcgtgtacacaggggtataaaaccaatccgcttcttcaggatttagcgtacgaacaggactggataagagaaaccgatgcataaaaatttcagcagcaaacatgtgggtaaggcatcttggatctttctgcaaaatcttcttgttgtacttgctaggaagctcgtacacaaaaactttcaacctcccaactggattgtcttccaagacatcaccggcactacctacattaaagtaaccacaaacttaaaagtacttctagttgcaaattacctcgcagagttaacttgtttctaaaataaatataatccaacaactcaatagtgagaaaagggaaacaccagccgacagaagatgtagaaagaacaacaacatttaatatcttcctttggagacgtattaccaaaccataattgaacataataggaaagactacataaaactatttccattttaatgagcttcggagataaattcatatgtgctgtaaggaaaattgaaaaagcaaacgcaatataactaaatttaattgcacatagtttctatattgttctggcgaataactgttttattgtagtaattggtttttgattactaatctcaaattaaggtaggtaaacactagaaaataggtcatcagggacttagactgaaaccaatctttcaattaataatattagattggcatctctcattgtttcccaattacaattctttctataacggagtaataggcctcttatcctggttgttaaaatctacgagttagacaaatctatttatagaaaccccacataaggcataacaaaacaaatgaattattcacaagcttataatatcagtaaaaagtaagacatcggattttcaggaacaaatattataacccaaatggaacattttctactactcaaaacaattcaactaccgttacttgtttatctaggataactagtgtgactttttaagtgcatgaaaacaaagtaaaaagacaataattagagataaccgattgaatgtctttctttgtatctcaaaaccaaaacacaaatgtttgcttcagattttaatcaattaaactttcgatcttgaaagcagcagatccatgaaaataaatcctacgcatttcaactaaacaaactctcccaattcaaattctggaaccaaaaacagtaaggaaaattt

SEQ ID NO: 308623 - DNA, 1550 bp, Cannabis indica
tactgcttgacattgttttggccgactccgtttgaataaagcctatcttttttcaaaaataaataaataaataataacattatttaagaaaataaaaactaaattcttttacttcttctttttcaaacaatctaattattcaaaagaaaaaactaaagacatcaaattttttggcccttatttaaagaaggctattttagaatttttgtcccactccccgaactatgacatatacattattgcaccccctgaacttttcagcccattacaaatggtccctgaattatttacagtattgtaatttgcttttttgtcaagttttgtcacaagtgacaaacaaaatgatgatatatctgcttagtcaattgccatattagcaccacgtgtataatttaatattaaaaaaaataaaaattatacttttttaaaaaatcattaaactaaaatcaattaattattaagaaaattacgtaaaactaaactaaaaaaatcaaactaattacacatgtgacattgacatgacactggcgtgacaactgactaagcatctatatcattattttatttgccacgtgtgacaaaacttgacagaaggatcaatttacaatactgtgaatagttccgggggaaaaaaaaatcctaaatagccttttaaaaataggtgtaatttttaaaaatactaaaaaaaatatatgtatgtgtatatttttaaagacttttttttggcccctaggtcggtgggtcctaggcgtgggcctagcccaccttaggccaggatcgaccctacccatcactcatgactcctatcttctctcacaaactcaccatcatcatctcataactagaaactgataaaaaaaattccttctccaaattccctcacaaggtcaaaacatcatctatctttatctcttacaaaccatcatcaattctttcaaattccagaaacccacactcaaatttctttacttacgagtatctcttgaagccactaaactcacagatgggttttgatgacgtaagcttcctgagattcagagaaggttatagacgatgatcgtattcaaaaccgtggctctgatcggtaatgaccaaaaccaaccccagatctgacaatgggtccctctgattttgcaaggtggttgttcaagaaggttgtggtcgtcgatgatagaaaccatcaactagcctccaaatctcgactttctattgacggtgaaaactcatcaaccaaattacggccagaaaatgaaaactcaaacacaagacttagaatgaggatgaaaatataaagacttaaataaatgttacgagcaacaatgggggaatagaaatgcttgtatttcttagagtgaaatattacaatgattttccaacctactctcacatcagaggaaaggatatttataggatttaatggcatgagatacaagtgtggtcccaagggacaagatgacatcgaggagttgtaggtgtctaggagttgcaggttgtaggaggtagttgttggatatttattttaccaggattttagatctactcacaagtat

SEQ ID NO: 308624 - DNA, 845 bp, Cannabis indica
atgttttctattaatagtattcctacggacttgatgtctattcttgagagcgattgctcgatttaataaagaacacttctttacaaaaaaaaaaatatatctcattgattagtctttattaatcttcatgttttaactttaagtatttaaacaattccaacaatctcctacttagttaaataattatttctttttcatctttaaatacataatgtcgatgcataaaacaatatctcttatagttgaatattatcttataaaactttatcggtgctagtcggtattcctatggattgacctccaagttcttaatgataagactagtagtattgcattcaagtaaacattgtaatacctagtctaatattaataatttatgtgtgatgatattattatttgtgtgctaataattgtgtatgtatatatatgtgtttgtatttaattaggaacaaaaatgattatataagcttagaaaatatgttaattttaaatcttgtgttacattgatttatcgcagtagtacacctgaattatttatggtggctgaacatattatatattattatatacttttcaaacgtatgatatatatatatatactcttccattatgttatatataatatatattatatagtataattgtttgtataattaaacactaaatatatatattatatcatatgtatagttaccttaatagtataaagaggagataatttagagttacttaaattttaatttaagtaaatgttgtataaataataattaatatatgattaacattaatattattattattatgacaattagtaattttttttccctgaactttgacatgcacta

SEQ ID NO: 308625 - DNA, 2732 bp, Cannabis indica
tttttttttcttaataaaacttgtaaagtaccaaattaatgttatgataatgtaaattgtattattttctatataataataaaaaggataatccccttgtgcgagtcttgtacttgagggagacttttttttttttttttttgaaaaattaatgcataaatatattaaaacactaaataagttaaacctcgcggtaattacaaattaagttacttaaaatggaagatagatccaccataccaatcacattacagttgaaagttcattttgctacatcataagctgcatagttacaacttctagaaataaacaaaaaactacatctagtcaaaatgttcgagagctttttatattgaattacataattagtaatacccaataaagtggaggaaattcccttcagagtattgatcaccatcttagagtcgctctcaacgatcacaaaagaaagcttcccactagtcgctgattctggggccaacagacaagttacaacttctccaataagcagttagagaaattgaggatattgcttgctacccataaaattgattccttatgattcattgtcaaagccaccacacacattgagtcgctactaattttaacatcacagttgattttgacctaatcgtccaacaaaggagaccacatcgaagtcgtgcaaatcacctgtgagactttctaatcttatgtacattttttctttgaatgactttgtttaaaaatcacaataaaaaggataagtctcataattattaactcgttttttttttttacttttatttttttctttaagggatcgatcacttttagatataattcagtcttaagccgcttatatcaattaattaagaacaaaaacattaattcaaattccaaaaaaaaatcattacaaattaatgtagctgttatatttaattattattaaatattcattcatgcatgttgtagttatactacaattttttttttattttaagtttttttttttttgtaaagtttttcttttatttttattttaagttgaggaagttttctttgttttatttatttatttgttttttttttgttttggtttgataattaattatgggattaaaaccagaactgtgtcatgattcccaataagcttttcatgaaatcaggcgcattttcttgtgttgaagtcttgaagacacaccaactttacttaattattagaaaatatttaattctttaatatttttaattttttgtttaaattttgaaatgaacatttctttaatgtcaatccaaccattccctcctatcccatctatctttcttgacccacttcatctcccttctaggacatctttttcaatattttctatgatttttcattcatcactttcctttatgttttatttttattttatatatttaaattatattttgtaatttttatttttaaaagttacccatttagatttcttattttgttaaaaaatttaaactctatattttttaaaatggtacaaattaatgtcctaatgtgatttttgtcaaaataaatttaaataataataatctaatatatatattactaaactgattatatttttttttacatttgttcgtattaaaattggattcaaattaattatatttaaaaaaaattgataaaaattaaacttcatgtattattttgaactactttaaaaaaaaaataaaaaaaatgctcttattacatttaacaaggttcaatgggtgatttttgtaaaacataaaatcaaaaataatattttttccatttttatttaataataaaataactttaattttctctcttgatttatatatatataactaacatatacaatacataacaacacaacaagatcaataatattttgcacctccatgattattcctaattagattatatatatctatttcgtctatacccactacctatatacatatgtatatatatgcctttttgtcacaccaaaaaccactcataaccatatattcctaatcacaacccataagcatagtaccaatctattctcttcatacctattttcatttattttttaacaattttattttgtatttaatgcctttggaaggaaaatgatatactttgactaatgatccattcttaaacaatcaagttaattttatctctctatatataatgtgaaaaaattaattgttatagtgcaattttaagtgctagtagcataaggccgcctatgatctatatttgaaggtttcatgatttaattttttaatttttgcctaaactttcttctcaagaaaattgtttattttatagtggggccaataaaaataggaatataccatatgccaatattattattaatgtcattaatatttttataacatgtatataagaatattctaatgaaagattttaataatttttatctaattcattaatattacatgacctaactaataaaaattaatgggagattaagtgatgtgcacttaaaggacaactagctttgtgaactattacctaaaccataccaagcatcatccaactattatttaccatatcacattgtcatcttatactagtggatgaccactaaactccaactcaaatatttatccatttaccttttcaagattcattataaaaaatacaatatttatattattattaagataaataatctatcttattaaataataaattagattcctatattttttaaaaattatacaaaataata

SEQ ID NO: 308626 - DNA, 2115 bp, Cannabis indica
ccacagaatcgtggcagtaactacaactttcctttatagaaaaggaagtttagctccggttttctcttcaagaaacctgatcttaagaaaatgggaaactaaacacaagatcagaataacagctggttagcaaagaatcaatgtgtaaatcaaaaacttaccatatttacctcaatttccataaataggaaagctagtcaactttccttccaagtttagatatacacaaatagggaaaccatatcaatatatgccagccgaaatatacaaagaataataaaatatttttgtcaattaaatatgccaaaaatggaattaacagaactgaaataatataaactatcatcataccaagtcactagaattagattccaatacaagatttttctcgatctctttacatgtatataaaccaaagtgcatccaaatctaattaaaaggtaaactaacaatcacatgtttctatctctctttgcttgtattagtttttctttgttctaaaattatcatttatcatgctgtcattactttttttatatagttttagttgcttgaagtagacacaaacacattaaagaagagctgaaatgaaagagggcatttgtagtagtatatcccacctttttttagctttattaatcattatagttttatttatatatataagggattaattattatagtttatttgtatcttttttgggataagaatttatttgaatgtgtttttggagagatggatggaaattggaaaaggaaggagtgttgtaggcaagataacaaggagagctttcagtgtcctattatatgcaattatgcatgatttaagctctcatatttatggttatcttcaataaacgacattataacaaacaattatatacatatttgacacaagtgcctaaaaatgattttcatatatataattaattaattattacagtttacgaggatattaatcaaatatgttcttatcacaaatttcacaaaactttgaaaatggtgataatttgtggggaaaaaacgtaaaatgacaataaaatgtacatatatgtaaggctaggcgagtatagactttatagtaacagatcacgaaagaaaaaaattaaattagggcagcattataaaacaaagaaaaaacgacaatagttcagcaaaaaagactacaaaagtttaaaagagaaaaattgaaaaaacgacaatcaaacaaaaaaatataggatcagtcttgcaattatctcagaaatacttaataataactaaaatttacgtttttatggaattttgactttttttttatatatttttacatttttttttacagaccattatttttaagttgttttaaaaatgaccgttgttttcacactgcaaaaatataaataatgttgtaacaacataaaaataacgttgtttcttttttaaaaaataaaaatgtaaagaatatgtgattttaagtactttcaactttgtgtaaatttttgaataaaaaaaaaaaaaaaactttgtgtaaatttctcatcagtcttagcacaaaataaacgacattgggctgtaataagctgagtttacaaggtttagcccagttgcaatgctaattgggccttgaatctggggcatctttgaaaaccatcatgatttgattttgaacgtttcttctttcggaaacccccattatataagcaaattacacataaatataacatacttttatgtgataagtggaaccaatcttaaatatggatgattggttgtaattactctaatataagtgtggcttaatgtatttttggttttggtttacaaatagataattaattttctctatggtatgaaaaaaaattacagtttacgaaaatgttgttatatcccaattttcttttttcttttttttttttaaagaaaaaatactttcttttatatttttttagataaatgttccaaaattttaaagaactacactatatttttaagtttaattttgtctaaaaaaaattcttaatattaaagtggcatttggttagtggtaatgaaaaaaaaataaaaaaactggaaataattttcattctattcattgtttagttgtatattaaagtttttagaatatcattcact

SEQ ID NO: 308627 - DNA, 962 bp, Cannabis indica
ttttttttgttttaaaaaatttttatgttgaaagagttcaaacatccaattgcatatgcatgtactattttttttaaggagttgccaattaattattttaaatttaatttttggtgtaaattattcataatttaaaaaataattaagtaaaatgccaacctattatatatatataattatactctagataatcatattaaataattaattgagaaaagtgataccccaagaatacttattgtaatgcattgcttaattagtttggaggcctaactaccttggtaggcaatattattgctatcaatctaacttggccctcttttacctaaaaatctattaattgctactatatagatttatatatattggtgtgtaccgtgtacgtagcaatatatttaaattcacaaatataaaagaaaaatgactaagccaaaaaaataaattaggtggttatatatatagttagtgattatgtacagttttgccgaaaacgaaaggaaccctgcctaacgctgagttggctatagctgaagttatggggaattggatcaaaagatggtcgacatacggtggttcttgagagacaaattattaattagtggtgattaaaattattcgcagttatttagtgataattaaactctcattttagttaattggttgttaattaatgattgtagacaattaattatttgtatgaacgtacaaagtcttttcactgtattttctccaagtcaaatttttagggggagtggtataattcgtaatgagtttatgtctatattgaaaattgggagttgttttccattaaaaaaaattcttctctttttctcactttaatattttctcttgtttaataggaaatctattaccatatatatatatatactagaagaaagttacgtgcaaggcacgtatatttagttttatgttaagtgttctataatttaattgagaaagat

SEQ ID NO: 308628 - DNA, 2069 bp, Cannabis indica
ttacctataaaaaaaataaccaataacaattctcatttgaagtggatgaggaagtttgttgaataaaaataattgaaataatattttctcaaattattcagagacaaccgctgcaatcttattggctgtgaacttcttttaataaagaatgcaaatagaccaaattatttaaatttgacacaaatgagaaatgggcaaacctaagttttcaaatataattaaaaaatatatttctgttgggaagaaagaatatgtgtgacttttgtaaaagtaggccttcgtcactatttggatgtgataaatgtaacattttttttttgaataaaaatttcagtattaattttagatacattaattatcttacattacatttatggttctttttttcagtttgaaaacgaaatttcagattaatatctatgtcagttttaaaaacattttaaatgtttgttggttgatttttttttgagggagttgtttgttggtgatcaatcatcagatttttactaaacgatgatttttttatttttatattttctgaaaagggataatcattgaaacttcggcagcattaataattaataattaataataataataacaataatttaaaataaataatccaatatttattattattattatttgaatatgagcaagatatgagatttttgtgttgtggtctaattgataagccatccactcatcctctttctttcaaattctgagcccaaaacaccaaataaagttttttcaactcagttccgaacatatattcacgatcagcgtcgtttccacacataaagctaataaaggaaaccactttcactatgatcattgttccattaatttcttccactatcaaccttctcagaagaaaaaccaaaaacccaccttcaccatcctccttcatattcaaaacccattaaaagatatatttttttttttaataaatttttggtagtcatgttattcttttgaaaccaatcagaaaccaacaacaacgacgacgacccaactgggcatttcgcttattcgtgctatttggtcaactgggtcggtttccagatggattttcgggggcctagtgagacccgtttggtcggagactatataatgggtccgagaatcgggtctggttcattcgccgtggtttggaggtccaggcatcggcaatcgggtctcgaagttgcagttaaggagattgataagaaacaactgagtccaaaaatcagtgagagtttgctcaaagagatttctattctcagaacaattgatcacccgaatattattcgtcttttggaagccatcgaggtaaatcatacatgtgagtatctgctttttatggtttgtagtgatatatgtatgtatgtaatggtgttcgctatgtgttttgcagaccgatgaaaagatttaccttgttttggagtactgtgacggtggcgatctttctggttatatcaatcgccatgggagagtttcagaagctgtggctaggcactttatgagacaattgggtatgccgatatttgcccaacctttgtaaacttgttttttttcttaatgtggggattaaatttgtctttattattgtttttgattaattggttaactaaaaagaaaattaaagatacaaatttgtctcctttttcgtaatgctattttagctgatcaagctaatgtcgttactgcttagggaacaaagagtatttgctcaaccgaacttaaatttggatttttatgctttttttagttggctatttatatgcaattaatgatttacttattgggaataatctgttgtgtttaatattaatatcagtgaatgaataagttagtttactttccttaattggattgatgcatgtgatgactaagtagtaacggattatagtgtgcgcaatttggattttcctttgcagctgcaggactgcaagtgcttcaagaaaagcatctcattcacagggatttaaaaccacaggtatttttctttcttgccaagaagctggatttatatggttttgcaggctatttggatggttttttttttttttttttagttgttttgt

SEQ ID NO: 308629 - DNA, 2147 bp, Cannabis indica
atatgtagatttgtccccctctccaccaccctaaaaaatatatgtaataaataaataatctgaagccctacatatataaataaatatttcccaccttcatcttgtcaaatttttcccatctttactatggtaataattaatttttagtcaaataataatttataaccattattaaaatatgatatagtactagagtagattattgattatatatatgtttttattattgagtattgattatatatattcacttggtttttgttacaagagaggaatacatttttgttactttaaaataaaaacaatatatagaattaattaaataaaatggattagaaaatttcaaagtgtgtatttgattttctcgtaattattttacttgtcgtgcgctcatatgggccagctgatcatatcaatatatatgtacctacttaaaatttatattaataaagaaataatggaatataatatatataccaacaaacacttcaatttttatatatatataactagaaataatcacctattatctgtaatattaaaaaaaattaatccagcaaaaagaaaaagacaatttattttatatatcactgcaaaattctttatttttagtcacaataaaattttgtgactaaaaataaaaaaatcgtaattaattataaattagtattttttattttgactaaaagatctataactaaaagtattagtcaaaaattacaatttattatgactaaatatacttttagatacaatacttgttgtgactaaaagtaaattaatgataacttgtatctaaaaattatgttttagtcacaaaaaacttatgttgtggctaaaagtttatcattaaagtaactattttttgtagtgtatacacaacacataaacctaatatatatatactagaatattgttacgtaaatccacgtgtacttataatatttttaatttttatttatgtgtattttaaaattttatagattaaagaaaatcactttttaattttttataataaataaataaagtttattaaaaatttttttaaaaaaataaatataaaatttaaaaataataaaattgagcatactcttaatattaaaaatatcaataaaaaaaataataatgttacaaatagtatagtaatatttatatatatttaaattaatttaaaattggttataccaattataatctaaaacaaataatattattatttttatatatttataaaactaactctactaaaatcattaaattttataataaaatattttatattcttaaaatattttattaaatcaataaatttttttaaataataatattttatatttgtggattttcttatgtgcattaatgtattttgtttatatctctataactattaaattatgttgttaattatggagaactaactaagtatatatcaaactatagtatatatgaccatcaataaaatttaagtacataatagaaaacaaaatttactccctatatatatatcatgtatatttatatgaataaaattcaaagttgatataataatttcttattaccatcattgatatattgactgtatatatatatatgtggggcaaactgtttacaggacttagatgatcaaaggtaccaacttgaagaaatatgtaaattcaaatgattaaagttttgagatatttagaaagatataatatgaccatatatatgatcaaaaataatgaacagggaaagagtatatagtcccagaaattaacttgattgatgatcatgtgatcataataatataagatgatatatatttatatatatatatgtgagattgatgagtaggtgtgatggtcatattgaaattgtagtttgtcgttttgtgtatacaatgtccatttcagcaattggaaagagagatataatacaactttttataagcacatattggctggtcatgtctctctctatccatatatactatcatttatatatacatatatatggatatgattttgtcccgtctactttcacggaatgcattctgggatgtacggcagccgtcagatgaggaacttatttgatctgacgactgagattgatctaggggtaattagagttaaaaagtaaaacgtaaccctgacactcatttaatgtac

SEQ ID NO: 308630 - DNA, 1512 bp, Cannabis indica
aagtcttttgtttctaagtatctggttgtccctcaatgtttggtagatccaaaaagtcttcctttcattatcttcttcaaaaagctagttctaagcttcaggtgtggaacaataaatttttctcaaaagctggaaaggagactcttattaaagcggttatctaagcaattccttcttatgctatgtcttgctttagaacccctgtctccatttttcatgaccttgataaactcattgctcacttttggtggggatcaactggtaataaggctaagactcattggaaaagttggaattctctctgtgtgtctaagtttcatgggggtttaggatttcgaacttctgtctctcataatcaagctcttcttgctaaacaagcttggcgtattttcactaatcctaattcctttgtttccagaattttaaaggctaaatattttaagaacaatgatttcctttcggcttctaaaggtcatactccttcttactcttggaatagtatcttatggggtagggatcttcttactcggttcatttggaaaataggaaatggtaaatctgtttcaactcttcataattattggatccctggtttcaaaactattaggtttaaagacaatatgcatccacctgaaaacactgtctcctttttcataaatgagtttggatgttgggatcttcataagcctaacacttatttccctgatgacattgttcacaccattcttaccatccctattgacccttctcaagaagattctcttatttggggctaccattcttcgggtaatttaactgttaactcgacctatcacctagccattgctcgaacttcctccattacttctgctccttctacatctaatccagatttttttcacagatattggaaaactgtttggaatcttcagatccctcccaaaattaagcatttcatttggagggcttttcatcatgttctccctacttccttaaacttgtttaatagaaagatccttaactgtccaaattgctcgatatgttctaatgaagttgattctgtcactcatgctctcctaggatgttctagagctagcaaaatttggaaaaaaaaaacaagtctttcccagttttacagtgatcataagcttcaggacattaaagactttctttttgcaggctttgaacatttaactaaggagcaacgttgtttatgtttcagcattttatgggttgtttggaacaggagaaatcattccttgtttacttttaaggattttcctattgcagatgtggaaaaatgggtgcttgattatttgcaggaatatttgagaggtcaggagctttctaacattgcagatcatgcttctgttggaagttattttaccaggaacttagatctactcacaagtatgttgatttaacaacctaaatatgaacttccaaaacgatggaaaattaaacacataaaagtatcagaaatcttacattgggtgcagcggaatatatgtttcctcccactcagatctctaa

SEQ ID NO: 308631 - DNA, 2401 bp, Cannabis indica
aattaattcaatatctctttggggtagttgttaaatgacattgcaaatcaagccataaatatcacttacaaaaatttaaggatcaccaagttagaaagtgcaaagttttcaaatttaagcgagattattacaactccaaagagcatgaaaagtagtctccaactcacaagagcggatcagacacaaattatcattacggaggtcatgcttttagagattgatcatagtagggatccaatttgaagacaacctccacgcaaaacttttgaccttaggatgtaaatgaagactccagagtagatgccaccaagtagtatcattaaaggaggaatgcacaatggttttagtgacatgtcaaatggcaagctaataaccacttttaaccgaataaaaaccatgtctctcatactaccagacaagtttatcagccacattacccaaaggccaaggtatggagagaatggcaaaagcttcatcaaatgagaacaaccgtcgaataaggccagtgtcccatccatcatgcgagttgcccaaagaggacaccactgcctccattccaagggaagaaggcggaggagtgatgagcttcgagttcagcagtagccaatgatcattttaaactgagataaagttaccattacccacccttcaaataacacgaagttcaaataactccttgcctcataaaatatttttccaaacataagagcctctcttattgggagaaactttcccaaactcttttgttttggtagaaacctttaataacatagacggtcaaggaagtggaaaaatggtagagacaaccctcttgtttggaaaataagacttgattgaatatgtaaagattttgaaagcacataccttcatcatttttatgcttgtaaagatgattttaagtacacgaatgtattttctttctcacattagaatctccccactagaaccttgcacacattctatgaatgacatcgctgccttttttgctttgatatttgatttttttaattaattgtcggacacttgtgttaaattataagtaattatttggttaaatcatgggtgaacaaattataaataaatctaattatattgaattaatttaatttaattaactcaaaaaaagtattatattacactagatttgaataattaaattttaattagattagatagataaaagattatttttatataaaaaacaaattaaaaaccacctaattgtatataataattagaataagtagaattactcaattacattggataataatttttaagtctcaattacaaaaaatattgaactacatcgtatgtccactccctattaataaattacatgataaaatattatttaacccaatccaaatcatatgttacttcctattaacatgattcaaatataataattatggtgtcaaaagctactagtattggacaagaattatctttaaataaatacaatagtggtttaacatatatattttctttgtcacattaacttttcattaaaattaagggtagtttaataagaagtttttgaagctaaatcattgcttaagtatatttgaaggtaagttagaaacttagaatggtacccattagttattagatattaaactttatacatttttggattgagaaatgctaaaaggcatagtgctagcaactatattattgttggtgtacttatgtatcgagttttatataatttgcagtaataacttttagaaaatatcaccaaccaattgaaaagtgacatgtttaaaaggtactaagcaccactagtgcttaatagcaatacttttttgaatttgtctctgattatgtagttggacatctttttttttaaaaaaataattttggaaccatatattttgtaaaaatattataattagatttttgtacctaattcttacaaaaatatttatgaatatcatatttgtaactcaaatagagctggtgggcttcttagccatttatttttatttttttaattaaaattggctccaaaagcccacttttaacccctttttttctttcacaaaacaagcaatataaaagttaaaaaatttataacacaaggtcctaataaataattatgctaaacacaatatctaaaaaaaaaatgaaaactaaattttaagatattaatgtatactatatgaacactgttattaaataccaataatgtctagtattgctgtaaggtggtgtctagcaatatagttaacgataatttataataattattaaattaaattatgtgagacctaatacttaattctaccaataataatataatatatgagatagtacttgacattactaatgccttttaacatttcttatatcacatatatctttatatattaaaagtgcctatctaacggcatttctt

SEQ ID NO: 308632 - DNA, 1215 bp, Cannabis indica
taataatcttaaggcttttttacgcgtaggatgaagcatacgagtaagatattccatgatcaaaacaaacagtgaaagggatatagggtctccttggcgaagacctttaaccccttgaaaactcccttgcatgttccattcatcgtaagtgtataagaggaaccctgaagacaaaccataatctattgaataaatttggtaggaaatcgcaagctggttagaaaattctccaggaaatcccaatcaactgtatcataagctttgcttaagtctatcttcaaagcgcatctcagggaagtattcttcctgttattgatcagatcctgaaatataagaatgttatgagccaaggatcttcctttcacaaaggcaccttgattttgaccaaccaagaaaagtagcagttcaacaagtctgctactattcacttttgatatacacttgtaaagagtgttacagtaggaatttggtctataatcaaccactttattaggaaattcaactttaggcaccaaggctaaaactgtttcatttaattcttttgggatcctacccgaatgaaagaagtcgagaatagccttagagatttcatcccccaagtcatgccacatttccctgtagaactcagaaccatagccattaggcccagggcttttggagctaactatactaaacagagccttcttgacatccgttttgtaaaaatacctaataaaacttagttgcatctcaatgtgtaagcaaggaccaggctctatacactgagtattaatcggcattgaagcaaaacttgaacttcccatataactcctacaatgatgtagctagaaaatatttgataactttattataatcatcaatcaagcgaccttgttcatccttgtaagagacaattcgtttctcatctcttctccttttaatacaagcatggaaataggagttattatcatcacccttttgaaaccaagtgattttgctgcgttgcactaaaaagtttctatacattccaaaataaagatgatacctatttgcagcttgtttctcagcctcctgaaatttgagattcctagtataagcttgagctctaaaaagggcctgatgatactcatttttagcaagatggtaaccatgctcaacatcccatatttccttcctattaaaggaatttagtgttaggatttataaaacactcaagaaatatatatatcacagatc

SEQ ID NO: 308633 - DNA, 1467 bp, Cannabis indica
tatagttaaagaagtggctttctttgtccacttattcacattatatacttttgttgcattttgcacctaatgatgtaccattgtatacttggaacacttggaattggatagttggagtctgttatccaaatccatttacattttgcttctgattttggatagtttttcttttcactttagtttattattattgattgtttgcactgtgcctcattatttaaataagacttggcctaatacttaaggcaacaaacactaatccccgagtgattaaagatttaaaataaatttttatctactaacagctcacaaaccagaaccaggaggtttctcagttggataaaggtccataaattttgaaacttagaaaatttaaaaccacagcctgaccatgcatcagcacaataattgtaataagcattttggaatgtttatttttgccctatggcaccaaaacaagcacaatagttttattaatatatgaaagtatatgttaatatttacatcaaataatgatatgggtaaaaatgttgttacatatgaaattttgtgcaacataatgatactttgtataataaaatgaatcattctatctggttagaagataaacttttgatagataaatactgcttggacttatcacattgatacgtcattcagatatccttattcaatatttcccacttgttgaagtgtccttaaatttccaagtaacctagaagcttataactcctagatgtaaaattggattacaatgctcaactgctaccgcgctttgaagcttctgccttgcttgttgtcataaaggattctccacaaccacactgcccttttgagtttggattaataaaaatgaactcggatctgcatggaaacttataaccggttaattcaaagggaaataggacagaaaattcaagagcaagatatatattttaggaaagtattacaaaattgtataataataataaaaaaaaataaataaaaaaacctaccccaaaccaataagtatataacaaagtggatactatatgtttgtatgtacaatcctatgcttttgcttgttttcacaatcacgatcatcattattcaatctctaccagaatgaaaataatacataaatgcaaatatatataatttgtaccttagtttatcgtcaacaaaatccatttttgttccaacaacatgcatcagagccttaggttcaatcaatattttcacacctttatcttcaaccaactcatcaaatttccctttttcatctgtatcatataaaaatgaagggaaatcaaactagaaccgtaacgagaagtgcacttttttgctttaaaatgtatcacagaaacaaaaattctgaaagctaccattcaccaagagacaaaaaattctaaaagcaaaatgaataaaggataatactatccacacagaaacaaaattgaataacaaaaaacatatatatttaaaaaa

SEQ ID NO: 308634 - DNA, 2483 bp, Cannabis indica
ttttttttttttacatttttagtgtaataactttaatgatttaatgtcaaatataatacctaataaaaatattttgtttaaaagattttatattttttattatttacatttatagcaaataataattaatttataatataatcattatattgttaataattaatttatgattactttctaaataaattaaaagaatagttagaatgaaaatataaagttatggactaatttgatattgattcaaaatctagcactaatggtgtaaaatttagtgcatttagtatatgatatgtgtatctcctttgagtgaaaatgccacaccaatttaattaattgaatgatgcaccattggattggagatgttctaaggatgaaaaaaaataccacattgtaaaagaaattggttataataacactaacattataaaaattataatgaattatgtataataaatattaattaaaaaaataataaatattttcttaatataattgtctattatcattatttcaataattataaattataatctctcttctccacttactaagaatttgacaaactcaaattgtaagagaaaaagtttagacataaaaatcatggaatgcttctacattcttcgtgcttttcatatcctgaaactataacacagttaataaatgtaattgacatatatttattttactacatgtatataaatgtaattgacaatattttacatgtatatatatactttacattttaaaaattaaatatatatttttaatttttttattaaagaatacatatttttaaaattaaatttagaatttatattttattttttgctcatacaaaagtgtgtgtatgataagataatttaaaatgaatatgatatataatcttaaatagctaaatattagtaaatatgagattttattaatagttcgaaaaaatatttaaaataaataaaaatataatattcaaatataaaaagaaaaatttagataagttggtggatagtatgatgtaaaaatttaatgtaaaatggataatatagtattttaataatgtattttaaaagaataaaaaaaaaaaagtagtcgttatgagtgctctctcaaaaatgcaaaacattccaaaattttttttttcttttaattttatgatgcctttcctattaataaaaagataaatattaaaagatattaatggtgtttagtactgtgtcaatattgttattggtccaactaattatcgagtttcatataatttaatataataagttttagagagtatctttagcaaatcgcaagacgatatatacatttaaaggtgctaagagcatctccaatagtaacatcctttcacatcatctaaaaatataatattttattttatctctctttcacatcatttttagcacttttacttttaaagatatttcaatatatagtactctttaaaaatattataattataatctcactcattattatttaatatatatcctaatttttagctacaataattttttaatttctattttttattaaaaaaattgaatataacatgcaaatttctagaattaattttttttctctctaataatataatatctcaaccaaataatatatctagctcttcacttaagtaaagttttaccattaaagattattctaaaaaaaaaaaaaaagttacattaaagatgatctaaacaccacttttatctaataaaaagtgaaacactataacattaatgagtaatatctgtaaaagcactacaacattaattgtcgtcttgtttgttagatttctcatgcattatacctcgaacagaccaaaacgtcctatataatgtcagcatattaatccatatttaatagtacccgccgctaatatttttaattatttttaataaaaacttattattggcggaatccaccgtttatgtccactacttatcttattagcggcggaatccgccgctaattgtccgccgctaataattggggcgggaattttcccgctcattctgttttagttattatttgtaatattttatataaacccccttctcttatcagaccccattttattcctttattttttttgtttcctttcctctttcgcttcttcattttcttacgtcccggccgaccaccccttgctccgctacctccgtctccgcctgcaattcttgttcaagaggtatgtaatcagggccggccagagggtggggcggccggggcataccccaggccccactattttggaggccccccaaaaaattaaattgatatatatacacacaaaagagtatctatatcttttagttcaacaaatatctagagaaagctgtagcacaagtgggaagcaaggaagtataaatttgtagagattgctgaggtgctggttcgattcattgctgagtcgttttttggttattttaattttttttgtgttttacataatacatccatataagaacaaatacatagtg

SEQ ID NO: 308635 - DNA, 2044 bp, Cannabis indica
ctctctctctctctctcatttatatatgtttggacttaaaaatttgacctaataataaagtttattattaactgatcatgatcaactcattttcagatgagatttgctgtgaaaacagttgctagatatttcccaactgccatagtcagtggaagatgcagagacaaggtaaacaaaattcattcttttttaattattacttttttatatccaccataaatataatatgatgatcatgatgatacaaattatattaatgatgcaggtttatgactttgtgaaactacctgagctatactatgcaggcagccatggaatggacataaagggtcccacaaaaattaccaaacaaaaaaaggtgagctttattttttattttgtcttcttggtgatttgtttgtacttcggtactttattttttgttgaccttaacattaaaattttaatgtttattttatatttttaattgatactcagattaagaatgcagttatgtatcaacctgcggcagaattttcaccaatgattgatgaggtaattataattaattaattagtttataatttaattttctctcctatatatatatagacataaataattataaagatgtgcatgcatacaggtgtacactattttggtggaagaaacaaaatccatccctggagtcagagtggagcataacaagttctgcttatcagtacactttcgctgtgtggatgagaatgtaaaacaataatatcacaacttaattaacatgaattatactgctttggaccctttctttttcatcaactttatgagtataattttcttttgtgcggttaactttcagaattgggacgctttggctgatcaagttaaagtggttctcactgaatatccaaagctgaaattgactcaagggcgaaaggtaataatagtaataataaggaaaatatatttagagtattgttattaggtactctataaaaattaaagtgtcttatattatttattaaattaaaatgtgtataagtttataacaatttgttgtgccgtttttaaatattaaaaaggtactagagatcaggccaaccatcaaatgggataagggcaaagcccttgaattcttattggaatctttaggtatattttattataataaacctaatcctttctttttttaatatgtttatatatatatatatttatatctaataaccacttattatattttttttcaggatatcccaatgctaatcaagtgttgcccctatatattggagatgatcaaaccgatgaggatgcattcaaggtaatgataattattaattattaattaacaattatactaattaaatgaaaaagagtctaaaaatttattcttctatacattaaatataggttttgcgtgatagaggacaaggatttggaatccttgtttctaaatttccaaaggaaacaaatgccacatattctctgcaagaaccatctgaggtaataagattataattataataattatcaaaagtaatattactttttataaaataattattaatttgtatatattctaattaactgtaggttaaggactttttgagagagctggcaaagtggaaaagggtgtttatgcgaagagatggccgctagaggtgtatgtgtgagattgagagtactactactatatatatatatagctagctaattatatatgctaattaacaaagtgataattttgtcaagggtgtgtattgcaatttaatcaaacaatgtgtacttttaatctcttaattatctaatatattaataatatatatttatatgttaatggaaaagaaactcccaagaatttagaaattattgttgaattgaattattctctctgaataacggatgtgcctgcatggacattaatgttcgtaacaaataacaatatatattttttttttaatattttatatattatggttgtgtttgaatttgaaaagtaataaaaatggaagtgaatggaaagaaaataactagttattctaattttttatattaaagtatttgaatg

SEQ ID NO: 308636 - DNA, 1416 bp, Cannabis indica
aaaaaaaaaaaagagtaaccaaaaatcacaagtaaaccgctcgaatgataaataacaagaaaaactgtatccaaatcgcatgtttttgttacgtaaatgtttacaattaagagaacaatctaactgttaaagtaaacttagaactgaacatcataaagaggatcaaataatagtgttcattcatctttcaaccgcttaagaagcttagaagcccagcgtcgtactcgacgcttcagagtgtaacccacaactactccaacagtaaaacatatagcacaaagttttgagcatgtccacagtgacaccacccggctgcaatcaaaacattccacaatcgaaatttcaaccaaagaagaaaaaaactaataacaacaacaaccacaagcataataagaagtcaagtaaaaacgtgtgacaaaacttcaactttgctggataacaaaacatgtatcaccctgcaacacaaacttttttgcagtaaatttaaaacccaaaaaaattaaaaacaaaattatcggtaagaaggaacaaaatatgtcctccttaagtatgaaacgttgccaaagtacaaatataacaaataattcaatcattcacttcacggatgagaaagcaaatcattcaattaaacactagtcccagctattaataccttctattagtaatgtacttgaaaaattggaatatctaatatacaaaatgcaaacttgggttttcttttttctttttcaatgttaattatactgatcctgattctcctatacctatataatattcatttttggagtactggctctcccaatttgatctttataggaaatctattccaacctacatatcaatcatcagcaaattgtagacttttccttaaacctgtcctaacctaatgctagattgatccctacactgaagaataggaagaatagtaaagtgaaggggaaattcttaaaggcaatgggaattgagaattggaaacctggaagatctggtgaccagaacgcggggctggtctgaagaagataaggcggaagagagtccttcgctcaaacgagatgcttcaaatgatgaagacgaccccaaatttgagtctttggtaacattgcgaatcatcttctgtattccctccatagctacaactacaaaggtcacagcataactctccggtgactgacttagggctcagctaacaggggttttaggatccgaattggaatttagttgccctatgtccacttcgtcgtttctttaatgaaacagtacgtcgtttctatttatgaaaaataggattaaatttagagaaattctacaatgcacccccttaaaatggatatattgatgcactcttatttattttagcatctgaaataattttttagtcaaattttttttcatggtcatgtcgttatagttatttaa

SEQ ID NO: 308637 - DNA, 1564 bp, Cannabis indica
agagaggatgtttcaatcgataagccctgcatttgatgccacatatttatagaccactctaagcctctaaacctcaaaattttcaatgcccaactctacattctaaatctaaacttgtaataattaatcataacctgaaaacatcagctgaaacttgagaagtggaactcatttcaagtccaaaaattggatctttagccttcccaccagagccaccaacagggtgagctttcactattttgccttgcttgaaccattcatcagaagggctttgtccatccgaatattttcctgtcaaaagcttacattttttcacaaaaataaagcaaagggtcgatttttgtttgtatgagaagtgagtagaattgaagtacctccactgaaagagaaaccatcacctactgatacaggagcatctatcagataatcttgctgatcatctttgctatttgaagctctgcaactaaattttagagggtatttgatggtctttcgagatgttgacaagaaagctggaatgggagttggaagaagaagattgtagtgatgagaagaaggaatagtcattgccataactggacctggagaaaggaaaacaaagcaaagggtacaagaaaactgagccaaataggcaatttttaacttgtggctatttatacttgattaacagcttgtgggtcagctttcttagtgcctcggatagaaattttacggtccttaatccgcccccaccaaaaaaaaaaaaagaaccattttttttgtcttttacatgttcttctcctccactaaaatatgtatacaaacatttgtactgtaaaacataaagaagaaagggcttaaaaggttgttttatatttatttattatttatatttttttgcatgggattgtgaggccaaagttgatattgagtattgggtgttatatatatgttaaatataaataaaatataatattatatatatttttgaatgaatgatatatatatcttaggatgatatttaatgagataacttagataatgtgattaaaggcttcttcggcaactactctcatctcaggccgagcgtgcatctctgttcagccttaggttccggcttcttcgtttttgaatatatgctgatgagattgatttttatttgttgttagttttggttttctattttttttttaatttcacttttatttggtctgatttgttattcttttgtttttgaatgatgcagaatttttgtaaaaaaaatttatacggtgtctctatagttgttttcattgttctattttttagttgttttattgttattttataaaaagtcagtatttttataaaaaaattatttgacaataaaattataaatttttacttacaatctagtatttttataaacattccaaaataaaaaaaataattacatacggcactattttttgtaaaatatttacattattacgttcaaagaatgttttttatatttttacggttaataaaaaataacacgaaaagaacataaaatcaacaaaaaaactacataaaagtaacatcaaaataacatcaaaataacaac

SEQ ID NO: 308638 - DNA, 1580 bp, Cannabis indica
aaaaatcaggaatgctctctgcaagctttggacgtggcgacaataagtatggctgcgacaactgggttcaaaaaacctagaaatccaattttacaactctaaaaatacacaaacttaatccaaacttcacctaagtcatcaagttgatttacaagtctaacatagagcatgataggtatatttcccatcaaactatacatgcataaacacacataatcaatcaagctcaaatctctcataaatcactttatcaaagctttaaaaatcaatttcaaattcaaacattcaaagcttcaaaaacccaaaatcactcatttcagaattcatgctcaaaacaaagtcacaaagtgacctagatttcagattaaacaaaactcaataatactaaaacctcaagttatcttccaccaaattatcaccaaaatatctttaagaacatcacataagaattcatgcaaatctacaaaatcaaaaatgaaactcaaatctacaaatattcataaatgaatttacctttaatagcctttccaagaccgaccatagctgtaagatcaccattcttctcaacaagcacaaattctcctcaaagtacaaaataagttaaagaataataaagggaaagagagagaggccggtagaggaagtctaaaactagaaaataagtttttttgattatttacattttgcacaaataacataaacctcaattttgtaagattggtcaaatgaccattttgcctatagggcctaaattccacatataactcaattaaggactattaaatcatttcaattccatgtatacattcaaatattctcaaataaattatgtcatatcacaattacacaataaattagttttggactccgaacccagtttgagccaaaatacccgattatgattataccgtgctaacttatcaaaaatcacctccaataagacaatatgaacatattatataataatatagtccattagcacaatatacttcaaaattatgattttatccttttcgagtcaaaataacaaaaaaaaaatgcccctaactcataaacgatgtcttatatgcgaataaatctcaaataattttcacatagttaattatataataatataattactcaattaccattaatctattttaattagagtttctaatccatttattaatcctaggatattatagttctgttaccctcctgaacatttagcccgggaagaaggctgcaacaccagcgagccttcaaaaatcgatgcttggagcgttgagcacataagagctagagaaatcctttctcttagggacaatttcaaaaaaaaaatgtaattacataggtatggtacgatttcaactcgccccaaattcttacaagatccttgcatttttaaaatccctctataacatcttgaagtgggaatgtccaaccccactggaaatctaatactactattcaattaatgcttgtcctgcgaggaaccatggagcaggagacttttattatcttgggacccagacaaatgatcgtaagatcattgtgaggttacccaataaaaaggagtttaaggatgacttcttttg

SEQ ID NO: 308639 - DNA, 1395 bp, Cannabis indica
agtaatgcttgagcagtgcttgaagattgttgcttagatggtggcaagtcgaccgtagaagcaacatgtcttaagtttgggtaggaagaagttggagtaataatggtgctaccatcttgtacttttccttcttgataatcttttttttggtttgatgaaccaacaactggagtagtagaatcaaggagtaaaggtttattgagcaataaatcatcatgtggatgattagcagcatatcttggtgacattttgcttgttctcactccacacaaaaaccccattggaataggtggactcacacttgtataaaaatccattgactgcctgcatacatattttaccctcataatcagcttatatttaatgaaattttaaggtgactctttccagctaaaagaaaagaaaaatcccaataacaatataaaaagtaatagttcgattgttaatgtgtagttctctttttattgactgcctacatttatacatatttcaggctcaatttttccagtgcatatatatatacatatcactttatatgtagaacaaaagtcataaaggaaatcttgtaccctaataaaagaccaacgatctacaaaaacatctatactgaaaaaaaacaagcccaagatcgatgtgttgtcgttgagtgatacatatatatatgtatatatatatatatataagattagaaattaaaatttatagagaactaatgttatatgtatatacctatagctttgaggccgaggccgtaagtggagacgacattgttatcagttgtaatcaatatcatcatcgtcacaaaaaacaatggtagtcattataggcttctaaatcttgatagtctttatcgtcgtcctcctcctcgtccccctcataataatcatcatcgtaatcggaaacctgataatcatcattaccggaggcagccagatcatcaagctcgttgtgcttcatcatattgtgatgtcttcaacggatgagatcgagtataagaatatatatatttatatattatattatatcactctttgaatatctcaactttcacttcaagaaaaacacgtaatggagtatgtacaaagattttcatatatatcggcggctagggtttttttgctttctttaactgacgataatcacatgctctataccattttctttcagacgattcgttacgttttatatttcgtcaaaatttgaaaagaatattccatattcttctctttctttatttgtacatatgtatttgaaatgagttacgttgaataaattaaaaaaaacctggaaagcttatcggttatataaaagatacgtgactttctcaccttttttactttaaaaaaataaaataaaacaaaaaaaataaataaataacaaaaataactaaagttt

SEQ ID NO: 308640 - DNA, 2726 bp, Cannabis indica
atatatatatatatatatatatatatattagagagaagcacatataccccactaccttgaggttgtaacttagttatgtgacttgtgactttatcagctaaaatcaacattttcatatacctcacaaccattcaaaatagcaccccaaatgattatgtttggttgtactggcatttcctcaactagtctcattgcctcattcaaacggcctgctctgctcaaaagatcaaccaagcaaccatagtgctcttgagttggaacaatgccatgaacacttctcatttcattgaaatgtctctcaccttcgtcaaccagacctacatggctgcaagcaaacaaaacaccaatataagtaatctcgtcagcaactacattaccatcttcttgcatagttttgaaagttttaagagcttctatgccctttccatgcatggcaaagcctaggatcatactagtccatgccttcacatccttctactgcaaattattgaaaatcttccaagcagtatcaggatctccaactttcgtatacatgtaaaagcagtaccaatagcgaggacatcgatccatttggtctttgatatgtaagcatgaagactttgtcccaaaatcaaagcccccaaatgggcacatgcaccaaggacaccaagaaaggtagcttggtcaggaacaagctcagaaatttgcatactcaagaaaagatcaaggctatcctcagcctggccgtgctgattatatgcagcgaattccagataacaaatgcgattgtgaacccatttaccattctctagatccctacttcgagcacaagcaaccaaaacattcaccaatgtaatctcattaggctctacatctctatcttccatatctctgaaagcctttatagcctcaccaaatcgattgttgtttactaacccggaaatcaaactggtccaggccaccacgttccacttaggcaccatatcaaaggctttcaaaccagcttccatgtcagagcaaaaagcatacatatggagcaatgcagtagaagcatacacatctaactccaacccagttttgacaatgcgattgtgaacagatcttccacaaccatgatctctaattattgagcaagctttcaacacaaatggaaaagtaaaattgtctggcgaaatgcccatttccagcatatctttgtacatgatcaaaccctcaattggggtgttactaaaagagtaacctcgaatcattgaattccaaatgtagtgattaggatgagcaatttgattaaacactgaccttgcatagtggagacctccagttttgggagaaacgcagaagtctataatcctactcaatggaatcatgtttttgataactgataaagttatcgtcagcccatgtagctctttcagctcagccatggttttgcattttccaagagagaattttgtcatgggattttttcataattctctcttggataattctgctctgtaatagtctcaaaatggcgcaacaatcatctgtctaagctaattgaatctttatcatacctaacattgctagcgtgaaatgaagcaatgaatccatattagtacttaccgattctagtacttaaaattattcaaatttggttgatatactcttgaattgaagaattaatacagatgaagaaaattacataaaaaattggaatcatcatttcattcatggtgattgtgtattagtaggtatgaaaataaaacatctttgaaaaacacaatagcagcttttcctaaaatgctcttccggtttttcttcttcttctttttcctcctgttcttacattctctagcaatgaagatggagggcttatcttgccgacccatttttgcaactcttctctcctaaaagtcagacccaccaaaaaactccatagacaaaaacaccccaaaacccacccttgaattcctccattcttttcacaaaaatgaaccatagcaacacccaaaggaccaaaacccataccccaccaaaccgcattgctctcaatttccctcccaaacacaaaacccaatgcacaaataagcagaaacccgtacaaccatagctttctctttcgtttcttccgccacccatcaaaacctccccatccaaaacccctccagaaccctaaccctccacccccaccagtcccatttccgccggcgaattcttcaagaaccaaatccaagggttctggtaagatcttgaggttggaagcgatgacggccaataaattgagcatgaatcttgtcgttttttgggagccaattttccttctcctttttctagcacagaagaagttttggatctgtttttgaagtgaatgcgaaagggtaaggccaaaagtgggggttgttgatccaaatatggagatgtgaactgaaggcacatttgattgatcgatttgggtgaagcatagagagcgtggtgagaggaggattggggtttcgacattgagtgtctttatcatctcctcctcgtcctcctccgcttgatgcttgctggactttgctttcctctggaaacaataagaacaaaagtggccgtttgaaatttgttagtttgatttgtaatctcgctttgtcctgtgttgatgatgtcatacccgttagattaagatccaacggtctcatttagttctacaacttgatatcatttaaaagacattgctacccctgtgtacaataaacaaagggatttttacacttggtatctttttt

SEQ ID NO: 308641 - DNA, 1341 bp, Cannabis indica
gtataattatgtaaagttcccttaaaaaaatgtagatatgtatgtagacttgggcttagttaggactcgtttggtacgttgtattaagtcgtattgtattatattgtattatattcaattagattatatattatatttttatataatactatgttaaattttaatttatattaaaattttatatatttagatgtctataaaaattattaccacgtgtagttttacataaaaatattgcatacaatacaatacaatgtaatacggtgtaccaaacgagcccttattgggctattgagtgcatagggtccaatgggctaaaatccaattgtaaatggtgtgtacaaggacactattcatattatttagaaaaatgtaattatggtgaaataaatatcataaaaaatcgcttgtttatacttatcacttatagtggtactagacactttgttgcctcatgctcttttattatgatctccattttaatactatacaaggagtagacaacattcaaatcaattcaattacactgaaccaatccaaatcaatccaattataaaaaagttgaatatcttattacaattagatccaaatggatctaaatagttgaattccaattaattacattagttattgagttacactttcaaaatccaattaaaaatagatctataccaaatacatataatatatattaaaaaaatatattatagttattatatatacaataatataatatttaaattttatttttacttgttctttattattttttcatagaccctaattaaaaaaatccctaaaaaacaccctagaactcttgtatagtttagtttttatgtccttttaaatatttttgagttattattaaaaaagtgttagaatgaaaatccaatgtaaaatcgatccaattcaattactaattggattttaaaacctaataggattggaacaaataataatttttcaaattcaattattaattaaatttgatcatattaaaaggaaaaaaattgattgcatatgcccaaaacttggttacaaatatacttgtccacatataatgttttaactttgtcaaagctcagctattatatttttcttttatttcaaaataatagagctattcaatttggtgtagcacaaaaacaatgtcatatttagtaggattttggagctacattgtatttctttttattatcatttttcaagaaaaccactcataactaatacaaaagaaagttatacaagaatgataatatcatatatatatatatatatgggtatgctcttaatggatattaccatgtatgggtattttattcttgaccattggatcaaata

SEQ ID NO: 308642 - DNA, 1305 bp, Cannabis indica
tttaagggcccaaaatttaatccgtcttgggcccatatattttcagggccggccctgatgtacacatattattaatgtaactactaactatctagggtcacataacaaatttatatatgtcaaaatataaattactctagtaactatcacacataattgtaccaaaaactcatcataatattcttgtatacacacatgtctttgactaaacccttcattagtttaactacctctaaaattttcataagttattaatatatatcctcctaaaaagaagtgattaagggcaccaaagtcgttgatgaaacatattatacatttattgttattattttttgaataaatctcaaacatttattttggataagagtaatgtttcctacagatagagttgactgagctttctgttgctttaacttttttattttattttatatcaattaatgacgttatattttggatttaagttattaataatatacatgttaatacatacttacttatgtactattgtcttcttagagagatttctgatttttgaagatagggtttgttgttaattaggttttcgatgagatcattaggatgggtccacttaatattaatgtcttaattaatatattataatcttataataacttaaataatcacttgtggtacttttaagtcttgcttgagtgagttttgtattagtcatatgaaagaggttggaaaacactaaaacaatagatatatgcatttgatgagatgggtgactccaaaataatcatattttggataacatactgcaattgcttacttgacttggagagcaagtaagttacattgccttttatgagcataaaatcattaggagagaactcgttatgggagatgtcaaaaatattgttcatgtagatccattcccttaaagacaaaaattatagatattaattgattttgggctttggatcatgtatggttatttttctttgtacaagaaattttgatcgtttgatcgtttttctttttgttgttagcaattggttgtttgcgggtgttttatcttgtattggtttttggtataaataatatctacttacccaagataataaaagacattataagtattggttattaatatctcatactactattgatacaattgaatatcaaattctatatgatttaatataataacttttacaaaataccattaatcatttttaaggtcttacctcatagtggtgatgtaacgtttccacttcaagtctctattgggtcctttcacccacagaatgatggctcttatacacgagtacgtca

SEQ ID NO: 308643 - DNA, 1075 bp, Cannabis indica
acctaagtaagtctcttgtgttttcttgaatatcactactattgtaacagcggtgttttgagggtgatctttcaccacaaatcgttcagagctcagggtctagagttcaagaatcaccttcaaccaatcaagattcatcttcaatatttcaagaatcaaacttgaactttcaagaaccaaattcaagcaatcaagaacatggtttgaatggccacaacaagattgaggtggacaagttcactggttcaaatgatttcaacctacgattacacacgtttactccgttgttgttgtaaatgactcgcacttttaatttatgataacacagtatttttcctaaaaaaaactactctaagataatttacagataacatattctaacaatgatgatgaacgttcttcttatcagtatgaatcttcttcataaacaaaaaccatagattgctcctccactgccatagtactaataccatttggctttggacaatgattctatttctttctcacagcaacacagtcgagaaagagaaaagacaggtattattgctcaaacctagatgctctatccattaaactataaattgtctgtttcaaaataaaataattgacaagtcaatttttttttaagtactcgacctaaaatagtatcaaaggcaataagaatctttaaatttaattccatgttcatcttattaaaaaatttaacaaaaatgtatctactgaaagtgattcactctgtagtaattatataggtgttcctttttcattgtcaatctgatcattctgcctctgttctaaatttaacactttttttaattgctctttagaaattttattagaacttagaaattggtaacagccataattttttatgataataaaacattgaatttgaattgtgtgaaatgttagaacttaggaattatcaacaaccatttttctaattttttgctaattatgaatagttggatataagtaatgtaaacacaaaaggtatatgtgagaaaagtatctaataagtttgtattcgcaaaaagtatgcgatgtatatcttgtaaacatgtacaattgtatg

SEQ ID NO: 308644 - DNA, 1837 bp, Cannabis indica
ctctctctctctctctctcccagttctatctctctctttctatgatggactgtcgacaatggaggctagacgatgaagggcgccgctcgcaccgctagctcggatggacctcgcacaaccaccctatcaggtaatatctctctctctatttatttttctattttgatctctttctctttcgatctctctttttctcatttgatgttggttgaatttttagggttacggtggtgcggtcgccatgggtggtggtgtggtggtggcatgcgatgttggtggtgcggtggttgtggtgaagtggtggtggtgtggtgatttaaattgttgattttgggtttaaatggctgttcaaatctttgtatatgtggtggtgtgagatgtataatagtatggtggtggtggtggtggtgcgatggttctaatttttttttaaaaaaaaaatcttttacttcggttcataaccgatgcaaaaaactatcagcgtcagtgcacttgttttttgtttcagttatgaaccgaagtaaaacctttttttttttttgcttcggttcataattgaagcaaaaaaacatttagcgtcgattcacattgaagcaaaaaatcaatatttgtgtctacgacaataacgttggttacacaaactaaagcaaatcatttatgtgtcactttaaaaccgaagtaaaaggtcttttttgtagtggtgtttcttaaaaaatttgtagatctcattatgagatgtatgacaactcctagattttctttctgcattaatgatacttttcatggttatcttcagtctaaaagagggttaaagcaaggtgacccaatgtcctaactcttgtttgtcataggaaatacctgtcgagaattatgaagaaagtagctaaagaaaattttaagtttcatctgagatgcaagagtttaagtctcagtcacacctgtgttattagatgatctcctattattttgtaaatgatattacatctcggctaaccttttgctaaggggcttcaagttatttttgaattcttctggtcttctattaatcttgggaagtcaacggtttatggagcagatatggactctaattctttagatagaattgttgatatttctggtttgtaaaagagtttgttgcatttcaaaaaatcttggcatgaaaatatagtctaaaaatatgtctaaggaagattatgagtgcatggtagatagaatggttaatcggatccaaatttggagcagtagaaatttatcttatgctggaaggattattttgattaattcgattctcctcactataaattctaattggtcccaaatagctattgattctccccaaggaaataatttagaaaattaatcaaatttgtcgagcatacctttagaagggaagagactacaaaatggcatggggcatgtggcttggtctgagatttgtggtgataaaaaatatggaggcttaagattcaaagatgttgccttatgaaatttttgtgccataggcaagcatgtgtgggttatctctaagaagaatgacaatttatgggttaaatttaatctcactgtacataatgttagctgtgaagacatttctatttataaataaagattgaatattttcatacatgcttgattgttaaattattaatatttaatatgaataatttatatatataaatattggaaagtttattatttatacatgaggctatgacttgtattgtatgaagaattaagatcccttagccatgaataaaacagtcagcaacatattaaagtttagaaatttttaaacaatggttactagtgcagccgatgtctgttattcggtgcaagt

SEQ ID NO: 308645 - DNA, 1220 bp, Cannabis indica
ataatatattccaaagaatccaaacttaatattcctaatttacccttctatgcacccaaaacttaaattgctcacaacaacactataaatacacaaacaagcagagacactccaaaaacccaatttcacaatctaatcccaaaaaaaacacataacaaaatcaaacaaaatacaaaagaaaatcaatagagaaagagaaagttcaatcattttctctctattatattattttcttttgttttccatcatattttctatgcttccaatcactaaaatcttcactaaacccactattttcatagtagcttcactcttctctcctttacaattataaatgtcctttgctaatattacctcaaacccgagtgagtaaccgaaacccgacccggttcacttccaaacccgacccgaatcagaagaagtattgaagcttgttatttttttttttaggggtacaaaaaatggattccatcaatttctacaacatcaaagcagagaaagccaacgccatactaagatacaatcagctaaaaaagctagcgaacttgttcagattagtcgagatcgtcgtcgtcctcgtcctgatctcccggatttggttccaccacgttccggtagccgtgaaaaactccggcggatatctccgggaattctccggcatcctctcgagtcctcgcttcgttttcgtcgtcggaaatgttatagtgatcactcttttcgtcaagtccggcaagtattccggcgaagattccggcaggaaaaagatctcgccggagtacgatctttacgacgaattcgttaaaaaaagtagtgatcatcagaagattgttcatcagaacttattagtcagtagtactttaccaataaaatcttcagtacccgaaaatagtctttttgcgtcgatcaacacgtcagtcagtaaaaataataataataataataataataagaattttgagaggagtaattcagagattgtggtccgatcaccaaagaagactaataatagtgagctgaagagatctgagacagagaattttgggaagaagatgaagatcaagaatgatgaaaatggtaaattagggttattgtatcctgaagataagatgagtagtgaagagtttaaactcaaagttgaatcttttattgctcgtcaacagaggttcagaatgaaagaagtttattctggtggtgattttctgtaagaatgatatatatat

SEQ ID NO: 308646 - DNA, 682 bp, Cannabis indica
acgtcatctaggattagaatgggaggttccattcagacacgtgcaagataatttagacacctatacatagagggagtatgtttcattttcatcattccaccaacgatttcggtcggtacaatagaaatcttaagagacttgtcaaatttagtagttctaagcgtagcattatcccctactgagggtggataatttatggttatgcgagacatacctcctgtagaggtgttggctctcaagccccaatgtttggaatctatgttgggggtagcatgacccgaaaggtttattttcttcctttcctttgtaacggtcgcccgtgatgctgcataacataacctattctcattaacctttccatgaagtcacttacgaagggtattgcttcttcgctccatgtttgcaatatgatctgcgcaaacatcttccttctccctacaaaataaataataattttatgctctcataaaataatatttcttttattacacttttgtttatcaactagatatacagaatttggatttgtttagttaaattaattacatgtatattcacataattataagtttaataagaatatataaataaaatcataattatagtaacgatatgataataaaatataattgtgattatatatttaaataaattattcttaatcagtgcacaagatttatat

SEQ ID NO: 308647 - DNA, 2405 bp, Cannabis indica
tttctttctttctttctctaaacagagtagaaaacccagttattttttgactatgaagattgaaactttattacagatttgtaactaaaaaccattttaaaaaatacccttttgataattttggtattttgtagcttaaaaaacaagaaaactcaacaaagttaataaatgcagtaaaaaccaaaacagagaaactaaaagagatagcatttgcagcattgagaatcagaggagaagaagtacttacaggaatgaaaatgagcatatgagattgaatttttttggatgtgaagaagagtgatatccaatcaaatcaaaagaatgataaaagattgagtcttttataatctttttctttctttcttcttctgttgttgttgcagaaatatatatatatatatatagccttgaggagagaaagcacaaacctttgtaattgtttttcctagtaaaagaaaaaaagacctgtcttttcttttcatttataactaatcttttacattttagtttatatttattaataattaggcttattattattattattattattattattattattattatattcaaacacagaaagtaaggaagaatagaaaagttgggaaagggccaaatttgaaaaaagttatgaaaacaaacaacaaaaaacaaaggtgggacagggcaaggcagtcattttgattggattgcagagtgtttaatttttaagtgtttttaatcctaactggttggttcttactaataaatcttcatatcttaactaattttgtaaacttaattaagatttttgttttctaaatttcaacacgtgaacattttaagctatgaattatttttcttgaaatattaaaaaagttagatttaagaatttctgtctaattattaatagatgtttacgtgaattaaaattcaggaacacaatttagtatatagacattcgtcgaatgaaattaaataaaaaaatttacatttaataatctcactagtttaaaaaacaatggtgaaactagcaataaatattagtgggggcaaaaaaaaattctacaaaagtagtctattaataaacaaattattatttttataagtaaaaaaatataaacttttttaggacataaataaataggtgcaaataaaaatgaattttttttttcatagaataaatataaaattatgtgaaataaaactagaaagagaaatattaaaaagtactactagtgtctagcactttcctcgatgttatactattattagtgtaattaaatatcaaatctcatgtaacatttaaaaatattttttagggaatattactaatcaattgtagggtgtaatatataaaaagtgttatccaataataatattcaactaaaaaattacaaatttacaggaataaaaatgtaaaaaaaaaatattttgtaaggaaatatgaaatatatataaaaaaataatttattaaaagttgagtaaagtcgtaggcccctacatgactctacactctctttgtctttgtctctaattcgaaagaatttttaacggattaaaaatttgaaatacaattcagtacattttaaaattaaaagattgagaattataattagccttttattctaactaaattaagaatgagaaagtatataaaacttgttgagataatataactattataaatgactaatgaggtgagctgtattcctcagtttatatgcttggaaaagtagtggtctttagtctttacttatataaaaatatatcttttataagagatatttttctcaagtttggtatcatggaaacatgcacttactactacttctacataatattagatttaatgataattaagagtttatctctacattctcattctctaataatgataagaatttttgttaggttagcttactaaaacaaaaaaaaaaaatgatcttaattagatgattagattcaaaagcattaatagagagcacttgtttataaataataaagttaaaagtggtcaaatctgttaggaataggatgagattgtaatagtagcatttgttgtactatgtgatgtaccttcatttacaactacaattgagaattgaggacatgataccgggaccacataaaagtatatagatataattaatatcattaaattaacatatatataattttgacttaaatagtaaaaaaattcaaaatctcatcttgtaaatactcattattacactataaaaaactcctacttttacttttagtgataattttttagtcacaacataaattttttgtgactaaatgtgacttttggtcacaataaaaccttacttgtgattaaaacatattatttaactacaagttgtgactaatttagttttagtcacaattattgtgactaaaaacacatttagtcacaa

SEQ ID NO: 308648 - DNA, 2100 bp, Cannabis indica
aggctcctcgatatgtgatactagatgggaagctttatcatagggggttatctttgttatacctgaggtgcgtggctgggattgagataagttccatcatacatgagattcatggaagcttctatgaagatcatacttctagacaaagcctatctaaaaagatccttcgtcagggatatttatggcccataatgaagcaggattgcctataatatgtctggaagtgtgagcaatgtcagagatactctaagtatctacgagcaacaccaatgaaaatcacactcacgaacaatccatggccctccaccatttggggaatcgatttagtgagatcccttcccattggaaaaggatgagtcaagtacgctatagtcgttgtcgactaattcaccaaatgggcagaagtgaagcccatgatacaaccacctccatgaaggccatagactttgtcataaaaaatatagtatgccactttggacttgcacacaagattgtctcagataatggaaatcaatttaatagcgatcttttcacaaatttttttaataaacattgaattgtgaaaagcttcttagctgtgggtagagcgcaagaaaatggacaagttgaagccatgaataagatcctggagacaatgttaaagaagaaactccaagcttgtaatggtcggaggaacttctgcgagtcctatgggcatactaaatgatggaaataacttcaacagggcatataatattcaattacttatggatgtgaaacggtcatcctagtggaaacaatagtcccttctcatagacaagacacttatgacccaacctaaaatcattcttttctctaggaatcattagatttattggaagagctccaagaacagtcacaagttcaactcaagatgtaccagggaaagatagccaggcattttgattctaaagacaaaagtcatacatttgacgtaggagatctcgtgttgtgaagagtcttcctagcttcgcaagaactgaaagtgggggtcttaggacctaactgagaaggattctatgagatacatcataaagtaggaaatggaacatttcaactcttgataatagagggatggaaaatccctcatgcttggaatacagaccaattatgtcactattacaaataggctgcggttatctgggtttaacatcccttacagttgtttgtatttctttgtaaactttctctcttaatgtcaaccatcgagtataatgaaatgaaaatagaagaaattttcataagaattcacatgttttttttctcgcacatgctatgttttaaataggtgaccatgagtttggagacgtccaaatttcctagatcacttaggggtagtatacctatttatgcgcccacaaaaacatacatagagacctacatatttcttcttgtttatcctttattttcatctaattttgtaattgtactttaccttgaaaattttcaactttcgtactacttgtcagaaatgtcgcttagatttcgatacgtctttaaccatctttcctaaaagggggtattgcatgtccaacttggttgtcacgaaaggcacatctaatgtatttttagcactgtccctaaaaagggaatattgtttgaatactattgcagtgacccttgtctgattgaccacgttgacagatttcttacgagaagtgttttaaagaagcacacctcggagccatcgcattcccagcaactctcttaacacatgtatccgaaaagcctttctaattctaagccagctttgttactttggaccgaggaaggattatctaagtgttagcataaacctagccttgtctcctcaaaaggaacctcgtcgggattttattacacccttagttcccttccttaattaatgtaaatgacataaaattgctatagtaatctgcctaaggtaattaatttggaaaaatgtagcaaaaatgtaagctccacgactcctatagcgatccaagaacaaagtttacaattcctccgcatgaggttgattttccgaatgtttcaggaatgccacaatgagaactttgaaaaaagttgacacctaaagaatgtgttgttggaattattttacca

SEQ ID NO: 308649 - DNA, 1578 bp, Cannabis indica
aataaaatatattaaaaaatataatatttaaatgatatagagaaaaaatagagaagttgatatataatataatgtaaaaatttgaggtcaaatagataaagtagagttttagtgatgtattttaaagaatagaatagagaagctgttgggagtgctcttacacgaagtcaaaaattttcgtaatgtataagggtaattatacattgttaattataacttcctattactattttgtagtcaatttttacattcgaaatcacatgtcagattttaattttttttttcatagcggtatttgatataattaaagtattattcttgtaaatttttggaaaattttaaatagtttacaatgtcaaaaatagagttccttatattttagtttacaccagcatccacgttgattgaactgttgacaattgcacaatcaacgtgaatgttagtgttcggtgtatattagagggttctggggtgggtattctggtgtgaaatgataggggtaatgttgagtttgcttctagtcggtggtgttcgatgaagagctctccattagtggctgaactgtgtgcaattcgggatggcattaaggtgggattacagaggaacctgcatgcgtttggagtggaatctgactgtagagaggtggtgcaactggtgctgaacaaagatcaaagttgtcatgaaactgatggtttgttgttcagattcgacggttgttgatgaattttgcggtcacgggactctcttttgtgtatcgggaagctaatagagcggcccatttgttaaccaattatgctttagattgtaaaacgagtgctatgtggattggggtggtaccctcttgtgctaatcatgatattatttgccaaattcttgtaatgtttgatttgtattaatgcatccagtttaaaataaagtacttcttaaaaaaaaataaataaataaaacttaagtcactgtgtataagtatactttctcggccaaaaagaaatgggagattttatttgcatcctaaaaatttataaatacccttatttcaataatttttattttacataaaatatgaaaatttagttcctcattaaagttatgtttcttcattttttttttaattgcttagaaaatttatttacaaaaaaacctatctattcattaaatatataatacgatataccatagaaactaataaatcctaatcaattaatttagttctcataattatccaaaaaagaagaccaaaattattacaaaaatatagtaattttaacacggatttaaagtttttttatcttttataaaattatgaacggtttatttttaagctatttacactttttttttaatgttaatgctacatttacattatgttgtttttatattgttttttataaaaatataaataaaaaacagttttttacacttcaaaatagtttttttttttacatttttacggaattagacataaaaacccctagtgcaactagcgctgcaaccactttagaaactcaaaccgtaaatttaaaaaaaaaaaaaaagtaaaaaaaaaaaaatataaagagtaattcccctaaaaaaata

SEQ ID NO: 308650 - DNA, 1110 bp, Cannabis indica
caatattaaaaaaattctttgttttgtatatgctcaaacataaagtacttgaagtagacttaggcatgctgagaatttgtactggattaaaatcctactattatgttatgcagtgtttacaaattggtggtcggagatgaatttgcttttgaggaatgcttctcttgaagttcacaatcattcattagagattgatacaatcattcattagagattgattggtattcatagacttggttgaaggattgcgagaatgttggggttgaaaaaaatagttattttgaatgcttgatattttccttgaaatgttgcaatctataatttgaaaattttgaaattagtcaattgtcaagattaggtagtcatgtaacatatctataataaattcatggttgcttaggtgaatccattgacagttgtttgggttgaactttattaatgtgtgaaatacctttcttccatcacacttataatgcttgactgttccatatttttaatttttgagttgcacaaagcgggttttgcatgattttagctgttttagaccaccacctgcatagagagattggagggatcttgattaagaaattataataaaggaagtttgacaaattacagaaggatgataaaataagaaaacacagtaaattagagcacttgatgtaagatgcgagagcttatttatggtctgaaactaacaagtaggtcttcaaagcttataacagcattgagtgacccgaagaagcccagtgtattggaatgcatcttaaaatgctagtgttttaaaaggattgcaaatttcatggagtggatattatagatgcatatgtattgtcaggataaagttgttagtttatatatgttttaatcccatgattaagactagctatatgttcggttatttaataactaactgtaacgtccccgcttcaagcctccattgggtccttacacccacggactaatggctcttatacacgagtacggcactctggctgcttcatggactgatgactgaccctacagaccaacacgagtgttttcagcgtgctttgtcctcactcacacgcatcctgggaaaacttcccaggaggtcacccatccttgaaa

SEQ ID NO: 308651 - DNA, 1587 bp, Cannabis indica
ggatcgtatatttaagaaaggggtttgttttttctttttttttttttttgtgggtgctattttagtagattagttggagattttctcattaaaagagaatataaaaagaataaatcaaatacacaaaaatacatcaagattgtaaaataattagagaagaagaaaaaaacacacaatacacttgatcaagactcaatgacttttgtcctaaaaatcattttctccctcacatgaagacctaaggaaaccctaaaaatgcttctaaggaattttcaagccctatatgctatgctgaacttagcttctacaaatgatgatattctcacagggttttaattaaacacaccaagtgattttaattatgtctcataagtgtacaaatggtcaatgtttatagatttttcactcccatacaaacataaatgactaccataaaacttttggttgttaccaatcataaaatgggtgttcatggtattaattgagtgatttgaagattttttgagctaagctcccaaatgttcaaaaatgcatacaattaatatgtttaagaaatagtagttggttactatagtaactagttactaattttttcagctttaatcaattcttcttctaagtattctaaattattgctacttgattttgaattgtttatacactttatcaaatgatggaatataagtctccaacaattatatttttaatagctatcattcattcacatttataaacaattagtaacttcttttactaatttaaaattgagaatgtgaaaaggagaattgaacaattttatgatcatcatttttcaaaaatttatagctcacttttgatgaatatattaaaatagtgtaatctctttactatttgacaaacacataatcttgccacacttaatctttttttgtgacattgctgtcactaaattatatgtagtgattctctatttttctagtaatatgacagtatttttcaattaactacatctgattaagacataattattatcttttttaaaaataatattattacatgtaggtagttttttagtgcatattttgtatgtaaagatcattattctttatgtacatgtagtatgatttttcttttcttttcattgtttgacatattattattattaagtgtagtttaagaatgcatatcatcataattcataagattatgttctaatatcttatctctaattttaatttcttactcatttttatgtagcacatcctcttactttttgttgtttcattttctttccaaatgagtggttgagtgacatttgtgaccttttttttctttgtggggacaaaataggtacaaagagctaggatgaaggagaagcttccaatgttattttctcttgttgtttgacaaaaataagaaagctaagactaatttccatttctttttctttatataagaatccaatgcaacgaacctttcttttataagtgctatttgaaaaaggttaattcggattgttacccccgaactttgacatatactaaatcatgttttctgacttttaaggtcgttaaaaataaccctttgtaactatgtagatgttgtatt

SEQ ID NO: 308652 - DNA, 1714 bp, Cannabis indica
tgtgttgtaatcttctcttctacctttcatatatatatatatgtaatatatatagtgtatatatatgtattgtaacatatatttaatcaatctcttattttagtccttgtattattttacaatagagttgtaataaatcttgattttcttccattgttataaaatctctaagagtcttgcatatcatcatactaatatactaatgttacattaattctacattaataaattatttacattaatgagtattatataaataaatggcatatttataataaattttataattcaaggagaatttttacaataataaaagccaaactataaaaatagtcctaggttgggaggataaatttattaatttttcttttatattgagtaatgttatttctacatataaattaaacacaaatataacacttataagataacaataaattgtactgatttatgataaatctcactaaaaataatttatcacgtaagcatatatttttttcttgaacaatcacgtaagtatatattgattttcacatcaattaaatatatattaaatttgtgtgtaatttaagagaaaattacttagtattatatatacttagacacgagcgtaaacgtgttgaaagaacccctctcctggcccgcttccgaatcttcgacccaaaagaaaaagaaaaaaatactacacctttcaccggtcccctcctacctacataacttaatatataagttttatttattggctctcatctctattgtttaactattttactttataaaataaatagtgtattttcaaaactagtgttgtatgtatggtcgaaaagtacagcagtggcacctaaagaaacagaggaatttgtttcgtctgatagtgcatgcgcgtgtcagtgattttcaatcattttaattaattaatcctccttaattaatcttcccttaattaatcttttgtggttcacagttcacacttataaaaagcccccaccccactcttcaatccctgcccaacacaacacacttttctcttcctttcctatattcttctgtttctctgtttttctttcttcttattctcaagaaaacaaagcactactaaaacccaagtcaattaaattggttttattgcaatatctgaatcaacaactaataatatttacggtgtgtgtgcgtatgccacaattaccttatcttttaagtttatgtgcttgttctatatttcttaatatataacaatataatgtttatatattttgtgttgtttgctatattcaggggattatcttcatatatatatttatggctaaccaaaatgtggcttcgtcgtctgagatgaaattaggaaatgggtgtgtcaccatttccatgaacaagcttcagcgacttaatgaaattcataatattggtggtggtggtggtggtgatggtgatgggaggactggtacaggaactagaatgagttcttgggttgagtccatgagagcctcttctcctccacgtagtaataacaaaacaattactactgctgctactaataataataatcctgcttctgtctcacaaacacaaaatcacaaccaaaactcttggatagtaagtaataacttatattaatagtatatgatttttgtttgtggtgatgttttatataatcattttaaacatttttgttaatatatatataatattattgtttgtaggctagtcactcttc

SEQ ID NO: 308653 - DNA, 1967 bp, Cannabis indica
tttatttatttatttttaggttaggggtaaaaaaataaataaaatagatacctaggggcaatttggtaattaaatactgagacagatcacgtggtggggtcgaagaagttaaagaatccaaagatcgcacgtgacagtgaaattaataacaattatagtaacaatccaataatcatgattattaatttattattattattattatggtcattgtctattataatttggttggacccactctcttaaccagagcgtgtattacacttttctctttttgtacggttttgtgtactttattaatctccttcttttaagcgcgtgagaataaagagtggggatttgagctttggttctacttcgaataactgaattattagagtctatgcttgcttatggtgtactgtgctgtacttgatagcttccacgcctttgcataggaaactgtttcagtggagttttgattctctgcggcacagaccacgtgcttgtgttttggatttccactcattgctttccatgtatgcaaagtgcaataattagtttttgtattgttttttttaaaggaaaatttttacatatttatggtaaggtcaatttgcatggttataaataatgtgtttttaactatttttatgaaagaattaattggtttttttttaaatgaataaattaggttttatattgctttgaaaggaaaataggtaagtagtagtaactattgggaatatatttggataagggaataaaatagtttgagccaaaaggtgaagtttgtaataattgagaaataaataagaaaattttagccaaaataaataaataaataagattattattattattataattatttcttatcatttttagtatcttgcaccaaaagaattaattctccacatgaaagttcataaattcagaagaataaaattattaaagtgattcgaaatacaacaactatttatttaaaaaaaaaaaatacaactaatttaagtaaaagtttctaaaaatttattcggaaaacatagttttaagtttttcttttatttataaaaacacaaagttttatatccatatacataaacacaatagtgaaaatgaaacacatagtaataataaataaaatcattgaaattatttatacattgtattttctattagaataagtcactaaaaatacaatataaagatgaatagagtaatatattaaataaaacttaataaatgttaatactttatagaaaacccaaaatacttaatatcctttttttaaaaaaatattaaccttaattttgaaataagtaaaacatttttatttgaaatacttaaataatggcattagtgttagtgtatatacatgtttctgtagacaacaaatactattgctttttccacttatattttaatacaaaacccatatgaataaaggctcttatacaatatgaataaataaacaaaaaaaaagctataaaagcccaaacttcaaaggaaaaatgatagggatgataattaaaataataataataagtgggtcaagcttaattattagctaagaagaagggattttaggtttgaccaacatttacaccacaaccaaacaaaacatgtattgaaaaagtagattatataattatagtacaaatatacaataatgtttttaataaaaacataaagaagagggatttggttttgggacctacttaactttaaaaggaccagaattcaagtaaaggcagtaaagagccaactgtaatgaaaagtagtataatatcaaataggggtgttcattcgatccaatccgcacatttttggtcaaacaacatccaatccgcactaagtgcggattttatattttggatccaatccgatccgcataagagtttaaatccaatccaatccaatccgcaatagtacagattggatcggttattttggatcggttacttttttaataataaattatttaatat

SEQ ID NO: 308654 - DNA, 2428 bp, Cannabis indica
tttcggatattaaaacaaataggagtgcatcaatatatctattttaagggagtgcattgtaaaattttcttttatttatttataatataaatatatagatatagatatagatattgatgtgataatgttaattaattatgattctaaaattttgatttatataataatacctactatcagcgaacggtattttgatgtaattggccataattttagtctttttcttttttgtcgtcgtttttattggctttaattatttggtgccgttttgtttgtcttttggtgtgtattaaatatttaaattatgtataaaatcacataagttatatcattatataataatattaagttttagttattaatatcaaaaaataatattaagttttataatttaatttaataaataatatattttgttaaaagaaattaataagtatatgagaggtattatatatgatactttttttgagatagtaccgacactaactaaaatgacgaataccaacacatatatgagaggtattatactggacttgtccgtgtattgtttaaaattatatatatttctataattaccttaacatgtttcagtttcatgtacttacgtaggtttgcttcatataaatgaaatatttatatgtatgtacgtaggtaggtagattcatgagcatgctgaaactaattgaaataacgatatatgtatagtattttggatatagatattagatattggatatatatattttgaaaatgatatattttttttaacaatgaataattttattaaaaaataaaattataatggcatataaattttaaatcttaagaaatccggataaaaaaatcttatcaaaccatactagttctctatccacttaaaaaaaatatatgcgaactaatccatgtgctttgcctattaggtgtccgaggaataaaatgatattggatactttcaattgagtacattaaaaaaaataggtctcccatattaatttaaaaaaatataaacaaaaatataataacaaaagtgtccccaagcccatgaaataattttcagaatcaacatttcatgggtcacgacgaggggttgagtccacactccgcatgttgtgggtctaaccgttacgggtccaacttggtgttcttttcctcttattcaatatcaacttgtaaatattttttttttttgaatataataaaacttgtaaatactttcaaagataaaaacatctaatctcaagtggttaacaccaattccatttcaaaataaaataaaaaaaagtggttaaaccaatgtcaaagcataaatttcgcaactttgtttttcagatcattttatatttgtttgtttatatatatttaaataaaacacacgtcattgtctctttctttgtttaattagaaaataatttaggatcctgaattccaatgaatttttattactaaaaaaacaactatttttagttataatattttaaatttaattttgaatttttttatcatgcaccccttaaaatagatataccaatatatttttatctattttagtattcaaagtttaacacgtcgaaaactatattcaaataatgtgttgcacgcgtaattattttattttatacgtgtgtaaatagactgtttgaacattattttttatattgtaaattattctgaatttttaaaattttgtaggatatcttaaatagttataaagtacatgaatataaaaaaaaatagactaattttttttttggaatgccgaaataagtagagagtgcatcaatacgcccttttaaagggatgcgttgtagaattaccctttaatttttagtcacaacaaaaattaaattgtgactaaaatatagtaattaaatacaaattgtcactaatttagttttagccaacataaattgactaaaaatatatttagtcacaataaattataatttttgtgactgatacttcagctacgggccttttagtcataatataaaaatgatagtttataattagtcacaatttttttacttttaattataaattttgttgtgactaaaattagattttttgtagtgtcgttttccaacattctcttggctggttttaaaagggacaatgatttgagtggttgaatacttgacattgaatgtaaatcgagagaaaaaaatgatacttatcgttaattaatcaaggattacttttagcaataaaatctatttagttagattattagtgaataaatgaatgagttctaataattatactctattattatatgtatagtacaatccgatccgtaacactaaccgtattgtgtcttaacgttttctagtgcatcaacttcaaagtgtgttaatgttttagttaatttagttgttaaggtgccgtttggtaacacttttatttttttaatttttaatcacaaaatgaa

SEQ ID NO: 308655 - DNA, 1113 bp, Cannabis indica
cctcgctcaattaatatacctaaaaaaaaaaaaattaaatactattttaatctggatattacagacatgtttgacattaacgtgttgttgtagaactttatttcagacaaagtataaatcaatctcgatatgctttatgcgagcataaagtataggattttcagcaagaaaaacagtgctttggttgtcacaccaaacaaaaagaactactacttgaggaatgtgaaactcatgaatgagagattgaacccatgttattttagcaacaacatttgcaagactacaaaattctgcttcagacgatgatctgttaatagtgacctgcttatgtgattttcaagcaacaagatttctaacaaaataaatgccatagccaaagattgaacacctaccatctagatcagatgctcaatctacatcgcaaaacacatcaagggaaaagtttgaaactagtcgaagtagaagaccgtgatttaaggtgcctacaatgtatctcaagattcgttttactacagtcttgtgtgtatgcaaaggattttgcataaattgatacactttattaacctaaaaagtaaatttaggtttagttatggtggcatattgcagattgccaacaatagacctatacaaagtggtatctttgacagactcactaccataagtagaaagtttgagaccactattcatgagagtgttttgggtgtttacattctttatatcaccctttgttagcaaatcttgaaaatatttggtttgtgtaagtaaattaccatctacagttctagaaacctgaattcccaaaaaataatcaactaaatcaagatctttaagaaaaaaggtagagctcaactcttgaattagttgctcaacaagattatcatcattccccatgataagtacatcttctacataaactaaaatgcagacacatgactgagatatagctctaatgaagagtgattgatctgccttttgaaacttgaaaatattatataacttaatttacttattatatatttttttaaaaaaataatatgtaaaaacatatttttataatttttattaaatgatttagtatgtgtaactattttattattattttaaaaaaaaaca

SEQ ID NO: 308656 - DNA, 915 bp, Cannabis indica
ggtgcttgtacttgtgctgctgccggcactcgttctattgcaggtgctacttgtgctactgctggcactggtgctaattcaggtgctggcgctcgtgctaaagcaggtgccacttgtgctgcttctggcactggtgttaatgcaggcgcgggcgctggtgctaatgcaggcgttggcgctggtgctaatgcaggggccgacgctggtgctaatgcaggcgcttgtacttgtgctgctgctggcactggtgctaatgcaggtgcttgcactggtgctcgtgcagctgccaattcaggtgctgttgcacatgcaagtgagggagcgggtgcttgttgtcgtgtgcatgagggtgctggtgttgccataggggaggacactgttgttgatgagtgcttaccattctcatcatcactattagcaatgatctgacacattataacatcataatatagttacttaattggatcataaattagtaaacagaggattcaaataaatgaacaataattaatcaaaatcaatcaccagttgagtaggagttttagcagtaattagcagttgtgcaactcccctaaaaactcgagaaaactttgaagtagactcataatcagacaatgtaacattcacagttacttcttcaccagctttggttgaacatgtcagagatacaatttgaaacaaaccctgtaacaataattcatcttatttgataataaataatcaaaattactaattaaaaaacaggggatagattgtaacatgcctgggccttaaattgagacatatcattactaataatgtctacaaaagacactacgccattagcaccaagaatggtcaacgattcacaagtagaagccaatgttttgattttagtcacaatatcctacaaattaatacaacaaaattaattac

SEQ ID NO: 308657 - DNA, 1157 bp, Cannabis indica
ctgaatttcaacttagtacccatagttttttaaatactttcctaatttgaggcaaacttaggatctttgtttgagataatggacattggagccccatgtagaagaataatctctttaatatacaactcttcatactgattaactgtatatattatcttcactgacataaaaagtgttgacttagtaaagcaatcaacaatcacctaaagagaatcgtataaacttgtagttttaggtaatccaaccacaaaacccattgtgatgtcatctcgcttccactcaggaagagtaagagtttgtaacaaaagcacaggtctctgatgaattagatcaattaagaattgacacgtagaattttttttgaacaagggtagtgacaaatatagcgaaaattggttacttaactatttttgttgctatttttaaaatttgagtgtttatttacaacaaagcatataaaataagtatttatggtgcaaaattttccaaaaaaaatgtaacattcaacatttattcaataaccccctctctcaaaaaaaatggcataaaaatacaataagtgtataagtatgtgttcatatataaaataccaaaccaatctaatttgtagaatttgtaaagtgcaaatatcagcacttatgtagatttttttttgaaattaaactcttaacaaaaatcaagagtttaatacatatcaataagaaaagatgtgtaatcttcaatctaagctaattcaccatccatcctaagtgcatgcacaactaattcataagaaaacgaacatgaactagggatgccttaggaaaactgaaaaatcaaactagcaaaaaaaattaaaaaagcctagctcatttcaaaagaaagagcgctattgaaaaacagaaactaaagttaaataatcagattccaaataacaaagagaaagaacaacatgcaagactaatccaacactatcattaagactaatgctttttcttgaatgactaagaagtaaccaataagtttagatcttctacaatatgtgaacttttcgtgttttgaagtatagataaacaacctacaaaataccaaaaaagataaatgaggtaaggaattaatttatacaaaataaactaaatttaaaaactaaagttttaatatatatatatatatagcaa

SEQ ID NO: 308658 - DNA, 1343 bp, Cannabis indica
aaaaagaaagttgtcaatttgcacaaagtatctaaaattgtatttttgaaaaaatttatttatgaatttttttacttttttacggacgtttatttttttcagttactatttatttttaaataacgttaatttcaaattgcaaaaacattatatataatgttgttacaatattttttcaaaacaactaaaaataacggtccgtatttttataaaatatagtaacaataattcgtaaaaagaataatagtagattcgtgaccttaaaccatctttaatgtaaggacatgcaaaccaccttcaatatcaagaaattacaaattttattagttttaatatatttctgtgcacaaatataatttttttcaaaaaaattattttatggaaaaaattgaagaaaaaaattttaaaaaaaatgagaaaattaagcaaacataaccaaatactcttagggtaaccagttaccatagggagtgtaaccagttaccataagaagagtaaccgtttaccttatactgttttcgtatattttttaacttttttctaaaattttctcataaaacaactttttttaaaaaaaaatcatatttcttcaaactaataccttaaaacccataaaaataaaaatttcaccaatattaatgggtcatgatccagcccacgaattcttcagagcaggtcggcaagctaaattaggcgaaaacctctctaactaacatatgatacaatttcacaacaagacgagatgaaaaaaaaaattgggaaatttgacttaacatgcatacattaggtaaaaaataaaaatttaaactaaagttaactcatattggtagaataggtatacttcccaaaataccaggccttcctacacccaaacctattcctcctcttccctttctctttctctcttctctaacttcacaaacccatattttccatcattctccctaattaaatcacactaaattcttgcgtaaactaaaaaatttgagttactcctagctactccaagctcacatttgaggtgcattggtggttagattttttttttatttgaggaagcacgggcatgacgaacttaatgggtaagtgattttcttgattttgtttgttgttgacaattatagggaaatttgaaaaagtatgcataaaatactttaatattttatgtctaaactaatacttttcaacattgaaaaaatatgaccacttttttaaaactccaaaaatacccctctcaaaaccctttctctctccttccctcaaactctctctgcctcttccccttcacccgaacccacatcgcacaaccccccccccccacacaacccactccgactgaccac

SEQ ID NO: 308659 - DNA, 2118 bp, Cannabis indica
atggctcctgtggaggaggtacatcggcctcctccacaggggttaaagacttcaccgccactccaactgctgaactagcatcttcaatttgtatgcccaccatacggggaatagagagatccatcagacgggccttcatcttccaggccgtgagtctgacagattgacctaccgagactggttcgattcctttaaaagagggagaaacgccaattttagcgcatccctttgaaacaatttcgtcactctccagtggttcctcagtagactcattagaagcatgatcgcccaaattattctccacccgccccagtggtcccgtaccccaaggatagtcactgaccacccttttatctctacgcatagacaccaacggggtgactcccatagaggaggattcaacatccaagcaccttttcttaacaggagtggtacactcattgcaatctgaggtgggagaaaccccaatatccacaccaaatgattttcttttattttttcccgcaccatctagctcttgaatctcacggatataattgtcttgggtcttaaggaaacgagccaaagcctccctttcattttgtagggccgaaataactaggtgagatgagttataacgagtagcacccaccagagaaggcccactcctattcggcctatccaatgaacccacatctctacccacgtggaccccactaggtgacccatcaacataaggtccattctccaaatggagaggaggcggcttgtaaaaagaattaaccccattattagaaaaataaatatggcccgtcctaccaatgtcatcacaaggactatcattgttcaaaatttgatggccaataatcttacaaggcccactcacaacatagccattactacttttcttgggccccacaacaataataatattaggaaacaaggagcccatcacttggcaaggggacacacggccaataggcccattagcatcaaaaacactcctgtcaggcccaaccaaagatacggctggcccattcacctccaaattcaaattatgcacaaaatacatagcattgtcagactttgaaatagtaccaagctccaaaacacgtattacctcagtcacctttctcttctccttactcattgtagacaccccattaccaaaaatggcaaaaggtggtaccaaacacgcaggcttcggtttgggaatccacaccgcatgctgaggccgacgaccagccagggagaagcgccttgtcaccatcgtccttagcttcgagccccgggaaacacaaggtgtcgggccattaacgccaccgataccaacggtactcacaccaaccgtcgccgtcaaggaaggaggccgggccggagagagcacataaaaatggatcgaggcacgaaaggagaccccggccacatcgactgtgcgagaggaaaggatagccagcgaggcaccccagccaccatcaccgaaggagtcttccgtgataggattgccgaaaagataaaactttggtctcatgagatcttcacaatatcagatttatgcctaaaacaaaaaccttagagaaatacaatggggaccatatattcaaaatagaagttgcagccgtagcaaaacaactccatcaaaacgaaaagggtaactcatcagctacagaaaatctctcactctctctctactctctctctttctttctttcttcatcaatacgaaaaagtttacaaatataatcagatttactctcttactctctctctttcactctctgcagatcacaaaattgcaagccattcctctcaaagcaaatggacacgcaatcaaggcagcactagccacactcccagctccttaactctcaaatctcacactctccatctccactgtaacctgtggccagcatcgtatcaggttacaatttaagttagttgtatggaaaaagatttccatatttttaagtttttattaaataaagccacattttcattttattaacctatgtttagagatttctaatattttttaaagcaaatcattaatatatatacatttatattatttttatattataattattttaactctacataatcattctttcttagcttaaatttctattttattttttc

SEQ ID NO: 308660 - DNA, 1950 bp, Cannabis indica
tgaagttgctatttcatttacaaaaaaaaaaaaaaatctacatcaaactctcagcaaatttgcattctatacttcaacataaattatcataatccaatttaaaaaaaaaattaaaaattaaaataaacatacatactatattttacacatatattttaattaatttcaatatcaaaagagaaaaataataaaacatttttttttgaatgaaaataaataaacaataatgctctaaaatagaaattgtttacatggggtggatatttgctattttaatccttcatttttattttattttcttttaagaatcccaattttgttctgttcaaaaaaaaaaaaaatcccaattttgaaggagtaagaagggtaaaggagaaaggaatttcaattggtggagttgtggtgtaccaaccaaaggtatgaatagtaaaaaagaaaaaacaaataataagaaggaagcaaacaagtaccaatgcaaatacgtggaaagagagacaaaaataaaaaggcatcgattgcatcagagaaaggtaaagagagacgttggtttttgaggctgagaggtaatggtggtaatcgcgcgtggtgtatcagagtgtgtcgcagtaccagaagccacatcccttacccaatcttattgctcctcttacctatatatgtatatatattgtatgttctgctcctatattgctattacccttagcctgcccccccctgacccctgaccctgaccctgaccccctgacccaaaaactatattctcacaccacatacacatttactcatactcatactcaactctctcattcactcaatttcactcaaacaagaaaaggaaaacaagaaaaagtaacacgacaaaacctctaccttcatgtggggccatatattctttttaccatttaaccgcttttcacttttttaccctttcacacgctttcaaaaatttccaatatgtatgtatgtcttttactatactatgcggattgaattaaatattttaatactgtattgtgtttagtctaatataaaagtagatctagtacaaattagttttttttttttttaaatgtaactataatttgtaataaattaaaataatactttatattcataaataaagtaaaactaatatttaagaataataaatattattattgagatttatgtacattataaaataaaatatcattcaaatgaaaaaatagatacaaaaaaaaatacattattttacaaaataaaaaaaaaaaaagactattttaaggcactcttttagtgggagaataataatatagttccgaactaaagagacaaattatatgccgtggacaaaattatcctatctcccatattttcaaaatagaaatcaattttaatccaatctcaagcattaggctaatgcaacaaacatgaccttaattgaaaagattactattttattattataattgaaaagtttaattaagtcatgtggatggtccaaaaatgtggttaattaaggaaacatttagatttgtgacatgggtttttggaggattattaaaaaaaaaattaaaaaggtcccatcaggatggggatatggatgatgaagagagaaaattttgcaaaaaaatgtgaatgtttgggtcagtttgatgggtcaagctgtgttgagataagaaatggaaagaggcaataatgaagggtgtgggggtatgggtcccagttggcagggcgtgggagagggctgaacatgacgttgtcggttgtttttgtattctgcaaacaatactcccccaattttttttaaattttaaatttttatatgttcatttttgtcaaattcagaaaataaaaataaaatgaaaattcaaaagcagtactactattactatcctttaatttaatttcatcagggtcaggatctctttgtcattttgggcactctctctctctctctcttatctttcc

SEQ ID NO: 308661 - DNA, 3077 bp, Cannabis indica
gggtcacggtccaagtttgactctggggtttgggcttaggtttgggtttgggtcttgggctggggttgaggtcagggtctgagtcccagtgcgagttcggggtccagctcctcgtcttagttcggggtttgggtttaggtttgggtataggtctgggtaaggaggttcaggtccggggcaaaattcagagtctgaatttgaggctggggttcgacgtctgcgatccaaggttcaggtctttttgattgtggtaggtgttcggagtctcggtcttggtgagggactgggcccaaagtattgatgaatgaaaatttaaagagactataattgaaaaatatgttttatttttatttttttaaagtgattttttttattttaaaatttctaaaattttgattattatttttaaaattaaaaagtgaaaatagttttatagaagatatgttcacttttccaattaaaaaataaaagattcatgaacattcaactatcctagtataaataattcgagactatcatactcattattatctcttttcaaatgaaaagcttatgtttatcacctaaaaaatattatactaatagttactaaatttaaacattttggtaaatggattaatgtggattgaaatttatttaaaaaaaatatgtgtttgtttctttataacaaaaaaactgaaaaactaaaagtccatgttttaaaattattattgtttgctaatatttatatgcataagtaaattcttaatatttatgtgtgtttgtcttacattattcatgtgtaagtaatttgttgtattcataatacatttattagctatcaagtcttaactatataataagattttagttgttgacgctaaaaagtgaataccaccagctcgctaaattgacaggatgaataataagtttaagtaaataatttagaaagacacacaaaatttataatagttcactcccttttgacgtaattgtaatggagctatgtctacttcaaaattatatttctcacgagaattacaaaaaaactggctaagtgtgaaagttctaatttttagagaggtgccttgtgtaacactcaactaccagacacattaccacgactttattttaaattacattagattaaaactttaactttaaataccatatatctttatatatataattatttttacaaaagtcgggatcccgattcaaaaggttattttacaaactaaaatacatttctacatcatgtcacattgactttgaaattgaccccaaaatgctccagaaattgaaaccctccatggttgaactgtcgcgacatgtacaatcattgttaggtcccaaaataacggctcctccaccttaccctttactttgcttgcacatggtagctcactagtgagtcaacagactcagtaagatatgcataaaatataaaatgtaatatcaacttatatttaggccctcatatgcctatttacaagacttatcgaatggtcaagaatgttcttaacgatagtacgatctctataccacatgcactgaagtacttctctcgtactagtgttggtacgactgaaccgtactcccgggtaccactggatgaggtaccacatgcactatgtactcaccttgtactagtgttggtcacaccgtgatattcccttaaacattacacattgtaccaatgcactccatattacaactatactagtgttggtagtgtataacaaaatagttagaatgcatttatatacatacacatatactttatactaatcttacctcgtttctagattcaagcgtgttgatcgacctgaagggacaattcatgagctaaacggaggtccttaacttctcccttccaaagcttctaattactgcttgagtttttagctagaattagcaaagaaattagggatgaatcctgggtctatggttgctagagagtgagagagggagggagagagagagagagagagagagagctaagaaatgggattttaatcaatatcttcaaaatagtttatttttcattttctctagataaacttatgtttttctctcaagtctactgggcagctgccaagagtgaggcaatccaccaatttccaatttttttaatttctaattctaccctttattaaatgcctaaactcaatgttcaaacttaacacgctacaactctctaaaataaaaaattttatgttttacccttgtgactttaatgacccttcgttgtatttttcattgccaccgagctaaaatcataaaaatgacatattttgcatttaacataaataatactcttagaatttgataaaatcttcggaattgagaaattataactctaacgttcatttttgaaaatagaacccacgacatatatattcacatataatcattctataacaataattagcatctattgtcccacttatctatatctaaatcatgtggtcattatactttgaccttatgggtactttttctaaatgtgacaaatgagctagtggagctctccttttataggtgaaggaggtcctattaatcagaataaaataatccaaaaaatagagaaaataaatttaggctatttttgactatagatgataatctaatggtaaaaaataacttctgaggttgattatcaatttttggagctcgagtcgtgacgacgggacttgctccgtgtaagttgtagcttaaattcgtaactcccttagaggtgaaatttgtagtcgaaagcttcaaaataaagattgaagtgtgagacatgacttaatagagcataaaaatagcttcaaaacacaagttgaatcacgtcaatcgaatcaatattgagtgagttgtggccattttactgaaggttgttctgggccccacgcccgctggatgagtgagaaaacgtgtcgggtgtattttttgatgcctatgttatatttgtatatcacttagcctatttttgtgttttgttaaaactagtaacttttttggagatgttgctattttacgtaaacgggactcaaaactcccaattttcgagtaagtcactttgtcaaaaaagtgaaaatatgaagttgtga

SEQ ID NO: 308662 - DNA, 805 bp, Cannabis indica
atatatatatatatatatacacacacactatagtggttgtagtggaatttcaatctaaaaatagttaaaaggaaaatgacccaacataccagctgagtcttttttaattgaaataaaaataaaaaaagttttgatgaaattaagaaacaacacaattatttcgtgggagtctgccacttgtactgatacatttaacataacatatatctctaatctcttattcaattgtgttttgttttgtttttatcaaattctttatgtattataattgcaactagaacaaagaaagagatagggagctgaatatgtatatgtatatgcatacttgaggtggtgaagaatccattacagaacagaataagttgaggttgagcataaataaataatgagtgaatgtgttctgttttgtgatcattgccaataaaaacataccaatgatctaatctgatcatcatatcaaaattacacagttagttaacatttataacatggttaatcacaagtttttcttttctttgtgttgtgtgttcttattagttttagtaatttcttacaagtatatagtcaaactcatctactcctgcccagaaaaagagtttggcaggtaaagttctaaagattatcttgatcattgataatattccataccacaagctcaaagaacacgactaccttatcattcagcctcttctattttcaacaccactatagatagtgacataattttctattgaatcaaaccttgcacattaaatgtctgcaagttctaacttgaatctctccttatttatctgtagacaggacc

SEQ ID NO: 308663 - DNA, 2057 bp, Cannabis indica
gtcttagatttcagtcactttcactttttcagtccaaaatgaataatctaaaattttctctgtaattctattaacaaagaattttttcaatattagtttgtgcacaatattaactaaaaaaattatttaaaaaatatatattacataatatatataacagtataatataatatacactattaataataatatactgcaatgtatagtatatactagtataatatataaaaatctaaagttctttactgtgtgtacaattaacaacttctaataatattatcccaataaaattatataaaaataatttattatataaaattaattaaataatttattatcacagtcagacaccggtatgggtgggtggacacgggcggatagtggacacgggaagaggagaaggcttttggactttggatgttagggacgagatttgccagactgagtcagtcgctgggatgcgaccccgccagagaagaagaagcagccgcctttggagaagaagaagttttagtgttttttttggttgtcttggtcttgttcaaatagtgagtatgtaggtattaaatgaatagtgaaaagtaaaaactaaaaatgaagtgtgataaataaaaattaatattattaactttttaatataataaaaaataaaatttttttactatttttttgggtcacgggttagatcccgactaaaaaaaccactttttaatacccgaaacccgtgtggagtattttcgggtcgaactcaactcgacgacacgagttttcatgtttttaatttttttggcagcgggtcaagggtgggtggtcgagttttttaggtttgcaggtctaaatgtttagccctagcgaaatatcttaaaaaaatcaacaaagtcagtgactcagctagaaattcctttaagtaatttgttctgattttattttctttggtatatcaattttaagatgcttttctaaaaatattgagagattgtattttaagctttggaaataaaaaatgttctatctgaccatgaagaaggttgcatttgttctcactgagtcaatcgtatttgaattgttgactaacaaggagaaaaaggctgagcatgaaagactcttggctggaaaatgaatttctctgaatattactcttaatagtttatttaatgatctttgtgattattatacttcagacaaggaagcaaagaaaatttaggaggtgttgaaaaaaaacatgatacaaaagaggcaggaactaaaaagtacgctgtcagtagctatttaaagtatcaaatcgtggacggtaaatctgtggaagctcaatctcatgaactttaaaaaattacacatgcaattatctcagaaggtatgactcttgatgaacagtttcaagttattgtattaattgttaagttgttgatacatgtcatatgccctatcaaatttactaattaatttaatgttaatactttcaattatttcagtataaaagcaagcacgtgttgatctcacgagaattatatttaattttttattcaaaattaaacaattataaaaatgagattgtttttacttttttttagaacaaaattaacaaataaaatcaagataataaatataatgtgatactacgatattcaaataatagttaaaggttagtcttcacatttaacaatcatccttagttattaatatcgaatgttatttcaatttttcaaataaattattaatcctatagataatgttaaaacagtcaattattataattttcttattgtaattaatcaagacgaaacgctcaataattaatttcttttaaattaaaaaataaatctaatgaagcatacaatttatttaaatttgaataaaactttaaatttaaaggagatagattaatctaggtaataaattaaggaagtatataattcatgtaacctaagttctattcttcatcacattaaaaatcttttaaacatttaaaaattgtaattatcacaaacacttagaatcttggactataggtgaaataacagagtgcgaggagtccaatcggattcaagagagtgcta

SEQ ID NO: 308664 - DNA, 1259 bp, Cannabis indica
aaattataataattaaatgttaaaactaattaataaggacaagtaatatatactaattaatctcatcacctttcttattgtacaccttctagtcttttataactagttttctaatatcaatttttagttagttgatttatgtaactacttataatgatttaattttaaaaatcatctattgaaaaatctcttgtgacatcttattttttttaagtaactaatttttatgtttcaattaatttttgattgatgtaggtgtcttatctgtttgtttcaattttttaatttattatattaggtaactaattaatttatgcatttaattattgttatctaggtcctaaatttaagttttttatttagttatttcaagttactataatttttatgtgttagttctcaatttgggttttttatttctctgtgtcaaacttttaactagttgtttgatgtaattagtttctgccaataaattttataacccatttgtaagaatgtatgtcttattttttttaagagttggtttttatgttttaatttttttagttgattgtaataggtaactggtttctgcatttaattattgattttattattttagtaactgagttctaagtttcaatttttgatttggttgttttaggtaattggtttttgtgttttaatttttaatttgtttgttttaccaaactgatttctctgcgacaaatttttaattgattgtttaatgtaactggtttctccatgtcttatttttaattgtttgtttaatataattggtttcaataatttacgtttattaatgtgttaagaattctcttgtggtatattattttttttattaaccggtttcttttgtttttacttcaattttttagttcgttgtattaggtaattaatttttgtattaattatttgttgtttttgcgtcaattgacttctgaatttcaatttttaatttgattatttaagtaactagtttttttttttttttttgttgttaatttttatttagttaatttacataactagtttctcaatatggtattttaattagttatttattaataggtcattgttaaaaaaaaattaaacaatatgtcttattttttaatttaacttcatttttttgtatttcaatttttaatttgttgttttattgtatctggtttctttaattaattttataagttatttcttagaatttttatgttggtatgtttttttttttaagtctaactgatttttgtagtttctaa

SEQ ID NO: 308665 - DNA, 1068 bp, Cannabis indica
atcatcatcatcatcatcatggtaatagtaacaaccaaaaagaaaatcaagaagataaaacagcaaaaaagtctgaaagctggctaagtagaaagcgagaatcgctaatgattgttgcatcccttattgctacaatggctttccaagctggaacaactcctccaggtggtctctggcaagaaagtagtccctcgcaatcaatatctcaggtcacacaacacgacacgatcatagacaggattatagctgattctccttctgtattcgatcatctcgcaggagaagcaataatagctagttatcatgataaaaaaattctgtaccatatttacttattttgtaacacggtggggtttgttggatcattgagtataatcttgctactcgtcagaggcttgcctttctgtcgcagattctggatgtggattctaacagtgactctttggatcactttaacagctatgacccttacatatgtagtcgccatatgggttgccgctccagagaaagatatcaacaatattgttaagtatttgatctcttacttaatattaatttgggctggagttatggttgtaattgtagtgctccatacgattcgtcttataataaaattgttgaaatggttgggaaatcttatcctaagaggaataaagagatcatgtgtatatagttgttagttggagttggctttgtgtttgtgatagactatgaataagcttggaatgtttgtgttttgctttttattaattagaatttttgttgcttcaagtttgtatctaagcatataatataatattagagtataactttttactaaaagtgactaaatgtatttataattttttttatcagaaatgttataattatttattattaaatggataaagattatgtttggtatgatttatgagaaaaattatttatttttaaaatatattttaaatttaattggtctttatttatgttcattaatctatatctcattttttttcctttaaaaaatattttttttctaaacaaaataaaaaataaaatttactgttatataatatatctattctatat

SEQ ID NO: 308666 - DNA, 825 bp, Cannabis indica
aaaattattttggataccaaaaccaataggagtgcgtcagtatatatatattgaggttggttaattaaatattgtctcactttttattatttattctgcttgtattttgtaggaaataatattacattggcggcgaatggaattgtgaatgagttcacaattactcttacacattcgagtcttagtgaggctgtggatttgcctgataatatgcttcaacaatttttcataaaatcttcttggaaaattcaagcctattttcttatacaatggcgagaaacttactaaaatgatgatgagtttgagagagccatctgtcagaaaccaatttcttccaccagttcttttttggaagaaaacatgacatccctttgttgaagagcatgatatatatattcagaatgtttgcccatcaaattcattcagatggagcagctgcctgcccatctacctagggtaagttttttgttttattgttattatttgtatatttttaatacatctttgaattataattagtaattttttgaattcaaaaaccacatgaattgattaacgatgagttcgtatatcgtgtggaggcttatgaccacgattggcaaaaattacccatgtttcagctcataaaaattgagatattgttatattaatatatatcctctgcatactgagtttatactttagagagaatctctgtttgtttttattttttgttttttgttttactaagtttattcacttcacttttacagagtaaggacaagctcgaatctccgttgtatgtcgaaaatcttcctcaggaggtagaaaatgaaggcgtggaga

SEQ ID NO: 308667 - DNA, 3162 bp, Cannabis indica
aaaaggtatttctcagtatatccctatgtgcctaaggcccctagcttaggaagtcaaaaaatttatctaattttaaaaatacatattttttttattgattttaaaaaatatcaagactcaatttttttctttttctataacccactaaatttcaaaattgaccttaatattaattaaattacaccaaaccatcctattaaagggatgcacccagaaatttccaaaattatatacccttaaaacaaagtaatcatattataaaaatctaaaatcaaaaccacataacttatcatagtcttgtcaaatttacctcatacaataataaatggacaactaaagttgttcattaaaaaaaaatagacaactaaagtttcatttttatttttattagcaataaaaataaaaattaaatgaaagtcttgtgctttcatcagtctaagtcgtctctgagcttgacaaaaatggccggcttgtttgacccgttaaaacctctctaatatcatcatcttctctctccatctctccttcagaccaatctgagaatttttccaccaaagtgatttgcccattcacactctttctattttctcttgtttatttggggaaaaagtttgttaatttgcccatatgactttaaggtgtagacttagatgtggacttgcttttctatgaaccgatggagttttcattttcttctgcaaaagaacccaaattcaagctctgattcaagaaccctttcaagggtttttaaaaaatttcactgtggtttctgaatttggactgtggattctcaggtgggtatttgagttttttttcttttcatttctgaattttgtgaatatttacaccttttatctttgttcttaattgagtcaactcaattgggtcaacttaaattttgagactttgtctatgtgcataatgtgaattttcaagttttagtgatgaaaacaaatcaattgttggttgatgtgttttaataatatcccttattattgcttttgaatttgtttgcagtccttgtttggtgagatcattggccagcctcaaattggggttttgttttttcttgtttgtattggtttgcggattctggtggctatgaatcccaagaatatggtgctgagtagcagagttgttgaaagtttagcttttattcttttatggttggttcttcattctagcttttgtcatggtgttcagagtgatattgattgtttgaagagtataaaggattcattagaagaccagtttaattatttgaactcctcatggaattttaacaataatacagaaggttttatctgtaagtttactggggtagaatgctggcaccctgatgagagtaaagttctaaatatcaagcttgctgatatgggactcaagggtcaatttcctataggaattcaaaattgcacaagcttaacaggcttagatctttcaaacaacaagttttatggttctattcctgaaaatatctctagaatgattccatttgtgacaactcttgatctctcatcaaacaatttctcagggtctataccaaaactgctctctaactgtacttatttgaatgttctcaaacttgatcataatcggttcacgggtcagattcctttagagcttggccagctctcgcggattaaagaatttagtgctgccaacaatcttctcactgggcaagtgccaaaatttcaatttgcaattacagcacagagttatgcaaacaatccgggactctgtggggaaattttggatccttgtgaagagactccaaagaaaaatcggactgtaattattgtggcgtcagctgttggtggtgtgacttttgcagcattggctgttggggttgctttagccttcttcttccgtagagtggcggtgaggaagaaggaagacgaccccgaaggaaacaaatgggcaaggagcttaaagggaactaaagcaatcaaggcaagctaattcactcaatctatccaatgaaatatagtttatgcataaattgaacatcatataacatttatgtgtgcaaaatttcatatttctgagcttaatttagtaagtgtagagtttcattgattagtctttcttacttatattcaggtttccatgtttgagaagtcagttacaaaaatgagattgagtgatctcatgaagtctacaaacaatttcagcaaggacaatattataggatccggaagaactggaacaatgtttaaagctgagcttgaagatggcagttctctaatggtcaagaggttgcagcaatctcaacactctgagaaagagtttttatctgagatgaacactctagggagtgtaagaaaccgtaacttagtcccacttttaggattttgcatggcgaagaaggagaggcttctagtttacaagctaatggttaatggcaccctacataataggctgcatttcttggaagaaggcgataagcctttggagtggcaaacaaggctcaaaattggaataggggcagctagaggattggcatggctgcatcataactgcaatccccgtattattcatcgaaacataagctcgaaatgcatactgttggatggagagtttgagccaaaaatatcagattttggtcttgctagactcatgaacccgattgatactcatttgagtactttcgtgaatggagaattcggcgatctaggctatgttgctcccgagtatgcaagaactcttgtagccacaccaaaaggagatgtgtacagctttggagttgtgcttctggagctggtaaccggtgagagacccacccatgttgcgaaagctccagaaagcttcaagggaaatttggtggaatggataacacagctgtctgggaactctgaactgaacgatgccatagatgaatccttaactgggaaaggcgtagacagcgagctttttcagttccttaaagttgcttgtagctgtgtagtagaaactgcaaaggagagacctaaaatgtttgaagtataccaacttctaagagccataggagagaaatatcatttcacagctgaggatgatatattagtgcaaaccgaaaacggtgatgctggtgtactagaggaactcagttgttgctagagaaaactgaatggtaattgaaaaagatgaacatcactatactcatttgtaaatattttttgc

SEQ ID NO: 308668 - DNA, 2284 bp, Cannabis indica
ataaacatttatcttttaataaaaaaaaattaacttgtttatttttataaaactgtttaattaattttacgaaattgtttattttgagttttaataaacatagtttattatttaatgattaaaatgtatggtttcatgtaataagttttcaaaatatataactttttaaaataattttttttacacattttttgtaattatgttatttttgttgtacatttataaaaagaaaagcccatctaaatactatgttttattcacaagtaactttttgttgtgactaaaagtcacaattaatcacaaaaatttattttatgactaaaaaattgtcattaaagatagatgtttttgtagtgaggagaacacgaatccaagttgtacagactacaaatgaaaagaaaaataacaattaacaacaccttagatgagcactctcaatcaaacacataacattatctttgacatccctccattcacttttctttctagaattacaatcttttctctgtacaacttaaaatctaattcactagtcactaaaacaagttaaagggcttctcttttatagtagttggttggatcagattctgacttggttcatcactaacttttttgttttgtgccacataggacaagtatttgtggctgatgtggcagagagtaagctagagagccgaatccaccacaaattcacctgatttggttcacttgctcattgcctaggtagagttgttagagttagtgacattcttacagtttagtgtgctcgagttggacttgtgactgctctcaaagttcttcaattagatccaaaaattcttgatttaatgcatgatttcgagttggatcataagtttttcttctgtgagaaggtattgtagtttccactaggattactgcttcacacccataggtcattgaatatggggtgtgtcctactaaggttctttctgtggttttacatgcccaaagaactcgtgaaagttctccgaccagtgtgctttgcatgccagaagcttcttcttcaactttatttttaagatcttgtttacaacttccagttgtccatttgcttgtggtctggccacagctaaaaaacttttgatgatttcgtgcttgacacaaaaatcagtaaattgatcattatcaaattattttccattatcatatactattttatgtgaaagtccataacaacacacaatatttttaatgatgaattctagggccttcttagatgttttggtgttcatagagtcaacttccacccacttggttatgtaatcaacaacaacaatggcgaatttgactcatccctttctagttggaagtgatcctaccaaattgatttcccaaacaacaaaaggccacagactattcatcaatgttatctctgttagcggggctcttggaatcttggaataatgctgatattgttctcatttatgaacataatcagtaacaatcctttttcatagttggccaaaagtatccttggtgaaggatctttttggacagactaagttcgaatgtatgatctccaccaaatccttcatgtatctcatgcatgacaatgctttatttttttttttagctttgcaccttaaatagggcattgatagccctcttctgtataactttctattcatgagcacatatcttggggcttgatattgaatcttctataaagttgctctatcatttgaaagtgttccagattccaaatacttttggatggagccatctaggaagtggaaagatcaataaccgttacccccagtgtttttgtgcttagagcagaaagatgggcgatggggactaatctgtacttatctatctttgggtctattgctaactttgctagcatatctgcgaagacattttgacatctgggaattttcttgacaaaataatgcttaaaatgttgcaatagatctctggattttgctacgtaattaaccatattctcccatttagtttggtattctctagaaatttggttgactactaattgtaaatcactatagagcttaatattctaggctccaaattctttagctaattgtaggtgagatatcattgcctcgtgttctgcttcattgttggaggctttaaactcaaatcagagtgcactctaaagttgatcttttgcgaagagatgagaattaggggtgggcgttcgatccaatccaacctattttcttcatccgatccaatccaattagacctcaaaatccaatctgttgctcctaaattcgcccaatatacgtggaccagtcaagag

SEQ ID NO: 308669 - DNA, 2716 bp, Cannabis indica
aaagagcataggatctacctgcaccccatggtctgccatcagcattagtgagttctgcacgtaatttctcaacttctcgagccatggagactaagttcttctccattgcctgtctctgttccatcagctcaatatttgcttttttctcatactcgactgcagtcctataacaaaaaaaaatcaaatcattagccagctaatttacaacattgatccaaagtattggcgtatattaagttcaagcaaaaatacacatttttataaatttatataaatataatcagacatccaggcacaaacctagtctgcataagttcctggtgcaggccatcaacctcggctctcaaatgaggaatctgttgattatcagcttgcaaccttccaacttcgagtttaagagtctttacttgggaagacagctcctgcttaaggtccttgagcttctgaacttctccacgaagttgtacagcctcatttttaattggctccgttgctcgaagatcagcctccagcttcatacccttctcataaagctccctagaccttaaatctcttcagcccgaatctctccaatggcaatgttcatacgatgaagctcctccttcgcagcagcaagctcacgctgcaacgcaattcgatcttcaaccagcctcctattatcacccaacagtctccgcatttcaccgtgctgcaattcaagctcttcctccaacatcgttgggtgaggcatcggtcgagataaatgaggaggcctagcataaggtccttcaacagggtatccacgcctgctattcatggcttcacgagcaatacggtttctagcagccatagtcaattaccctgaaacccataattcttagataaaacaacaaacaaaaatcacagtcatctatttgaattgaaaaccaaaatacacagcaacaatcatgcttcgtggttacttcagttttcgcatatgtgtggcaattaggtatatgacccgacaaaaagaaaaaaaaacatatataattacaatctaaaccctacaaagcacaaactaacacagcaaaacgcaaatttaatgtaaattgaaaaagaaaaacagccctggaactcttaccacaatcgagaccggcaaagcggtgaggaagagatatgaaaaaacggcaacaaaggaaaaggcgtcggcagaggaaaatagaacggttgagagggacggtaagtgggagtgagagggagaggcccgtatgagagaaaaagagagaaagagagaaaaagatatgagatctgacaaacgaggaagaaaagagatggatgcccgacccatattaagccctgaatacaaacgacaacgttttaatgagcgataagggcgcctcaaaaatgggtcttagaaaacgacttcgttcattaaaaataattaaaaaaatatccaacaaccttggaaagtaatgatcgtaatatttttatttttaattacaaaaatattaatttttttttaattataaattttatttaactagactaattcggtctcaacaatgtcaacaacatcaaaaagaagattagattccaaaaaatacgatcaatatataaacgagacgctcgagtcataagatgagcacttaattagcagatggtttgacaaaatgtaaaaaaaaaatcaataaaagaagataaaagctatttataattatcaacgatactaccaaaagtgaatgacaaaacattcaaatttcttatagcttgtactgataccagacaatcagattcgataatactaacactcgaaaaatcacgcttcaaccatgaaagcatttcattgagagccacaacttcagtaatctcttgaagaactcgcccaaccagaattcctgaaaaaatagccacgacccgactgtggtgatctcgaacaaccccaccaaaaccatgccttcctccctcatcaaacaacacaacattaatattcaccttgagtttttcataacttggtttaggccatagcttagccccatccaaaagataccaagtatcaaacaaaggaaacaaactcctttcttaagcttttccccattgattcaaagtgaaacgagctaaattgacaacgaactccacctaacatttcttacctttccacaagagttgattctgtgcgaactaaattgcccaaaccaacatcactacttgaacactttgttcatcacccgattggaagaacaagtgaaaaacccagtctccaaacgaccctataacaattggaaccatagccaaacctacgatccgccaacaattggaaccatagccaaacccacgatccgccaacaattccacgcaaaatcacatgaaactaaacaatgcaaaatagattcacccaccttatgacaaacctggtcaagtaagtttcctactatctctaaaagttacaagcaatttggcagtgatgaaaagtgctacacatttctacacttttcttatctagaaaattctagtattaactacacaaagctaagaaaattagagaaaactagaattacctagaaactatatttgtaagctaataaacttagaaaattctagaatatcttagaaagttaaattgtaattcaaaataagaaaaatctagaaagttgtagtatcaaccttagctccctataaataccaagtttgggttgaggagctaaacaacacaccaaaaagccaaaagttccaaactatatcaataaaagtttactacttt

SEQ ID NO: 308670 - DNA, 1662 bp, Cannabis indica
ataagagaatatatactcatatacatacatagctttgactccaatcatcaaggaaccaattaatatatcacatctcttaattttgttggtttaagcataattaaagctttgttaatttattctcttattcacttattattaccaattttgcattaactggctcccactctcactcccactacataaagataaataaattaaattaaaacttcttaataacaataattaagaacatttataaatatatttctttctaatataaaaatttacaagtgggaaagagtaaactacccatattgatcgatttacacattacacaatacaataattaagaaaaatcatgatgatattaaacccctaataatctcaattcctaaaaatgtgtacacaaaaatccatagcaaaattaaaattaattattacaattctattataagagaagataagaaattactattattattcaattaaatattctagtgaccagtgcctttgccactaggaccagaagccagcttattataatagactcgatcacgatgactactactgctactgctaaccaaaacgcggtcgttttgtcttcttcttcttcttatatttccaacatgggtttttgatgatggccttagaggtcttgactcagcaatttgaaccataatatttaggtctataaagagtaataaaatggtcaagaaaaacaagagataataattgtgttgttgttttctcatgttgttgagagagtttatttggggtttttggtaatgaataattaataaggaagaagggttattgtatatataaatgattctgttttttggtatgggaatttgtaaataaatatatattatgtatagttatattctgtaaaccaaaaaggatggagtagaagaagaagattggtttagcatctgtgtaatattattataagcaaaattatgtgcctttttataggctttgggtttgagttgatgagtgaatggtagtaaaggacggtgttgggctttttagtttgtggggtcatctaatgtaattgatataggaatatattgtgtttgtgtttgtttgactaaatttcttgtgtatattcattaaatttttctttattttcacattattattattatagtatatggtcggtctctctcttcaataataatattattttattttgagagtaatgatatctgcatgtaaaattagtggcagaattatgtatgggaaatttgaatttccatacctacataactttataatttttttcttaaatgcatacttattaaaatttgtaatgtatgaccattttacaaattttccaaaactacccctcccatttgtaaatgctcagccgactctcacccaccatcaaccccaacccgaaccaccctcacccacgatcaaccccaacccgaaccaccctcacccacggccgtcgaccaccctcacccacgatcaaccccaacccgaaccaccctcacccacgaaaaccccaacccgaaccaccctcacccacgaatcccaaccccaacccgaacgacggtcgaagcccaggtcaccgccggtcccacgaatcccaggccccctcatcaccgacggtcgaagcccacgaatcccaggccccctcttcaccgccggtccatcaaatcgaaaacaaaaaaa

SEQ ID NO: 308671 - DNA, 783 bp, Cannabis indica
tattactaactatattttaatttattttttttttcgaaatggggccttgagcggtggggggcctaaggcggccgcctctttcgtcttagctcaaggtcagccctattcatcattccactacataggtttacaaaatagtgctagtcttgttaagcaagactatttttaatcaacatgtgtcttataaattgaaattagtgataaattactctttgccactcgatcaagagcatgattgcctcaactctttaatctccttcaattcacaaaaaaaatgatctttgtcgatcgaagaatacattctcaaaatgaaacagtatgttcattccctttctgcaattgacaacccttaactaatgatgatctagttctgtatattcttaacagccttgaatctgaatatgaagttgtagtagttaatctcacttgtaggccttaagtccattctgtaggccgaatgtaataagatacgcgaacaaaaaatgcacataaatgagaaatgttaaaggacacttatggtgtttagtactagagctacacactggtcagattttcgggtttccaggtagtcgagttcgggttttcggatgtcgggtgtttaaattgtgtaactgtgaacccgatttttgggtggtcgggtctagcaggtttcgaatcaggtacatcgggttctgtcttggcgggttcggattgtaatggaccaagtcctaataaaagatctttaggcccaaatgaaattttgtttttaaaaataccattttttttttctatttttaacaatta

SEQ ID NO: 308672 - DNA, 2319 bp, Cannabis indica
tgagtgggagtaatgagtaggtattagattaatccaggaaaataaacattagaagaaaattaagtaaatcttaagatcaagaagaggaattatatgttagttgataagggtggtattttaatactcttagactacaccaaatcaagtttctagacatgcgttaatagtagaaattctactgatgagataatgattactctgggggtggagtagtaattttggagaagtataaaaatctatctgaagtctctaactctacgagtgagactgaatgttaaagttacaggaaagatacttattcagcttatggaaagttctatacagtttttggcgttgtaccaataatgaattaactactagtgttacttcttgactaacacagatgtagttgccaaaaagtaaagaatccagtatccttagaggagtagacatatagagagaaattttacaatatcaaggattttgtgattaaggatatgtaatggtggagaaagtttatattgaatacaacttgtcagatcctatacaaatataatacatatagggaaacgattttgtcccgtgaacgttcacggaatgtattccgtggtacattagatgggtctcagggtatattagatgagtgtcagggtacgttagtattttttaaccctaattacccttagatcaatcttagccctcaaatcaaataacttcctcatctaacggctgccatacatcacggaatacattccgtgaaagtacaattagaagacaaaatcatgtccctatatatatactatctaatttgtagtagcaagagttctccaaaacttcaaatataattttaaattgcatatgagtgagacaacaaatctcattactcacgtcatatatattaagtctctcttaccaaatagactcatcgcaagtcattatgattttgctaataagatggtgactttatggttgttcttataattacaaattaacactcttactacgtacggctaataatttttgtctttatccaaatgagaccaacattctatatattgcaatttgcagggtaataatatctgactcatagctttatagagggtgcaagatacaatagataaataaatgtgacacgacacaaatgctattgagaacctcgtgagctacaactttcaagttttgacacctatttcataatacatccatgtcacaatgttctcataactattaataaataatgaaacaaaagtatctaaagtggaaggaaaagaaaaggaaatagcaataaaattaatgctccaaagcatatgcttggaagatactcactccacaaactcaaagaaaagaaataaaaaacgaataaacattttctttttgtttcggttggtggtggtgcttctgctgctgtgatcatctttaattaattttattccctttaaaatcacaaggaccttctcttacctcattctctctcccaccttcatccattcatttcttcttctctatagctagcttgcttctctctcttcttatttctttctccgagttttcatttcatcatggctgttagctcgagtgagatcaatggtgacgatgaagatgagaataatcttgacaatcgtggccgttgaaaaaagttgtcagacatgttatatcacgtttttgggcaacaaaagaatctttggcagagctcgtaggatgaggtataggcaaactgttttcaaatatatgtatcacatatgtttaccaagaaaaaagaagagggaactttacttataaataatttcctttgttgtactttgtaactcgaagaaatataatagctgaagctatttaataatacttttgtttagtacttaatgacatgtggttaaagctatatgcatagttttgattatatgcagaggcggaatgaggggaagtggggggcagtggccccattggatatatttattttttagaaaacatatattattattttaataattaattggttggctaatatatgatgggatgagatgagtatgagaatttcattgtagttaccttgtaagtaggctgaaaccatattttagtgtaacaaggaaaacaaatggtgattgtattttattttttttgaaagaatggtgattgtattttgtttagtaataattaggggtgtttattggacaacatacaatgtttctaagtctatctaaattcgatccagttatatattatatgttagatttttcatcggatcggttctattcattggatgtatttcatgtatatctattgcattaatttgggtttataaaatattttagacttagtattttttggatcggatcggatcca

SEQ ID NO: 308673 - DNA, 1362 bp, Cannabis indica
attcagtgttgggattctagggataaaatatagagttgttatgctttgttgggcattgtagtcttacgcaatgacaaggcgtggaatggtaaaataagattgttaaagaggtgattttgttgactaagggtagttttgatcaatggagttgtgttcaagataaaattttcacatcctctttattttctctacaagacggcgaagggcaagagcactggattgcaatagttggtaataatatctaaatcaatatcgatgtagctatctttagcaatcaaaataaatatgagtatggttgggtggcgcgaaactcttctgatcagattattatggctcaaactataagctggatgacgagagtggttgatcttgttcttgctgaagctatcggggttaaggaggtgttgagttggttgaaagaaatagggtaacatgatgtagtggtaaagtcggacagtttggtcacgaagctatctgaagttcgttagatatgacttttatttttgagttctgtatttcagagtgcatatacgaattcttttttagtttgaatagtatctttttgattaagcaaattgtgtttgctcattatttagctagagcttcgtaattaaatactggttgtacttatttgaattctacgattccaattaatttacgtggttatacctactaagattttttttgaacattaattatcctatataatacataaggcccccaacaaaactttttactaaaaaaatggtttaaaaaattattcaaatatcattttatttcttaaataaaagtcttactattttttaaatttcgccctagaccccgtaattgatagatacagtcctacctattctactatctttttaatttgtatgtgtggcttggtataggtgtacgtagtgatgagaattgagaagattctcaatccaattaggtatctaatattaatagcatggctttatatatagttattagggtttagagtgagggtaccatgtgcttttatatatgtgtcactatgaaactatatgctgcatgcgtttcacacatgcgtatatatatatttagacacacaaaatatctattctatataaagtgtgcctatataactaaaattcttagtttttgagaaatttatgggtgacttttaatttttatttaataaaataataaaatattatttatatataataaaataataataaaacaaattccattaatatttgaactgatatttgggtaacttttaatttttatttaataaaataataaaatattatttatatataataaaataataataaaacaaattccattaatattggaactgatatttgatgttaaatattcgagaatcacaac

SEQ ID NO: 308674 - DNA, 975 bp, Cannabis indica
agatatgacccagattcttgagcgagtcgtaactccaccggtttctcgaaccggtctgggaatcaaagaaagaagcgaaagcgtccatagattttatcaatcaaagaaatatactgaagagaattttcacaacaaaatgcagacagggaaagtcgataatcctttttcttttttcttgttgaatttatataaaatgatctcaactatttatatatagagaattatctatatcttacccaataggttcgtggaaatttctggttgtttgtaattactataatacccttcacttgttattaactactcatatataagagacacaaagaggaggggcattttgggagtggaaaagaggagaagtgttcagaaacatcgagataattttatgtttaaagagaaaacaattaattttgggtggttgactcagcttgatgacatcagctgaaactaaatcttgtgacttttgctattggtcgcatctctttgccaccaagcaagagatctttaattattttaaaaaaaattaaataaaagtgtggtggtattgcaagagacgcacggtgttacgtcccatgtccaataagatcttgccaagtaagcaacgtgacacaagtcacgatcctcccttaagaatgttctagtaactagtaaggaggtaggtagatgggaatggggaaaattgctaaagggcaccaatggtaagcacctttttatgtgttaatattgttattggtctaagtaagtatcgggtctatataatttaatataatagttttaggggagtattgttagtcaatcgcaacgcgacatgtcgagaaggtgctaggcaccactggtgtctaatagcaatactgagaatgaatgctttaaaatactaggatggaattagaagtcttttatgctgttaaaatcgtctgatctattaattaattcgagtgtgtctaattaaaagtaaatacacatggtccttaatca

SEQ ID NO: 308675 - DNA, 1702 bp, Cannabis indica
aatttaaaaataaaaaattattttaaaaaatatatccaaatacacccataattaattaatattattattctatttctaatttaaataaataaattagtggcttgtggtaactgatggtgactgattagtttagacactagttggttgttatttggtatgtaattaattaattaataatcactttctctgagaagtagtagtacgtaattttcctttactcgctgtttctttcatgtctttaattcatgaaaacgaaacttcatccaaaacaatacatataatacatagtcaattgtttgtttaattattatacatcactttaattataagactgacttacagtcctataaatccataatatatatttagtttccaaattaaagagtatgatcatttatattgttatcttatcaaaaacaatatttatatatatttatgatatgatatgtaatacaaatatatagatgcaacattgtatcacaatattcttttcattattggggcatacgtgtgaaattgcaattagctaattaagtctaaaaaacttatctaatcatgttaaaagaatcattaatataagtagattttttttaaatgcaatattattagataattgtaaatatttaaaaatatgtggattttattaatatatacagttacataaaatatttgaaagaaataaaacatatattaaatgatataatattatttaaattaagtaaccatcgaacaaaatagataaaaataatgttactatttgggagtgtccttaatatatttgaaacttcaaatatttgggtaaatatctaaattaattttatgtcactctcatatattcgagaaactgcccaattctaagttatatatagtttctatatactgtttaaaaaatctaaataaaaccctatttacttaatagaaatgaactaaaattataatctaagatttcttaagaaaatcttaaaaaaaattaacctactctactcactatacgtacgtaaaacttaatataattggagccaagctacatatacaggtgcgattatttatcgataaattgattctaatgaagtgacatagtcttcatttcaaaagtagctaaaattattaaacgtttggtaatacttttattttaaaattttttaatcgcaaaaataaaagtaaaatttttgtttttgaaaaacgaaataagtattttataacctcttttgtttttcaattttgaaaacagaaaacaaaagtgtgttctgtaaatattatttttattttttgactttacttaagttgggtccaggtcttggattaggactagggcgtaggttcgggtccaagtccgaatccaggtctgggtgtgggtccgagttaggggccgaggttcaagtatggggtccagggttcgggttcaaggtctaggggttcgaggttagggtctgggatctgagttcgggtccgaggttcagggtccgggcctgggacgaggtacgtacgtgaccggggttcgagtttaggttcaagtccgcctccgaatctgagtccgtcatgagatgagggttcaggtgtgggtcccaaggtctaagtcagggttggaatccaaaatatatttaaagatgaaaaaaaatgtttaatttttttttaattttgattcttaattaactagaaaaaattaaaaaaaaaaagtgatgaaaacagttttataaaatat

SEQ ID NO: 308676 - DNA, 3297 bp, Cannabis indica
tacatggacaatcaccgaattagtaaaactgaataaaatctaacaatctcaatagtttggagggaatttttagtggctagaaaagttcagggggtataatttagtacatatcaaaatttagagagtaaaaatcataattagtctattatataaagactctgaacaatggtcaaatatcttatctaaaaaaaataaaaaataaaatatgagtatatatatattaaaggctaacatatattttttttaagttttagtgtgtaaattaatgcattttaaaagatgaaaatctatttgtaatattgttaagctattatagagagccatatatactacattgaaccatataatattgttgaactattataccctatttatggtcggcatggtgggatcaatttcaactttttatagtttttctaccggtccaatatttgtattaggcttcccaaggcggggatctatatcttcgtccccgtcttgagcgatttcctattgggagatacttttgccttttttttgaactctggccagaggttttttccattttggccttagatagagcaaggttatagcatttgtgcagctctttggttttcttttagaaaactcactctatttttttgttgaaaaatttacacacaggtgatataatgaagtgacgacctttaggtcatatagggctggtcgacctagcatgaaattaaaggcagaaggcacatcgatcactaggaattgagccatcaccattgtgcttgttggggcttgtcccattgtaagtggtaggcagatttgtccaagtggagcaatacttttgccggagaagctgtacaccagctgagtgcagggaactaagtcttttaggtgaagccccatttttcacatgttgttttgaacaaaatatttgaagaggctcccttatcaatcatagtcgccaccattttatttgcaatctagacatcaacaaccaaagggtcattgtgtgatagataacatggtcagaatcttcttcactgaaggaaatgactgattctccaatgtgcggtttcttaggctttctttttctacggccaaaattgtatctttctgttcatattgtagggtccaagcatatttttctctagctttgcctgagtctccagcaatgtgggggcctccaatgatgacttgaagatgtccgcccactggcagaggcatcaattggttttgagtgttatctggttgggcggtcctttgttcctggtcggccttgtacttctgcaagtgcgggttatttttcttgatgaggaactttattttctgcttcaaattatttcacttgttagtgtcgtgatcgtagtctacatgaaagcgacaaaacttggtcgtatccctcttgctcatatctcttcatgggagtaggttttttgtacgacatcataggctgggttactgtgaaaattgtttctatctattaggatagtgaaagcaatgaactttgaggcattctttcgtggatgctgatcggagtttccactgaatatatttttctttccattaccatgtaagttgccattacctgatcttttaccaccttgactcgagttgctgtggttctgtggatggatgtattggcagcaatggtgtgttgttggttcttcttctgtcaaattgtgtccacacgccgaactgcttctttgagctttataaatctgtcttctcggtcttagaattattccactgaccttaaagtaagtcttttaatatactttcataattctcctagaggttcgatacctcctaggattgcatctgatctttcttcttcgattaatctcttcactttggtagcttcagtcatgaatctgctgatgtacgctcttaagggctctcctagtatttgttttactttgaccgagtcttctagatgagatgggagttaccgaaaagaggagaactgtgggtgaaattttgacatgaaagaattccacgaactaaatttccctagagataacttgaagtaccactgttgggcggcctctgccaaggtagttgggaaaattctgtaccgtgcatcacctctcaccgcttgtaagtccatttgcatttcaaagtatttaatgtaagacaacagatcttgttttcccgtgtacattttccatattggaattttgaacttgggcggaagatcgagagcattgatttttagtgagaacagtgatcctctagttcggtcaagttctaaatcagtgagttttaggccggtcaggccttgaacgaggctcttaagttgatctatttgagcttataccaatggattaacttgacctgcctgttgatcgacttgtgtcacatgtggatctcttagaatatggtcgggtagttatctatattgtttggctgaatagtaggagggatgttttgcccatctaatcctcttctgcaatttagattatccctgagatcatgcatggtacctaacgtgtcaaaaactgatttccctagaggtcttaacatctggctattatcaacaatgggttggcttgacatatttgtctgaggacgagtgttatgctgcacattccctcccaagtaacgagttagcaaaactttctcatctacggtgtggcccacagtttgactctatgaccttggattggatggcttatttacttgggtttgctgagtgtgtctagctggacgcactttcgatccatattgcggtccagtggggatgtaaacatttgctactggttgttgtccggtgatctgataggctcgtctaatcagcacggtggcttgcctagaacgattgtcaattatttcttgttgatccctcatgatttccatctgttcattaatccaaacttggaattggctcctttgttcaacgaaagaaaaatttacaggtgctcaggtatcttgctgatcataatgaagagtgttgttatgctcttaaattttcccttgagcggctcgcaaattttttatttcggtgtcatcaccaatcgtcctttgagaatttgtagcaggtggaagttcagtaccaggggcagtttgctcggtctgggtactagtggttccagtttcttgcacacctggggtgaacccagttagaggggaagtcactccttgccctactgtttgtgggcttgttggcggctgaggattagtcggatcagggtctgttgtgactggatctctaggatttgcagatgtctgcacgttaggatcattacgacaaaaatgggtattcgcgacggttctaaaaatactttttttggagaaccgttgctaaaaaaattgagtgtttaaaaccgt

SEQ ID NO: 308677 - DNA, 2435 bp, Cannabis indica
atattattttttttattattttgtaagaaatgataagataggaggttagacaacaaaatcaataattagtgtgtagttactcttattatcggtttcacacactgacacgccacgtcaccatgatcttctccaatccctactcaaatgggtcccacaccgtacttactttctctgtcaataacatatcctttttcatttttttttatatcatttttttaatgactagcaaatctcttaaaagacaatttaagataataacatggggatcaactaattaagacaaaagtagagagagatcacttacataacaacttagttaacaacaatctaaagtcttatctagtgacatgtcgttttacaatttttgatttgttgctttgtattactgtcaattcgttttctttgggttggttgttgagtcctatttctatggcgagcaatagctggaatatgaaagggctggagaaggaggttctgcgggtgcaggaggcggaggaggaaaaggaggttgcgattgaaggaggggaggaagaggatggtatcgaactatcgatgcgagatggtgcctagtcgggagatttatgtccgatcgtgatgttgattttgaaacaatgcagaatgtgcttgcatcgctttggaaaccatgtatgggtatgtttgttaagaaattgccacctgatagatatctttttcagttttaccatgaggtggatatacaaagagtcattacagggagcccatgaacttttaatagaatgcagttaattttgtcaaggctacaggaaggagatgatccgcagaagattttattaaataaacttgatatctgagttcaagtatatgacttgcaacctagatgtatgtctgtaagtgttcttcgaaatgtggctaatgtgatgggagcatttgtggaatcggatcctaagaattttgtgggagtttggagggattattttagagttcgagtgactctagatattaacaaatcgttacgacggagaatgagattgactaaaccggatggttctactttctgggctacgtttaaatatgaacgagtgccaacattttgttttatctgcggtattattgggcattccgaaaggttctgtgtaaagctttttaagacgccactggatcagatagtgaagccttatggggagtttataagagccaagttccaaaaccgaaagcaaaatataggggcgagatggctgagaacaagaggatggacttcggggatggtggtcggcgagagtagtggaataggggagagggggcaagccgatgatacctatatggaaagtgacaatcagggcacggatgagggagagattggtggcgatatgaatggagataatgtgggatttcataatcaggttgttaatgagggggatatgcaagttggtagcaattctaaacatggaaagaatcctgtaaatgggaataatgaagtgaggaacgaggcgccagctggcttacatgccaaggggagtgttgtgatcctagataacaaaagaagaaagtcaacagagttagagaaagaagcttcgggcttggatctggagagtaatgggctttcaaaaaactcggatttggcgggtctctcttatggggctcgcccaacattatgagtattataggttggaactgccgtgggcttgggaacccacgggcctttcagttcattgctgagcttgttgttcaaaagaagcccaatgttattttcttatgtgaaactttgtgttttaaaggaagagtagaaaggctgagtaatttaattggttttgaaggatgttttgtggtggatgtacatggaaggaatgggggagtagcgttattgtggaaggagaaggatgacatttccattaatagttactcaagaaatcacattgatgccgaggtgttgtgggaagggactcaacggtttcagctaacaggcgtttatggagagccaaaccgaaatcttagggccaatacatggaggttaattcgagagttaaaggaggagagttcgttgccgtggtgcttaataggagacttcaataatgtcatggatcaaaagtgagaagaaagggggcaatcgttatccaaattggttagttgagggctttcgggaaactgtgggagaatgtgctctacaggatttaaggttgtatggtcatccttttacttgggagaaaggaagaaacacggctaattggattgaagcaaggttgaacagggtcttggttagtgaagagtggctgagaatttttaactttgcaaggttattcaattatgatgtttctccttcggatcacacgaacacacatttccgaaataaaacccagggaaaccgaaggttcaggtttgaaaatcagtggctaagtgaccctggttgtgaggaggtggttcggagttgtttttggaaatatatttatccaggatcttag

SEQ ID NO: 308678 - DNA, 1019 bp, Cannabis indica
gcactgactgtgtttcaactttttttagaaaaataaattaattcaaaaaaagaaaattaaaaggaaacttttttttttttaattattatgggcaataaactttgtaaaagagtaggtatgtaaatcatcattaattaaacaagttattttacattatatatcctattatttaaatatttaacccttttagaaagttattaattaattaaagttacaactttaccccaatcagaaaacaaataatagtgtttattggcatataattttagggtataatactattgattttggcatctatttttctttgatttcatgattaatttaatttaatgagtggtaaataaatgaagttgtaattataattatttcatctcttatttcacttataataataataatcaattgctcaatttaaatcacaattatttaagaacatcataattttttttaattagcatataatttggagattttattttattttataaattataggactttaattcaaggataataatgatatagaattaatgagaagtggaataattaatatataaagttgaaaaacattcttaaaatgtgttttagattccaaaccaaattatcatggtagtgttatatcagaatatttttagtgtaattatgattgtatttttaataacaaattaaatagtgtagggatatacatgtcattttattatggtattaatagaagaattaatggacttgagaggagacaaaatatgcaaataacaataaataaaaatacacaacaaaaaagagtggagtctttattattattattttccaaaaccctagaaaaaattatgtcaccaaatctaaaaaacaatttttttttcttagagaatgtgaaaaaagttttgtagaaaaacaagtacgtgcatggtgaaacgtaattttttttacataatatacttgttttgggtaaaaattaaattaaataattgagccatgaatttaaaaataaaaaaaaatgaagtaaataataaataataata

SEQ ID NO: 308679 - DNA, 1304 bp, Cannabis indica
tccttccactttttcagtgtctgacgaaggcagtgatttccatctagccatagtggatcttgaggagatttctggaacattgcccatggaagtgcctcttgtagaagggaacctcgaagaccccatcctagatgagggaccttctgaatccattcgatccaagcgacgttgtaagggaaaaggcgaagcccgcgttgtgtctctggctcctctagttctcaataattctatctaggagatggatcaaaggccaaatcagttaaggaactacggtctccttgaagcatattcaattgatggaggagtatgaaacatttcgggacttatgtggcactggatgtctgttcttggggaattagcatcccaaagtatggatggcttcaaagtgtggaattgggcccatatctcttgcaaagcccaccttctgcttaggacttacttatctaagttttgtgtcaaagctagaatcgctgccttccaggtcttgccagttgcatacaagctacttgtggggtggtttgtattttgtatgtcccagggacaaatcgctccagccccagaggaaatatgatacatctacgagttaaaaccgcaactgatgcgtggatatcccataaatattgggttttatcgtctcaggaaatataaacatgcccggtgtcccaggagcacttcttcttattgcccagaccaccgcgagtactggtttttcacaatttgttttagcatgtttaaaatttggtacatttttcattactatttgaatatcattttgtcaaattatacttaaaaaatgacaataccccaatcggtaaagctttattgtgtttcaaatttctgacaatatttagcatactattagagcaaatattttcaagagtaaaatatattttaacaatgcattatcaatttgacacactattaaagattctcttatatatgaatttgaattgtggcctttttgccaaagatgtgggtggctagtattgccctcattgaataaatattagcactaataaattattatttctttgaaaggaatattaactttagcttatgaacaaaactatatttttgaatggggtttcattacaaatgacaaatgagtgtgagagaaatccaaatttattatccgtttgcactctcctaggaaccttcataagctaataactaaacaaattcctcaattactacattgtttttggagttaattagaccaacccaattatgtagagaattgttatttagtagcttaagggcctgtttggtacgcaggattagactggattggactgaaaaggatt

SEQ ID NO: 308680 - DNA, 2022 bp, Cannabis indica
gtgtaatgccttggccaaagaagctatacatcacttgcaatgagttggagccccatcttttcatatgttaatttgtaaagaatgttggaggaggctccatggtccaccaaagatatcgctacagtcatgttcccgatttgtatagtaatgataagggggtcattgtgtgagaagttgactggagctgcatgttcttcggtgaaggagatcatgcgctctatgggattttgttgcttagagctcttgcctttgacagttaggatatcgcttttgggctcgtaacagagtgtccaagcatagtgctcccttgctttactgatttcacctgtaatgtggggtccacctattatgacccctaggtgtcctgccacaagaggtggcattggatatctgttataggcaccttgtacatgagtttggtcatgttacgaataatgacgcacgttgggattattatgccttataagatactcaatctccctcttcaaattttgacactcattggtgtcatggccgaagtcatgaaaattacctacggcttttctgttaggagggtgaattaggtgtacttcttctccttattcttttgtggcatgggagaagtattaaaccttcccttttttccattgttcctcgcagatctgttggtgccacgcttatttctagtgtttttacaactagaagtctgggcagaatatctagtgtcttcttgtgcgcttggtggctcatgatatagttggatgcctcgtgactgcctattattgacatgcgccgcctgggcctgtcgtatggcttcttgaagtttgataaagtcgtcagccctatcaaggaactcattcatgttattagtagagattctttagatatctttccagaagtcattcaatgggagtatgccccctagtatggacgtataacaaccttcttctataaggcatttgactttggtagcctcagccataaacgactggatgtaatccttaaaaggttccccttgtccttgtttgactttaacaaggtcttctagttgtgatggtaaaagtctcgaggacgagaaatgtgtttaagattctcgtgagaacttagcccatgagttgaatctccctagggagagtttaaagtaccattgttgtgttgtctctggcaatgtggcttggaatatgcagtaccagtaaccttctagagatcgagttgcatctcaaagtatttgatgtgagcaagtgcgccgtctcgaccagtatacatcttccatacaaacatttgaactttggcaagggaaagacatgccgagaattgtgatccccttgactgatcaagttcaaggtcttaaggcttcgagctagctatgccttggataatgtccctaacttggtcaaattgtgcttgcacagaaggatctgttgctgtggggacttgacgaattgtccctccacagggacgctgtagattctcaagagacaggggctgactggccataccctaggtgagtgtatggtgaaggtcaactagtctcgtgttgaactacagaccctaactggccattcccatgtacgggagctggcctaggccgaccaggcctacatttagctattttgcttggctttccaaacctacattgggcaggttctggctgcccattaatcctccatggctagcaaaacctgcaaagggcaagggccgaccgcccgtgatgcctgcatggctggccagacctgtagaaggcacgggttgtcgcccgtgacttcacgatctactaatgctggatatgtgttaatgggggtggatcacactaattgttggagtttggtggatctagatgcctaaagtgatcgatttcacttcttgaactttcattttgggtgtttccacctattcccagtccttctaggttgaagattgacctctacgcaccccgtccccttagggaggaactgttgtactctgaacaaccatgggtactcctgctaatggttggccggccaatggctgcaaaaaaggggggtgttgttgagctagagatcc

SEQ ID NO: 308681 - DNA, 1003 bp, Cannabis indica
tttttttttttaatttccttatctcggttcccgcttccctaaccacacggcctaaaaacaattaattttcccaagaaaattcggagctgattccgagaaaattccctggggagagaggaaaggaaacagaaagcgggtgtgtttgagtacaaagaatggtataaagctaaaccgtaatgggggaactagggctcggaggaagaattagaggcaggaacaatgatcgaggcgatgatcaaggaggaagaagaggagagagaatcagaatcacagaaagtagagagagaaaatcacatatattttagagagagaaagagaaggaaagatggaaggaattcgccgatgatgttgttgttgttgtttttattttaattattgctttcaattttaaaaaataaattgtttggtggggccaccgtctacagacggtccgtcttttttcttaaaaaggttaagctcactccccggcacgttgatgtggaccaattcaggaacacgtggctaaatattactagttcgtagagcgatgtgtctatttatgtggactctggacatttgtgatgcgctgttccttacctcacacaatcattttgtcttctactttaacatattataccatttaaatttagtccataatatgatttattatctattttatcttattttagaatcatatattaaaatgtattaattatatttattttgttaataatttttctttcaataatctttataattattggatgatttatatgccttttaccagcatttttgtgcattttatggcttttatacattttacggctttcgttatagcttgcctaaattacttagggtagtttagagcatctccaatagagatgctatgcgagatgtttgatgacatagatatatttttagcattttttaatagaattattacataaaaaatacaacttgacacttgttgaccgaggttttcagcaactaataaaatacgattatactattgagctgtaagaaa

SEQ ID NO: 308682 - DNA, 1409 bp, Cannabis indica
gcattaaccaaattaagctgaaaaatgaaattaagagtaccccttaatccttattattttaaaaataattatccaactagactaaccaataaccaccacattgaccgaaaatgatgttgttgcattggcagaacagaataagaccatgaacagaaagaatggacacaacaatgcagccgtgattattatgtacaaagggaaaatctttttcttttttaaaaggaatgtctataccttcgggatcatatccctccaaattttcatgtacacaccgactgaaagctaaaacttgccgccaagtatcctctgagatattatgccgctgatttttctacaaggaagtagattagtattcacagaaaaaaaaaaagcaagataaagtcatgccctagtaaatcaaactatttgtggcttcacatgattccaactattgaaaagtagagcatcatgccatctacatacctcaacaaactcacaccaatgattaagcaatcgaaaccttccggcaagaactaatctccatgcagtaacagccttttttacagctgcaaatattagttaaaggggtcaaacaacaatgtgtggatcaacatatcagtaaagacatttcgttgtgaatcaacaaaacaattgaaaatgtaacatagatgggggaacacttactgatgttcttttgaccattttcacggcaaagaaagaaaacaaattcatagaagcgtgagaattcggaaaaatcaacctgcaaaagaaaaaaatcaacacaaagtaaagaccacgatatgctgattaacaagttcaagggacacgcaaagcatcaacaagcacttgttgaagagcatctacaatctgttatgcagaagaacataaaccttaccatcaagttgagttgtgacataagcttggaaattccatcaaaaacagacgtcctggcagagaaagccattaattttctataagaagacaaaataataggaactatttttcctaatggtagaaaataaaagaatatttgacgacacttaaatagcccattggagtttagccattgaaacagcaaacattctaattaaatagttgtccaatttttataattttgagctaatgcatttcaacaacagctttataggagcaaagtgccacaacaaaattgactagttgcggagctcaaatcatttgaaacacagctaaaatactcggacaggtaacagaaaatcaatcagattttccacaaccacaatgctgtttgacaacctctcaaccccaattttggtagtttatatacttacattatataatcaaagttcatggattgtgatagcataccttccatgcagtcttgactctccatcttcgaaagctgagtcagtgcctctcgtgaacattgagccatttgtaactcctcatttttt

SEQ ID NO: 308683 - DNA, 2337 bp, Cannabis indica
aattattttgtaaatgaatagcaaacttttataactgaatttttgtaaacgggatcccaatattttaataatataatatgatatggtttaattacaaaaccaaattttaattattcacgttttccaataatctcgttgattagcaacgagctgcacagtacgttaaaaattacgttaacacgcctatgctagttagggtgttacaatgaccgttagaatagaagtcagacggtcacctttatccctagcttgagtaaggtaggcgtatccaagaaggaaaaacaatggactaacaccttcgtaagaaaaatgaataatcaccatgcacccacatgccaagttagtctaaggggtagatgacactacccctaccatagacataagggtccactcaaaggtagatggagacatcaatataacactataactactgacaacgtacaagggatcttggggggtcaccctgagatgaagattgtcaccctcctcaagttgggcctccggaggtcaccccgcgatgacgattgtctccctcctcaagttgggttttaggggtgtcgcccccaagtatgggcttcatccccaaaagtggtcaacgactgtgtcacagccttaggagaccctcgtcgtcagtgactatttcaaatgttcaaatcccatgaaaggctcaaagacagttgtcaacccacaaaaatagcgagatattatcataaaaatcaaacttcaactacctccaaaaatcaaggagacagttgaggtagctccacattggtcgcgtctcctgaagcgagaagcaccgaccctttcctctatataagggtcatccatgacctgggaaggggatccgcaatttttgagcacttagaaaaaataaatactttttcattctttgcaatcaagagcctgttcttgaattttgtaactcagattaataaaacacaagatgagagtagatatctgggcgaacctctttaaattttggtgtctttttttacatttattgaaaatttcggtgtcattaattgcctttattgctgcgcatttagtttaagtctcatttattacgacttcatatcagttggctaaaaatccagtcaacactattgttattgttattgttgaatcaaagattgttattgttagacctaaattttcgttggtttgatctgatatatatatatatgtagatatacatatatattgaatgtgttggtttaaaattgaccacaatagtgaaaatggaattttcttactattgtcgacatttataaagggttgtaaaatttcaatactgactattaagaactgatgcctattctgttccatttgcgttggtggtataggcgtcgattttaggaaacgacactaatactatagccgactgttttaaatagtcagctaatttttttagtagtgtatgtaaatagtgtgttcaaattgagtgtgtcgcaatacaaaatatatcatttatgtattttattttacaaatttgacactacatttaccatgaacaaggtttaactaaagtgctattcaaatgagtaatgatatatgcacacacttacgtgttattcaactaatcaattttatttaagatggatctcacttattaaaagtgacttgccatatatgtgtatatgtcaagtttatatatgattgatgtgtgcacataggattttaacgtattgatttaatccagatttttatttttcaaaccaaaccagtattacgatttttaatattcaaaacttacagaccaattaaatactcaaaccaaactaaatcgatcaaatttataaatggattgatttggtcaaaatcataatttgtaactattctttttttttacacacaattttcatttttttaaaattaattttgttttttagtttttaaagtttataatacataaataacaataaaaaaatattctcaaaataatattaaatcaatatcaatattatacttaaaattgttctctcaaatatcactatttcataataataaaaaatttaaattatcagtacagataaaaaaaatagacaatttggtttggttttaattgttagtgagaattttaaaattgtggctaaatcaaagaattataaacggtctaaatttactaattcattataccaaattcattatataaaataatttggtttggaatggttggaatttgaaagatttttgtttgtaatttgttttacgaaattaaaagatagcaagaaatatctttgcaggcaaattatgtgcatgaatatagaaaagttttaagtaatttatatcaaggaaatttgatttttttatgcattttttatacttaaatttgttccc

SEQ ID NO: 308684 - DNA, 3043 bp, Cannabis indica
ataaatttaaaaatctataaataattttcataattaaacataattaaatgctaatttccaaattaaactaagcggtctttacaagaatattcttcgatagcagccatagcagaactcaacgtcttaaaattggtataccgaaattaaaaaaataatataattggaacgaattaccgatagaataatctggctgagtcacagacaatgtcactctctttaagatgtttcgcggttctgcccgaagtgtgcacacagtctagcaaccacggcgtccacaggataaaacagcctctgtaaaagtacgatacgttctgcaccgaactatatcgctctataacaccctaaaatttgctttgagaaaaatcgtaaggaagaaagaaaataaattttaatgttggaaaagatgtattcttacgttgttctgatacgacttatatagaagtcgatccaagaaaaaacggtaagaaaacggtaatgttatcgttcgtggaggagttggatcgtgggagtaaaaggcggatcattgactgatcgcattttaccacttctgatcacgtgttaaaattaattaataaataaataaataaaaaataaaaatgtattaacctcaatttttaaccgaagcaaaaaaaattggcttcagttttccactgatgcaaaatataaaatataatttttaaaactgtcacatttttcctcggttctactttttgcattggggaaggaacccacgctaattagtattttttagcttcagttatgctctgaagcataaaatctcccttattttttgcctcggtcaaccattatggtaagacgcgttgaccgacgttaatagtacattttggagtagtgatttatagttatatcttttatttttattctgtttcttgctcttttgcagtttatgtacgtagatggaagtatttgtatggatattctacagtggtgacaaaaaggacacttatatactaattatataataggcgtttttctagttgaagatcgaaaggcggatacataaatatttagggatatgattttgtcccgttattgtactttcacggattgtaatcctaatgtacgacagccgtcagatgaggaagttatttgatctgacggctgagattgatctagggataattagggttaaaaagtagaaacgtaccatgacacttatttaatgtaccctgagacccatctaatgtaccacggaatacattccgtgaaagtacatcacgaaacaaaatcatatccctaaatatttattaaaataggaattttgttttattagagattcaatgaactcctactgtcttagtgatttggtgttcattttctgtctataatatgttattaataaacggttaattttaataatatatagtcataatgaaaaaattgattgtattttattgtttttaattaattatcaatttatttattttatttaaaagttactattaggggtgacttctgtattttcatgttgcatcgttttaaaatcgacactaaaaactcaacaaaatactttaagtgtcggttataaaaaaaaaaaaattgataaaaaaccttttggtgtcattttgtaatagacactaaaaacctttaagtgtcagctataaaatgacagctataaaatgacactaaaaaatatatatatatatatatatgtatactttaagtgtcgattgtgaaacgaaaccaaaactcaaccctattaatttggaactgacataagaaataatatgaccttttatcactataacaaatgatgggtttcataattgacacttataaaaatttaattataatttaaaaccgataccaaaaatacaatttgtatagtagtgtgattcatttttattattcaatattgatgagtacaacgactataccacttatgtggacgtacgtacgtaattaaaaaaaattgactccacatctgtctctatatattatacatcttctaatttgatggccacatgcgccgtctacctaacctaataagataaacaccttttgtatattcataaagtttggtttttgtgtctataagtacaccataaaattaatatatagtgacttcagtaacattatttcttttgcaataatcatgaatattctcacatcgatcctcttgttagttcttttatgtcttgaagtacttttttctgctcatgcaagaatcttaccaggtaattatgaattacgtacaaatgtttaatagttcctaatatttgttattatcattacaaaatttgtgtctaatactctttcatagttatttttttaacagataataataataatattggtggaggtgaacaaattaagaggacatttgacatcataataagaacataccatgggaggagtaggatcattatgagtccaccactactgtcgattccatctctggccaagaaacaaataacagctgatccactgaacgatacacctaattcttatcattactactacaaatcaccgccacctccggccaggaagaagaccttatcatcgtcatcaacccaaaaaacagccaacagaaccgcaaaaagcgttctccacccccatctcctaaaggagcgaaaccaatcgttcatgataactattggcaatattattagtatgttaatgctaagtagaggaagactttaattgtccggtactgtttattttaagtttgtaatgtgctttaattatttattgccctttttaaataaattaatcctattggagtagaatggagtcgctagcttaattgttagttacatgtaaaatattattttcagctcttgtaacaataatgtaatttacccattagttatatgcttgtatcagtttgttatattacaattgtccgtcttcataaacaaaatgcaattgcatagcttatttaattagtattacattattaatgaaataatatatatatatatggaacatttcttaatgggtattaccaatgaatggttactaaacaaatttaactaaaaattaattttaaaaatatcaaaccatcgaattttgatctaat

SEQ ID NO: 308685 - DNA, 1102 bp, Cannabis indica
acataaacaatcactgaaatagtaaaattgaaataaattagactaaaagtccttaaatccaacaatctcaatagttcagggggcattttcaatggccttaaaagttcaggggcataatttgatacatatcaaaattcatgggcaaaaattctaattagccaaacaaaaataaaaaaaaagtgaagaagattgcgggtgacattgtggtacccagatgacctcctttcaattgctgtcctaaaaagagagagtggtctttactttggttgagatcttggtcactaagcagtttgatctaaaacttgctgatatcaacatcaatttaaaacaggttatatttaattttctgtacgtactgttttatttgccatggcagttcagtttctccaactctcttgtgtacacaataaataactaattaatttagtttcatattgactactggcctatatatacatatgtgttttatagagttattattgttggaataagaacatttaaaatgtgtgggagaggattaggtattgccaccaaaacgggcattgcacatttattaaaatgacaaaataaattcaaagaattagggtagaaggaaaagaaagtatataatatatttttgtttataaataaaaaaatatagtatatagtgagttaaaatcacctgcatggaccccagaaaaaatgctaaactttatatctgagtaagtattgggcagggtaattgtatctacccaaattagtggtttggtctcagtccctttctcaacctttaatatagctactttatattctccacccacctatcaatgtcttcttcttgcgtgctgcttgaatttctttcataaattgcattggaaatgcatttatcaaattgggctatttatttgattttattataaaatttcaatgtataaaaatctcaaatataattcaaaatgtacccactactcacaatcgtgggaatgttttataaacaaaccatcaagattatatcttggttctatcagtagaggcaaaattgtgaaaaaagagtttgatataagggaagcaaccaatgacaaccatattaaaactgttccaaattcttgataaaaatttagaa

SEQ ID NO: 308686 - DNA, 3738 bp, Cannabis indica
actatatctaaaacattatccaaataaattaagtatcaatacttaatattttttttaaaaggaaaaacagaaatattcattaataggtaaatcgaacaatgtccattacatgatgatatcactcaacgagcaaattccacaatagtaggccaaccgaaccgtttacaataataagaaaagaaaccctaacaacatctccaacgaaaggaccactaaaccgctacctttgaaatatcaaaaaatgtgaacaatacaatggcaaacttttgagtatagtggaattgggaaaggagatatagattggttgagaaatttgtgtgggaataaataatagttgggtattttggcaaactttgtacagattgtaaagattgattgagcaatacaatggcttatttacaaaattatggatagcaaagttaataatagtgattgattcttatgttagatttgttgatagaagtagtatggtaactatggactacgtgttagtattgtgttttggttaattcactttctaagattattataataatataatatatttataaaaaaaaacgtaaaatatttattgtctatattttgcgaatgtaaattatattttatgtacatatgaaagtttgctaaaatttagaatgactcttaagaaatgggatgggttgggttatatagagttagagtgtgccaaacccataattatatgtcttatcacttttcagcctaatgagccatggcctactcttaacataaccatttactacaaaaaatgggttgagttggctgggttaaatagtttggcctatattttgtgcacccctaattattaccatcggcataccatgtatacttcttagatcgagttaatccaggacaagaagaaagtctgcaagcttaataggttcatttatgaacttaagtaggtttctcagtcctaaaatagaagatttgatgagatcatcaaaacctatggctttaaacaaaacgaagataaacctcgtatgtaccaactcaaggataatcaagtggtagtattcctagccgtttatgtggatggcatcttgatcattggaaactatgtcaagaagttgtcagatgtgaagggatgactatgcactcaattagaaatgaatgacttgggtgaagctagctatgttcttagaatcaaaattataattagaaaccggaagaaataaaacacttactctctcacaagcagcttatatcgataaggtgctagagtgcttctcaatgactaactccaaaggggctcgttggccttttacgcatggagtacgactatctaaggagtagtgtcccactactccagatgagatagaagaaatgataagaatccactgtgcttcaacagttggaattctaatgtatgctatgttgtgcactagaccaaataatttctatacagtgggaatagtcagcatgtatcagtctaatcttggaaaggaacattggacagtagtaaagcatatactaaagtatttgaaaaggactaagaactatatgctagtctatcacggtggtgcttaagaccctttaggctacacagactcagatttccatgcttgtgtcaatggcagaaagcctacatctgggatcttagctaggggtagagcagtgatttggagaagcatatattaagcagtttgcaatctgtgattccaccatggaggatgagtacatagctgtcgctgaggcagctaaggaactagtctagttgataaatttttttttacagagcttgacgtatgcaagtgagacactctttgggagaaagagtgcaagtgctacaatttgaagggagttcaagatctcgacacttcagaaatttgattaggagtatagattacaacagtgcgacaaatcaaacagggagtctttatttgcataagtcaatttagtattgtaatcactttaagattcttctaataaattttattctctgggcatagtccgtagactagtagcaatctaaaaaattgatgataccacgtataatttcgtgtgttctttactttatgtttgtttttactttctgttaattatcagtttaaacttatttctgttctattcaaacagtttttgtgtctgttttaacatctcggtaacagtatattaattaattatttaatttgaataattaatttggtaattataaaaacaaaatttcaaatttcgtgataacttaccttttcggagctaaaatcaaacctctgcaccccaaaccctgtgttagcctacctctagttcaaaattgtggaatagagaaggagggaagaagacgatgggctcaactatgttttgtttgttttatttgaggccaatgacgtctataacaatgttaaacgtggcacacaggccacaaccagcaatgttggaacatgaatgagttggacgtgaaagagattcccaatgtgagattatctttcaagtccatgaatatgcggatttacttaattttcatgaccatcaaagctggttacaaaaatacctttcatgacctctcatatcatgatcaatatccaggagacgtgaaaatagatttcataaaatctttgataaaacttattgtcaattgttatacttcatatttattttatgttttgaatattctaatttcaacttataccaaatagaaatttaaaaatagactatagactatttgatctttttaaaaattttacaagtgatgttaaatgaacacaatgtatagggttatgaaaaaaaactgcactaatttttttttgtataatatcaaatcttccaaaatatcttcatagaaggtgtaataataaattttccaacatgatacatttaaatatgtaatttaatacaggcatggttccaacatgataatatcattatcgtttctcaataccatacataacttatacatgagcgcacataacgagaatgtatttattatattaggatagagtacatttatttttgagcattgttattaggcaccactagtgcctagcactttctcgacatgtcacgttgtgattggctagcaatattcctaaaaactattatattaaattatatggaacccgatacctagttggaccaatagtgatattaacacataagaagataccaaacaccactggtaccctttagcatttctcttcattttttaaacttcacttcctcttttattatattgtcagtgttatcttcttctggataacattaattattctagatagcaaaaaatctaattaattattatctttttttttttcaaggagtgttattactattaatttcatatttaaattatttagtgccgattcgaaatacatatctaaatattttattcgtcttatggagatatttgttaaaataaggtccattcaaatttttaaaaattctaaataacttacagtatcgatgatagagctcttaatattgtaacactactacgaaaaaaaccttttactttcggttttatttgaacatttagctttggttttgataaaaactcgcaaccgaagttattcgaggcgaatcgaaagggtttgacataaactgaaggcaaaaagaacccttatagcttcacttatttgctaataatcgaaattataggtattttttttattatttttattttttgtttttagttcaaatggccgagaatggttagagagagagagagtcatatttggcgaagagaataaatctaaaaataataccctaaatgatattaacaaaaac

SEQ ID NO: 308687 - DNA, 1430 bp, Cannabis indica
aattattaaaaaataaaataaaaaaatgcatataaatattaaataattagtaatatgatggtaacataaaaaaaaaaaaaaaagtgagaagtggaggaggattgatagggtaaaatagacttttgttagtatggaattagctttcaagtgattttatagtggaaaagtaaatccttagtttaggtgaattgtaattcctttggaatgggctttcaagttctaataaagaaaccaaacacttgattgagctttcttaaggaatagcaagtccattccaatgcttattcatgtgaaccaaacaccacctatattccaataaacataacacttttataccaaaacaaaaaccttaggtatggatagttttgcttgttattcattgatattatttggattgggaaaagaggcaaacttttttatttattattattggtactacatattatattaaattattaatagtactaacgttcacattactcattcatactcttgggttggatcaatgagaactagatatcaccaccagaggggacactaccaccaccacaaaaataggcacatatataaatataaatatatatgataactctacgatgcaacttcttaaaaggagttatctttttttaaagcatggtagaattttccaaatatatatatatatatttatagagatatgattttgtcccatgatgtactttcacggaatgtattccgtgatacattagatgggtctcagggtacattaattgagtgccagtgtacgtttctactttttaaccttaactacccctagatcaatctcagccgtcagatcaaataactctctcatctgacggctgccgtacatcacggattcaatccgtgaaagtcaataacgggacaaaatcatatccctatatttatattatatatatttatatataaacttgctaattcaaagtcccaactactcaatcacgggtgattgatgaaaaatgcaattttttagtaagagttatttaaggatgaagtttggcaagaaacaattattccacaatggtagttggaggtagtaaaggacttttgaccctttttcatacaacctctaataagtatctttacttgatcttctttgttgtttatttaagaagagtgcttaaaaattctttattacactttttcttacatctttatttgtgaggactattttttttaacttggtagacattatttgtcaaaatttatgtgtgagcatattattaatccacctagatattatacaattattttatattataaataattaacaaactagacatgtttttatttattaatatagtataaaaggaaaaatttctattacaacccttaaaaaatgttttggtagacccctatttatttcgtgaatcaaaaaattcttttagtttaattttttttttcatgataat

SEQ ID NO: 308688 - DNA, 1724 bp, Cannabis indica
attctaaccgagtctgcatataactggattgtcctattttttttggtaaaaaaaattccatatataattcgttctttttctgatctctctcaacaaactaattgtatatgcggtttaaggttcaatttattttatatatatatttttaatttctagagttatagttgtgattatatatagatctatagttgtgattatatatagagttgaaatttgttaaatatcagttcaaatattaataggatttgttttattattattttatgatatataaataatattttattattttattaaataaaaataataaagtcacccatgaatttctcataaaccaagaatttcagttatatatatatatatatatttataactttgattataagtacagtttctctgctataattaatgaaattgcaaactagctagaaaatgtcacgatatatgactcgggtagatttattatatagaaccatatttatagaatcatcaatattataatttataagcaccaaattaatctacttatagttaattgcatgttctgatttagtctattttcaccgttgaattttaaaatttattagtcctactccttataataaattacatattgggaaaagaaatttgaatggatatataagacatgtttacatatatataataactattagtttttaattattatagattgttttatgtttattaaagagtgtgaatgaattattcttagagagaacctggcttcttagttaagatatttctcaattaatctatagtgttttgaactaatattacttgaagttttttttcctttgtccggtactttttttatatattttttttataattaaagtactttatttaaaaaagcctaaagccaaagaaggccacctcaaataaccaggagtcatgatcttttcagctctagtccaacattcacactaggagaaataaaaacaacataagcaaactcaaactaattacacaaataataaagaagacattcttctttaatgcactctacaattttagtaaaaataaaataaaaagccaaacttgtttttccctttttttttgacacaatttcttagctcataagtctctacataacatatattattttttttaatttattaattccttttgaaattatataaatgttgtacttaaatattacaccaagtttttacatttctttttcaatttctttttacatttattcttaattgaaattattaaaatcaaattttcaatgtaataatatcaaattttaatgtgaaataatttaaattaaaatcaattagtgtaacgagtgaagttatctatatttttgtaaataattcaatattcttacattagtttcagagactatattccaatacttttcattgcaaagtagcaatgggatattctaatacttctaaggatatttttatatatatgtatataagatattgttgaataatcaaaacagaatcaccaaatatatagagattaaatattaatgtttatgtttatgcctatttggccaataaaatgggtttggcatttagtcttgagattgattcactttgttctcaatttatttcccaaatgagacagtacaagccatgccaaaaatttccactcatcaattatctctatacatgtcatgcaagcaaagcaagataccttagaagatttttttctttttttatcttttctcctttaaacatagaaaa

SEQ ID NO: 308689 - DNA, 1078 bp, Cannabis indica
tgaatatgattgtcatattttcagcaccataatcagactaagttaaaaaccaaatacccaccaccatatgaacacttagtttacaaagaaaataataaaataaaataaaacaaagattaattacccaaccaacccaaattaaactaatacaccaaattaacaaaatatcccacccaataattaataatacatgttttttttttcttaactaactagccaattagtaaacaaaatctagaaaacaccatatacgtacccctaattattaagttctttcaagtacgtatcaaaaaaaaaaacttgagagttaatgatcataccatcatcctcatcatatcaattagtattgtgatgatgaagatgatgatcaataatttttttttattattgtcaatgtaaggttgttgtggctcctccgtcgactacatcagccggtgggagaaatgagtcgacggagagtcccgggacattgaagacgacgtcatcaatgttccaaaactcttccattctagtccttgtgtattgcatggagagttctttgcatcgaaagattgtggcaatggatcgagccttggtgggcgatgagaagaccgtcgacatcccggtaatcggcaatgctgctaccaatggtggtttcccaatagacatcttctggtgctgatgctaatacgacgtcgttctgatcaggagattcaaccctagttagatgggaatcctctaaatagactaagaggccagttttttgacagaagtatccgtacaaggcgtgtcttataacctctgcatggccctcacttcgttccatcacagccgcacgatctgcacacactttcaaaacgaaacagttgttctcccctatttgtttctccccaagacattgtgcgttagcaaataagcttgctgtgctctttggatctaggccctgtaaaaacattattatacaatttagagggctatatagtaaaaaaattatttttggatcctaaattaaaaaaaataaatatatgatatttttaagaatttgtaaaaagaaattatgtaattttaaaagagataattacactacatactaaaattt

SEQ ID NO: 308690 - DNA, 1088 bp, Cannabis indica
tagcttgatacattatattgactttatatatattgtttacacagattatggatcctgtctgttcaagtctcaccaggttgatggactctgggttggccccctcgccagaggattaggtcaaaatcaactgcgatgtcaaagtcggaggggaaccatgtgcgttgtggcgattgcgagggaccatacggagtcgattttgtgggtggcgacaacaagctttacttctctgatcctcttatcagggaagcggggacttgcatgttagccttggagacggcggtctcgatgcatcatctttttgttatggtggagagtgattctgagattgtgatcaagaacctaaaaggtgttgaatcgttttggaggattgagaactacacaagataatgtaagcatctttctacttttttgacaatgtttctggtatggtagaggtttctactattccgaatgctatcttttgtaatggccgtgaggtctgactgtttttatctaatatatatataaatgctttgtttcaaaaaaaaaaaaaaggaaaagaaaatagaggccgtactcttaaaacgacttggtttgttgttgcacttcgcaaagacccaattttttcgatcatcagtgatttcggacttcttcttccctgatttattccttggtttttgaaaaataaataaagatacattcactgaatcacagttgaacaagaagaaaccacttctttcataccagtacaagaaaagcaatgccctagaatttgaggaggaagaagaaaaatggcttactctggatttgggaagcaatcagggccggcaatcggagggggagggcctaagtctccgccactctttggcaatgtggttcggcctccttctccttccccaccaattttcaaccctgttcctatgcgatctcccaggttctctatctctttctctcagctccatcgattgttttgtcactttttaattgccttaaaagaactgttttttagatgaacatttcgttgttttcttttctctttttaggccagtagagtctcgtggtccccctcccatttggggtgatgggcaaagaccattttatcagaaaaa

SEQ ID NO: 308691 - DNA, 2426 bp, Cannabis indica
ttgtaaaaatactagtctaaggattcaacaaggatttagaagaaaattgtttagtaggatcaaggtaaccctatctcagcttaactctttaattttgtaagaaaatattggtcttgatgcatgttattttggtttcagttctattagggtttggtgaagttagaattaagtgtggggattgaattatgttagtttgtggttattttgtgaagcttttgatggaaatagtgtgttttgagctaagtttgagtttttgaactcaaacttagctcaacaatggtggatttaattttagtgggtttttgatatctttatttgatgggttgtgtttagtatgcttatttgagatgttctcgaaagtttaagcaggtttagtttagatttgaggaagaaaatcacaagtttgtgatttctagacagaaacggttaaccgtttctacaaaattagtgaaccatttcatcgggcaaaaccctagtaaatggttaccaatttagggatccggttacccagttgaggtgatttttggggacctcaatttttgtgttttattaatatttagggtattgccaaattatttatcaatagagaaacttcatattataagtttaagtctttaaaacgttttacgtgaatgtgatttagggcctccgattgccgagcagtattttccactctggttgatcgacacacctgattatagaattgagataagattagtataacagatgcacatatggacatgtttagcatacatgttaatgctttccaatcagataacatatcagtaatagtggtattcgtgtacatagagttacacctggatattgatgatatatatgtttggaaatttaggaagtaggaactagtgttactaatactactacgcctagagtactgaatgcatgtggtattatggctagttgtacttaaagtatgaatttatgatatcacatcagtatgactagagtgttgagtatgtgctgatattatggtcaatcatgttatactcaagaatgtttgagactcagttatacatgttggacgcgggttgtagactcatggtaattaggtgtatgggcacctaattacaagtcaattatatgtttatgtcttatgcttttcttacagagtttgttgactcacaagtatgtttttcatgtgtaggtaaaggcaaggcaaagattgaatagcactgagtctggagctcaataaagattgtacatatctctagggttagacctagagtgtttggatcttctagacaacacgggctcagattttgttagtcacctggcgacactttttgatatgttgtattttgtatgtttttgaaaaatagatttggatcccataatttgtaaactttaagtatttattatgctcatttggtaaagttttatttaaacaaattttacactaaaccctttgattagcaaatgttagcacatcaattaagaaaaatacaataacatgtctaagctagtcgagcattacaatttagtatcgaagccgttaagttattctctgaagattgccaagataagtacaatcatcattagagataagcttgactcacaatttagtaagcatttacatgctttagtagtttgaatcacatatgcatgattagaaaagtatgataggaagcatgtttgcagtttgatagcataataagagaatgattaagtttccatgtatgcggtaattagattacaattttgatcattgcctgaccgatctaacttatgaattcacaagctcgtcctagagaatggatgtttatcgaaacacgagaagctaggttgatatggtagagggtggtggtagtaagggaaatcagaatccccctcatccccatggccgaggtagaggcggtagaagggattatggcagtggtaatgtaaatcctccacatgctttgccttataataaaaccctttgattagaaaaagttagcatagtaattaagaaaacatcgtagcgtgcctacgctattagggtattacaatttggtatcaaggtcatcaagtttttctctaaagatcgttgagatatgtataatcatcatcagagacaaactcaactcacaattcagtaagtccttatatgttttagtagtttaaatcagataagcatgataagaagcatgttagtagtatgatagcaaaataagtgtatatttaagtttccatgttatgcggtaatctgtatccaattatgatcactggatgactgacttaacttatgaattcatagggcttgtcttatagaatgtacatttggagaaataatagaagtgagggtgatatggtcgaggctagaggtgtttgagaaaatcagatccccctcatgcttatggtcgaggtagaggctattgttgggttttatgccctaaataaaactctttacaatctgattagttatc

SEQ ID NO: 308692 - DNA, 1227 bp, Cannabis indica
taatctggattacattgaaacagagttttatttagggcataaaacccaacagaaagatcactgggggtatgagaggtcttcaaccatccttccttgaagagaaggattgcttgaagtctatcacaggcctagtgatatttcagcctttggtcttttaaagcaaaatcatcgcttaaatttctatgcaactttagccttccctcgtagaagttgaagtttgcctcataaaaattgaacgtgactctcccgtatcaaagcatacctcagcatggaacgagtccttaagagattgcgtagttttagctttcctcctgggaaaccaaaatcctaccattccacaaaagctcatgcctccaccacgaggtctctatcatgtcaaagggtcacatacaaaacttgtggatggaaatattgcttggaatcacttgaagtctgccatccaacttggtttccacctacaattctagaaataaagccttggcttaaaattcagtcccagaacggctttccctcgcaaaagccaagagatcactgccgaatttagccaagtctctctcaacctttgggaaaaacccctcccaaaagacacagtttgggtgactagcataaactactcctcccagagtaagggttggataaaaacacgcacccaaacctcctcctagggaccgaaaaatggtacatgttggatttcaggcgaccaagagtttagaggcattcaaatatctcggctcatttgggaggtatggtatgcccgattgttgacgactgtaatttcttacactcatttgccaaagttattagctcaacgtgcatatgcaactgaaagtaagaaatgttttgaacaatacacttgaattctttcttcaaaaaccaaacttagtgtaaatttggagatgagatgcgtatttggcaaaaattcttgaaaagaagaatttgcctgaatcctttcttacatatctcaatagatttcctaaaagtatagtttgtcaggtttgcaattagctaaaacttcatgttggcaaggatcaaaataagaaaaatacctaaagtctaggacagtcgcgacgttactcctagaacccaacttcgtaaagaagctacaacctgaaagatgtatgaaaaagtgaaggttctctttcacaaaaaaacaacttctatgttgggttttatgccctaaataaaactccatttaagtgtaatccggattattcaatatcaataaag

SEQ ID NO: 308693 - DNA, 2127 bp, Cannabis indica
ggtaaaataattccaacaagtaaagcaccaggccctgatagtttaaggatttttttttcaagatgcttgggatgttttagggagtgatgtaagcaatgctatcttgtccttccttcattcaggtaaaatgttgaaagatatcaattcaactatcattactttaattctgaagaataagtgcccgactaatattagtgaatatcggcctatatcttgttgcactgttctttacaaggttgcgactaagcttatttactaccagcttagactggtgttgaatgatttgatttctcaaaatcaaagcggctttatccaaggtagatatattgcttttaatgtaatggtgtgccaagaccttgtcaaattttaaggaaagaagaattcgaggctaaattgtatgattaagttggatttgaagaaagcatatgacaccatagaatggggatttattgaagacatgttgaaagctttcaattttcctcaaagttttatagagttgatcatgatttttatccaaactcctcagttcagtttgatgattaatgggcagatgcaagaattttttggagctaagaggggtcttcgtcaaggtgacctgatgtctcttttgctttctactggtgatagagtatttatcccgtggatgatttaaagtatcatgagagatgtcgtggccttcaattaaatcatttatgctttgcagatgatgtgtttcttttctgaaacggtgatttcaagtctatctatttcattctccaatgtttaaagctattctcttctacttcgagtttacaacctagtgagtctaagtcaacaacttattgttgtggaatggatgatgtcaaaatcaaaagaatactagatgcttcgggttttacaaggagtcaaatgccttttaattacctgggtattgttatttgtgtgaagagactgtcagcaactgattgctcgtgtatattggaaaaaatggtggctcgctttagagtttagagctcaaggaacatttcctttgctagaagagtcactttgatcaacttagtcttagtatccattcattcttattgggcgcaaatcatgttatgaccaaagaagatcatggagcaaagcaatgctatttgtagagcatttccttggaaaggaaaagaagagcataatggtccaggttatattttgtgggaaaatttgtgcaaatctcggaaagaaggcgatctgggttttagaatgctactagtttggaatcaagcggctcttggaaaatatgtgtgggccatttcttcagagcaagataatctttgggtaaaatgggttcatagtgtttacttgaaggatcaaaacttgtggaattattcttccaccatgtagagtaactggtattggaggcaaatagtgcatgtgaaaaataaaattaagcatttttttgttgtgataaacagtttttagttcatcgatactccatcaaccatggttataaggcgttggttcatactaatgagaaggtgaattgggataatcccgtttgggagggactatccatttcaaagcatcgctttatactttggataggtgctctacaaagattgcaagcaagagatagactaataaaatttaatatctgtcaaacaagtacatgtttattgtgtgatgttcaggctgaatctgtggagcacctttactttaactatcatttcagcaggatttgtttacaggagatcaaaaaatggctcagatggagatgtttgagcacaggtttgaacatttttctaagatggattgatagagcaaaaatctctaaattttggaggcaagtttaattatagtgtatctatagctgctttggtgtaccacacatggatgattcgaaataaagctctttggttttaatgtgtgcaaaacatcatggttagctgtaatagaattcagcaagatgtcaaagatagaatagctatggctacctcgaaaaagttgaaagaaatagatgttcatcagcttaagcaattgtactatttcttttttttttttttgagctgtttgtatagaatgattttttaggcatttttttaaaaggtgctgctagatgggcttttttcagttttaacccaaaaaagtaacaatattacaaaaatattt

SEQ ID NO: 308694 - DNA, 1243 bp, Cannabis indica
attaagtttctttcaattatattttttgatttaattacttagaaattgtatttttttaattgttactaataaattcagtttctcaaattacattctcttcctttaatataatttgacacatgaatactactaatcatttactatagtagaaaagagagtcttataattagcttaattagcgtattagcatgtgagaatgtttaaataattatcagttttctattataactattaaattaaatatgtatatcctgatacttaattacaaacataacgatataaaatctcctaggcatggtggcctattaacattttcattattagcttatcataaataattaagaagattacatatccaaatcaataacttagcataattaagttcaataattaattatgatttaactttcattcataatataaatgcagtttagagatgtattggggaaaggagcaatgaaggtagtatacaaaggatttgatgaggttttgggaatagaagtggcatggaatcaaataaagttaaacgatgtgtttcgatcacctgaagaagtacaaagactttatgcagaggttcatctcctcaaaactcttcaccatgattccattatcaaattctatacttcttgggttgatgttcatcgaagaaccttcaatttcatcaccgaaatgttcacctccggaaccctaagacagtacgtaataataataataataataataataacaataataataataataatgtctctattctctctaatttctctctctttctcaatattttttttgatttcgtaagcgttcatatattacataatattcgaacccatgaccttcaatacacacgtactctcttatagccacttatgtgctaacctcaagtggttgtctctctttctcaataataaattacgatatcactcttattaatagtgaatgatcctaaccgcttattagtcaaataaacagttaattaagatcgtgtattattgataagagtgaacttcgtaatataattatttgagaagaaagattgttatttataaggctaattagtaattttttcccccgaactttgacatgtactaaatcatgcccctgaacttttatggccgttagaaattccccctgaactattgagattgctaaatttaaggacttttgtctaatttcattcaattttactgttttagtgattgtttaagtactaaaccaagctccccagactttgatatctacc

SEQ ID NO: 308695 - DNA, 1365 bp, Cannabis indica
cacacaaaggctcacttaaacactatacacatgcccgcgtagctattcgaccgacttgaatcggtgtgcacctttattttaatttttcttgggagaaaatttattacaaaactaatgagagaaaaaatcattttcatagaaaaagttatattacaatatgcattttgagcactagtattttttaggtgtggtatttcgacggttttctatagtgtagtggaagttcgatacagtggttcgactaggatgttttatcctcgggatgacgagactgcttgcaaaattctgagcagtactatgaacatctcaaagatagtgatctactccatgacacaacataaatatttattcggtaagttcattctttttaatttatgcagcaactattccaacatgttccaccaataaaatttttatacatcaattagaactgtcaccttcacaattaatagacttttaatgttatttcacaccatttactctttttttaactttgctgaggagaacaattttttttttttttttttttttgtttagtagaagagtttttttttaagggagagtgacccacaaaattacaatgaacaagaatagagatcacttccattctaaaaccaagttacagttaaaaaggaagataacactaggggtggggtgaaatcggtcggttatggtcggtttttaaaattttataactgaccgaccggttatgggatgagttgatcataacacttcttgcagggaatatacaagcgggccatacagttatacttgaagagttatacttgctattttctctcagattgattggaaattttttaataaagaacctaaaatttattatttcatcttatatccacgaactgaggctgattttttaataatttgttttgttcttttaaataaaataaattatataaggatattatagtcatccaaaatgtttaatagtattgtgatataacatttagaagatttttactcagttaataatttatgtagatataaaaaaaaaaaaaaaaaactatgaaataactaactttaggttctttattgaaatttcttttatcactccaaagaaagtcaactatagctcttgtttagcccgaaaaacagaagaacattttttagttctttgttaaattgttctttttggcaaagtgaaatatatattttttgaatatgaaatagcaacttcattgaataattagcattcagaatataagagggagattaactcatcccaagcattatactcaaaaatgctacgaccagagagaaaacaagagtgccttgcaacaacatggacaactcggtttgctgatcgtctgataaatcaaatcttaacattatttagagaagaga

SEQ ID NO: 308696 - DNA, 1674 bp, Cannabis indica
aaaactagttctttccacttaaactgcctgctactattgaaatttcctaacccattgccaaaattttccattagctgagatcatctgtcatagtcttcctgcatgaagcctttgtgctcaaaactaaatttattggcagatagaaaattttatcccaaggttattgtgttttctttaaattttagggacatgaaaatggagctctttgacttgttttgtagcaatgcaactgttgggtcaatttgtgaatttacagtaaaaattatcgtgtatagtacgttctgaacattgaatctgaatattatgtctcgaaactcacttgttttcagtctgacttttagaaaaaggtttaatgatgttggcaattttttttctcaaataaacaagtggcttattatctatgggtatgatttttcatgctaactcatgatttaaatatgttctgacttttagaaaaaggtttaatgatgcaagtgttttatttgcatagttggtttatattttgcgctttttattataatttaattgaaatattaacagcttgattgacatggataaattgagtgtgtcttgtattttacgtcatgatagttcgttcggcatctcaagaattccttttgtattgtcttattgctctaataattttggaagattagagtgagtattcatgagatcttgatgtatttcgacagggttccataatctgcccgtactatctgaaaaccggagcatgcaagtacggcccgacctgcaagtttgatcacccacctcccggtgaggttatgggacttggaggaacacaaggaacatcaacatctggaggagaggaaggaaaaggggatgaagaaaatggaggtgaatctgtccagtaacaacttcaatggcctctcctatagaataaattttattgagttattttcttgggatcatgtcatttttctgcttgtttgctaatatttttacttgctattgtaacttcatctgtattggaaagtttagaatgatctgatctgatctgattctgtacaagtcataatggttggtttgattaaagaatcttagtttgttgtaaggtaaaatttctttgcatggaactcaaaataggtctgacccagttactaaaactttcggcatacatttgatttgttgtaaaataaccaaatattctatctttcgaaagtttaaatttcctatgtggttggtatgtttctttttttcttcatatttgtgtggcgtaggtcttgttctgcagttgctcaagtgaggatcctcgagcctagcttaagggcttccttgcatggtaggaaaatgtacatagctacacgactcataaacttcaatttctgttgatagttgaatctacagcaagtacgtttaatcaaaatgagtcgaccagtttaccaaacgacaaagtttaatactaaaccacaaatattgaaaggtaggcagcaacgaatatagaaaggtggcgtaattttggattggggcatctcacattaataagaaccaaaattgcaagggtgctgatagtggggacaaattaaaaattgttttccgttttaaaaaataaaaaaatagtttttaaaaattaataggggttgtttggtaaattttttttaaaactaagttttaaaaattagaaaataaaaacattaaaatgttgttttcaatttt

SEQ ID NO: 308697 - DNA, 1388 bp, Cannabis indica
cgtgtgatcaatgctgaatgcaaggatcgtgggattgaggctgattacactgatagtgggatcgtgtgtatgccatatccacgtaagttgatccctgagtgatagggattgagctgatgactcatgatgcgaatgctgaattcgccaagtgatgagtactctgcatggctcgctaaatatctcgttctggatgtgccagcgaggcatcctgctcggtctatcctcccgagtagatgctccaagtgaactccacgtgtcaccattctcgtgatgccacgccagagtgcaaaatttgggataacaatccttttaaataaatatggcatctgtgaactgatctagggttgtaactgtttgagccttagagatttattgtaactaattttgttactgtctgtatcttgattcttatagagaatgtctttcttactgtctttatgacttgtgtttcttttctgttgtatgttgtaatttgttaagggtagatctataatttcataccaaggatttgcttctgaaacttatgttatattaggggatctaattttaatatctacgattaacactctcactcaattatttgaccaagttcccaaaataaaagtattagctagtgtatagggtaagcttgtaacgaaaaaatcaaattactcaaaatagtagaattagcttaaagcttaatcatctcaggtttcagatcaaattaatctatgataaactaagtgatattaccttagaatagttatagcagtaagattatgataactattctatttgtcaatatcggtctcgttctgatgtaatccctatacatccagttacaattttattttgtcaatatccttgaaaagaaactcatgaactcaggttgcattattgtaaggttcggttttagattaaggttggtgtttgagctaaggttggagtcgaatgtatgaatctcctaagttggggttaggcttagggttaagggtcgagttatgaggttggtgttcgtgtctggggttagagtcagggtcggggttaaggtacatggttggaatcctaaattaggattaagtttgaggctaggattcgaagttgtggttgaggtcgaggttgggtaagggtttgcgtatggtctaggtgtgaggttgtgtttagatctaggattaggattgggtttagggttggagcaaggacaatgtatgagatcgaattccaaggaagcggtcaaggttatgttcagggtctaagtattggtctaggttcgagttttgttgggtcttgaagtcagagtttggagttcgagtctaggtgtgggtgtcagggtgtaactatcagggtgtcttgttaggttaattttagtatattttttatgtagttttaatcgtgtttggagcattttt

SEQ ID NO: 308698 - DNA, 615 bp, Cannabis indica
tattattattattattatcctttaatgcattacaaataaatatgtatattttcttgcaaaccattaatatcaatttgaacacaaaatattgatttatttctttccccctaaaaatggctatttttatcattcattaattaaggaaaaatttgtcatttagcttaaaataaattattcttattttatataaatatatttataattttgaaatggaagaacttcattcaatcatattatgtatttaaacatttcaatcatattataattgttaaattctcctcattttaattaatgttgccggtggtcaaaattcttgaatcctatttatatatttatatatataaatatttttctaactttctctacaaaaggaatttaaaacaacactataaacttcaatcaaatgatgttgaaataggtcacatagtagagtgagtcatcttggcattaaaaacaccatattgttatgtttgttttgatagttgaaaaattgaaaggagccttcctttttcaaatttaagaaactgtgaagtgtgaaaaataaaattataataataattagagaaatttgcgacaaaagtccccaaaaagttcacgttgatacagattagtccc

SEQ ID NO: 308699 - DNA, 3172 bp, Cannabis indica
cacacttcaatcgtaatctgaagctatcaatcgtacaaattttcaatcccaagacgaagttacaaaaataagctccgagttacccgcacgcggtcgtgtcacggctaactaaaaatactatacaccatcaaaatctaatttttcaccgttggatcattatctacagtcgtaaaatgtctaattttatattttctcctttattttgtgggtctccttcacctataaaataagagctcacttagctcattattcacattcagaaaactacccacagggtcagagcttctctatctagtttgtcttctgacacttagccttatctgacatgtaatactgtcacgatacagggagtgaactactataaatatattgtgtctctcttataattacttaacaattattttattctcgctaatctaataacgagtgagtttaacttaaaagtgtagttcaaatttttaagtcaacactactcaagtaattatagaatgattattagtgaaatgaaaccatatactagaataaaaaaaatattacaaaaagtgtaaaaaaaaaaaaaaaagaatagtggaagcttcttcattcttggtatgataaacaattttcaattttccatgtcgagaaatacttttgaaattaagatgtggtgcaattcattctaacctacactatgagtttttgtaagtagctagattctttaatggctaaattctgatggagtttctttgcttattggctccaaatttgaagagttggaatttttggtgcaagtcaaaagctaatgtgttcattcatttatcattttaatcatgctttactacctaataaacgtaaagaattttgacaaaccttagtctctgccaaagttcttaattacatattttgcaagcaattattttttagagatgatcaactatatatatctcttgaatggcatggaaaagtattgttataagagagagcttttgatcaactaggcacttgcttattgttaaatatttaattagggtaatttaagtattgttatatgagagagctttttacatttatttttattgttttatattttacttttattatttatatatatagatcttttaagaatatgtaaaaggatgatttttttttaaaaaaaatagtataaattaaaggtatgtattttatataaaataaaaactattaaaataaagtgttttataagtttttaaagtgtaaataaaactctccattctttatttttttacatatttatattcacgcaaaaaatagggtaaataccattttagaccatgtgttttgtaaaagttactagttggatcctctgttttgttaaatgataaaatagaccctgtattttctaaaattgtacaaataagatcttgaattgatttttgtcaaaataaaacttaataataatatgatatagagatgttatgacaaaataagttatattttatgtatttgtttgtattataaattgtcttaaagttagttatattaaaaaataaaattgttaaaaattaagcttcgcgtcctatatttattattttggaaaatatagggcctattttgttatttaacaaaacagagagtccaaagtaatttttacaaaatacagggtccaaaatgatatttttttgttataatacaagattttttgtcttattcaagtgatgcaactagggctgacatgtcgtgttatcgtatcgtatcatgttcatattaatatgtttatgacacgacacgataacatgattatcttgaaaaatataattttcttttgtaaaaaattaatttgtattagtgtgtcaatacaattataacacgacacaattattaaattaaatgtgtggatacgattataacatgattaaggtaaaaatgctgcaattaaatgtatgcaacaaacctatttatttcgtattatactattgacctatatcgctatgaggagtgctaccgtcaatttcctgctacaactattagtcaatctccacgtccgaaaacacatgtcgaaatatttttttcaaattttttttttacggcgttgttcgttatacttacaacattatctctgaaatttttgaaaattttaaactaatttacaatgttgaaaaatacgttttaagttttttgaacacacctgataaactgaaatatcaagaattttgttttcggtactgtaaaactatttagaaaaactatttagaatttttcaaaaatttacagaaatgatactgtaactataacgaataccgttatgaaaaaaaaaatatttcgggatgtgattttaaacgtaaaaattgactaaaatattataataaaagattgtaatatgtcttcctcacatataatactaacttatatagaagtgaggattaaataatggcccataaaaatttaaaatatttaatattatgagagagaaaaaaaaggaaagtctaggtcaaaataaaaaggttgaaattaaaccaaactgaagacaagagagcggtttggagtctttggacccatttcatttaatattttagaggaaaaaaataatttcattcaattttgatagaccttacttaccaaaaattaaagtaagaaaagtgatttctatgacatgttcagacaaaatagaatggtcattcacaatttaatatatgtatatatagttaataaacttgactgtttcatgacatgaaaattaatgtttggcaaaaaaaaaattaaagaacagaacaaatacaagtctaatatatcctaaattattgttatcacaagtcacaaaatacaaaaatcaactattttattttctaaatttggaaaatataaacttttttatctatacaatcatattgtatagtttataaatttcaatgtaattatttaagtatataataattaaatgtgaatggtttgatcaaattaataaaatgatgaaacataattttaaaatgaaaggtaccaaatgaattttactgaaaatttagtgtcaattctccctctcttataaatataatttctcaaaggaacaaaatttaatagttgtaatactttatgaaaattttaaaactagcgtgaaaaattcggtgacataattagatagtaaaaaatatttatatttaaatagaatgtaaataaaatatttagggtaattaggatttttgttccctaaacttttaag

SEQ ID NO: 308700 - DNA, 1680 bp, Cannabis indica
agtctacttggtcacttggggggaaactatactcgtacaaagcataggtaaaaataaataacaagctaaaaaaacataacagtttgcacagataactaccaaaataagagaaatattcattgaaaaagataaataaagcacggtaaacccaagattaaaggttgcgcggtcaattagttgtctcaaaatgaagaatataacccaagtttaaaaactgcttggccggtcatttttgtctctaataaaggcccatgggtcgaacagagaaaaaatgtttcaaacgggaggggtcccaagctccttgtacggatcaacttggtctgtgggggtcggaggctcaacattctggacggcaagggtctcagtgctctggtcggttggaactctagaattggctgcctcaaggttttctttggctgcctgacccacataggaattaagatatgcctctttggaatctctgaggtaatcaaaatttcctgaggggttggccttccaaaatttgtagaagacctccaaagcagccttttccaggctttccacctccttcaaaagctcttcctccctggtctgcctagtcttgatgtcctcttccaactttgaaagaagagtgcgaagactctcccgctcgtctttaagtgcattgacctccttcaacaaggcctcgttgtctgcctcgagatgggcggtagacgccatctcttgaatctccttcattagctccttgacccaattattggcagcaaggagctttttgttcaccccccccccccgagctcattcctcacatccacaaccttcttgttggctgaatccacctccctctacaaagtgttagtggtggcaagattcttttcagtcgtggatttggctcgggagtaggcgtaggctatcgtcagagtgacctgcacgaagaaaattagttaaaacctaaactagtagaaagacaaataacaaacaaaaaagatgattactttacccgagcaacctccttcaggactccatccatcaccaattgtaaaggaaaactcattgtctcgccccggacaactgattgctcacctcgggaagtgaccgatcaaggtaatactggagcatgtccttgccctttttggcctctgagcttagaaccgcggcaattaaggaagtctttgtcggaccagatccatccgagctcccccctttggaactcttggattttgataccttttagaccgaagggtccacagcaggcattatctcagagaggtcaattacttctccggccggcagtttctccttggacggagcctcgccgccttgagatcttttggttgagggagtctggcacgagctgtcaccattcctcttcttcagggcttgaacacaacaaaaaaaatcagaactaaagattatatttcaaacacaatataaccttagaaatctcatcagaaattacaagtaaacatactcctcatcaacaacacaatcaagctaagaacattaaaattaacaccaaattcttccatacatgcatgcttgaactaaactataaccaaagcatagcataccttcttccactaattcagcaacaaactcaattaaaaaggaagagaaaactacctcaaatccaagccttcaaagtgcaacaagaatctgttcaaaaccaccaccaaatccaagtgattttctcaaaataaa

SEQ ID NO: 308701 - DNA, 2209 bp, Cannabis indica
cttgcttacctctaataaaaaatgttgagggccactagtgccaatagtaatgatgttttacaaattccaccgaaatttattatggtagtggcaataacttaattacacgaagcatagtaatattacatttccatttcacactttcaatcctaccactctctctccctctttctgatttgggtattccaattcctctctctcaataaagatttggtatgtacctaaaggattgttctatctctttcttactaatgattgtgggactatttttaatatggacgatgacttactaatggttctgggactatttttaatatggatgatgaacggtaagttagtttgtttattgtttttttttcttttctaaataatagaataactaaatatatttttccaaaaattagattttgcaaggggtttaaagtcattggtgaatgagaatcgaattaattatgttatactatgttttgtttcaatatagctttgtggctttattatacaaagcttcattactatatctcattattcctgatgtgggaaagagacccacgggttttctgggtggtaaagagagcatggaaagaaataattcatgagcacccgatggttaacttataacgcaaatcaaacacacaaaggctcacctaaccaagtggaataagttccaattcaagaagctgtcaacacagataaatgaggctcgtataacactcaggtctattgaagaggcgcaaaactttgatgagaaggctcactccgaagctagagccaatctagaggaggggttaagaagagaagaaatcttttggcgtcaaaagtcgagagtggcctggctaaaagatggagaccgttcaacgaaattcttcatggccagcaccgtaacaaggagaagacacaactatatttaatttctaaagaatgaacaggggacgacgattgaagaaatgaaagacatagcccagttattcattgagaaatttaccagtaccttctccaagaatggctcacgacttaagtttgatgctgaggagtggactcatatgcggatggacaatatgttaaaggaagatctaatggaagctccttctgaggaggaagtattgaaagctttagcatccatgggaatcgacaaagcccctggaccggatggatccccagttgtttttttttcggtctcattgggacacaatcagagaagacttcctcaaatttattaaacacttctttgaatctgcagaattaccccactacatcaatgatacaaatatagtgctggtgccgaagaaggaatgtccatctatggtttgtgatttttggccaatagccttgtgcaatgtggtgtacaaatgtatataaaaaattattgccactcggcttcgagatatcctaccttccataatctccccgacgcaaacgactttcatcaaagggagatgcatcactgagaatactgcaattgccaaagaaatcattcattctatgtcccggaaaaaaggttcgaaaggttttatgatgataaagctcgatatggagaaggcttacgacaagatggactgggactttttaatggaggctctcagctttcatggttttaagaaccctctgctggggtggatcaagagctgaattaagaagatgaatttgatgattaatggggcgaaacaaggcactatcacccccacgagtggactcaggcagggtgacccgctatcccccactctcttcatcctagctgcagacttgttatctcggctactacaggactacacaaacaaaggaaagattaggggggttcaaagttactcttacagctccctcaattacacatcttatgtttgcggatgacgtagtcttatttggtcaagccactatcaaagaagcacaggccttcatggagtgcattcagaagtattgtgcttggtcgggacaagcgataaatcttcggaaatcgacagtatacttttcaaaacgggtacctagaaatcgagttaatgacatcacaagtctcctgggaatgtgcaagatgaagaatgaagactcatatcttggaattcccctctttagatccaagaaacgatcaaaagatgtgcaatatttggtgcaaagagtgcttgcaagaatagatgggtggaaattgttggaaattattttaccaagatcttagatctactcacaagtatgtttattaacatcctaaataagaactttc

SEQ ID NO: 308702 - DNA, 1913 bp, Cannabis indica
caacagtacaaaaggcttctactttttatcactttgtcacccacattaccacacaagagaacgtttcatattttatttttccccccctccctgaaaatgacctgtgaatttttccactattttcctagaaatgtattttaatccttgtgtgcctctatcaatgtcggtttgatttttgacatcacttgtagtattaagggaccctttttccttttctttctagagtgagcagtgtttggccaaatagaacaaactaaaataatcaatactatacacaatctgcattcaatctttgaaaattgaaagccatgaaatagtggcatatcaactatgcaaattatgcggaagctgcttttgtattattattttttttttttttttttcaaaatcttctttggggttggggagagatcagtagtctcaggaaacagcatatactggcatttggccaccagtggatttgaaagatatgacagtggaaagtaagctataaaccaccagttttttttatatatatgtataataatatatatatatatatttatatttttttatatatatgtataatatatatatatatatatttatataggaactagaaagcctacttaggaaaaataggacgctgggtattattccctttgatcttttaagattaaacaatttagtattgcatgtcgacataggatgatgatgatgcccatcatcagaaaaaaaaaatctcatctttagaatctgtttccttgaaagacaaatgtaccattttgttttacagcagagtaaattctttcgaacaatacatgcttttcaatgagtatatgatgattttaaactttaaaggagttcacttttctaccatagcataacctttgagaacaagagttttataggcaacattcttggactatggcataggtattgttcgtgtcctcagtccataggtaatactgaattaatttaagcatggtgctctgctctaattggagtattaggttattccatatattacaaagttgggaagcatgttgcacaccactatattttaatctctggtaaagaattccattaaaagataagggactttgcatgaaaagataaaactggaagaaagtattgaaagtctttgcatcaataaagttttgaagtgtgtcatctgtgatattacacatgattttgttacatagataaaatataatagtgtgtaatatttttgggaagagtgagaaagagaaagagagttctttgggacttcttttaaataatatattgcagtaatttaaattgttttatgtactactagtgtttgattcttcataaagattacttaacttaatcagttgtgtacataccacgcttcatatcaataatactggcttaataaaaacatatataatataaaatttaagtgagatccctttgtttattcatttgtacacgtgaaagtaacgaaagaatataattgcgtgtgtgtgtgcatggtgtacaaattaaagcctagataatcaccacagaaaatagaaaataaaaatggaaaagcactaatacgttgtacaagttcatgtcactattctcttctactactactactacccatgttattgttgttgtggtctcagtatctttgggaaacaaaagcaaagggatggggaccttgacacttgtgaggtaggccatttagcagtggaactttaagtttgacaggtagctcgattctaaggtaaatgccttttctttttcatattatattattttactttgtgattctgttttgttatgatttgttcatttagttcttgaaaggtttagagacttttattttcttttgtacgtacggtcggtgcaggtgtggggggaccaatatatatttatatatatatatagaatgagagatagagagagagagagagagagag

SEQ ID NO: 308703 - DNA, 2934 bp, Cannabis indica
taagaaaatgtaatcatttaatatatattaattaataatatatattattttaatagaatatttttagaacaagaattgttacaaataatgtggatgaaatagaaaataaaatattgtattgtgggattatgtgaacattttaagcaatatttttttatgattgctaccattaattagagatgttttacggggtactttaaagtgtgaagcaccacaagatataaaatactctaatttgtacaatttaatgttagatgcttcattttaatttatttaataatataaaaaataacaaactaatcactatgtaccatatgtgatattgatatggatcgagttaccaaaagacaattttatattaatgtaaagatatctagtttaaaggcatccaatatttattaatgtgatgaactgtagaattttgattgtacataaggtttaataaatgttaatggatattatgtgaagtgtaatattattattaattgtacaagattcggcctcaattattttactttataaaaatcatggaaaattgctagctaacttaattataaaatgtcattttatagtaatgggaggtactttggtatcccataataatataatattctttagtatatatattatcaatgtgatattttataattcgttagtaatttttaatatcatttattaaattctaatgtataagatattaaaatataatatgtcatctgttttacggtgcacattatgcagaacttatataattgctttgactgtgcaaaacgatgaagaaaagcagtaaaatcacaaagaaaactacaacgatacatgttgaaatgaagcttttattataacaaaacaatctaagcatgtgaatatatttattacaaataatattacttgtaaatgatttgtgctaatattataatcctattttcaactaccaataatgtttaataacagctctatccaccacgcaatgccggatttaagacgtcatgcactgccggatatatggggatacgcaaaaatacatatattatatttaaacagaaaaaataaaacatggcaaagggatataatatatttaatcatatatatatgtgtgttctccatcatagacaaggcaaatatcgaagtttcacacactattgatattgatcatgaatatgaaagtaaatatagtctcgaaggagataatcaaacctactagcccaactccaaatcacctttgctcttatcaactctcctttcttgatcaaatatctcccccagtgtacaaccattttgttatgttctattataaccatgaaaaacatgatactagtaatggtgctgagctcatgagtattgttgaaatatcaaacaagctcaagacatccttgtctcatgcacttacactattttatccactggcaggacgactcaaggaggatgcttcttgcgtagaatgcaatgacatgggaatccctttcattgaagcaaatgtcagttctcaactatctgacttcctaacccaaagccccatcattccaagtgatcttaacaagttcattccattcgaaaccgataaagtgtccgaaatactcttcggcatccaactcaacatctttaactgtggctccatagctattggatcatgcatctctcacaaaattgcagatggcttatcatttttcatgttcctcaagaaatgggcagccatagctcgaggagatgatgataaacacaaccaagctgcatgccggccgcaattcgaagccgcttcactctttcctcccaagaacatatccgggttcaaccctagagttggcattaaaaataagagtgattttatctctaaaaggtttgttttcaatgcctcaactatacaaaatcttaaagagaaatatgctgtgaacaataaaggtactgtttctcgtgttgaggctttgtcagctttcatatggagtcgttttgtggctgttactcatgtagagtccaaaacatcttataaagccataattcatgcagtgaatcttcgcactaggtttgagccacagctctctgaatactcatttggaaatctttacagaattgtagtaattaatggttggatcagaaaacaacgactgtgagattgtaaaacaaatgagagaacagttgagtcatattgatgacaagtacctgaaaaatctacaagaaggaaccgaacatttggattatattaagaatggtggtaaagagttgttaaaaagagaaacgacggttcttcttaatttcagtagttggtgtagatttcctatttacgaatcaaattttggttgggggaagcctgcttgggttggactgcctccgttgccgttcaacaatgtggttgtgtttatagacacaaaatcaggtgagggaatagaagcttatatcaacttacaccaaaatgacatggctaagcttgaaactgacaaagaattccttgcatttgtgtctgtttgaaagttactattatgaagttattttcagtctattattaatttgtttcaaggttatttcgtcaagtgttgtacttacttaagttgcaaaatcagtacgtatcccaatatatatttatatatatgggttaatcaacaataagtgggaatatagattgtcatatatatgctataataagtatttccgtgtcacatgtgtatttgtctctaagaagagtgttattgttaattttttataacattctcttagtcaatatttgtgtctgaaaaataaattttggaatatatttttttttaatattttatggttgtgtttgttataattacaatattatttctgtaaattttaaaaatttagactaattaactgaaaataggttggaggatttttgaatacgtgcaaacttgaatatcaagaatactgtttttggtactataaattattcataatttttaaaaaatttacaggaatgatatt

SEQ ID NO: 308704 - DNA, 1154 bp, Cannabis indica
ttttttttatatatttttttaatatatttttgagggcccaaaatttatttcgtcttgggcccatatattttcagggccggcctgtacatatacatgcatataagtacgtagatttatacatataatacacatatatattttaaatcatatacacactatatgtatatatatactcaagttccatatgctttggaagaccaagagtacttatataaatatatatcacaattagaaaatagaattgttaaaaatgtagaaaattagatacaatacggtcggtcgtatacatatatatacttacttcacatcaattttatttaacaatattatcccattggtatataatatatatatagctcacatgaaaattaaatgtaatttttttccaaagaatgttgtacaaatatttatatgtatatatgagattattattattatataaaattgcagaaaatggggtgggatgcatgagtcttggtttttggtggagatagaatattttgagagaatatatacagctaataaattatgtgaatggattaataaatatatatatatagctatattagctagagatatttatttaattaagcacttcatccaactgtataaacacctcatatataagatatttacagctaacaaaatttcacggtacactgtctttatatatatgtaattaatttaattaatccccagagagagacatggctcaactaaatgttctgtttatatataattaaattatttatattagaaaccaagaaaataataataattgcaaaaccaattataccacgatatcattttattatgataattaattaattatatgttctcatgatgaagaaagtgaacctcacgaatctgcagatgtctttccgacacatacatatacacacatacatatataattcatatttatatatgtatatatactataattgggtctgtaactcattaagggtgcccatgtgatcagaatactataggaacttgagatgagaatatgtaagtatatatactctgtcaatataaatatacatttaattttccttaaacgagttatgaataaaataactaattaattttattacaataataactaactttaaaacacattaaatttatacaataacaaaataaaatatata

SEQ ID NO: 308705 - DNA, 1261 bp, Cannabis indica
gactattaaatatacgaccactttattttttggaataaactacaaacatgcacacttaaaagacattgaatcgtgcaaattactcaaagggaaagtctttaaattactcatctagagaaaaaaaggtaagccaatatctattaccaaaactaaaatacataataatcattacaaaattactgtcaatagttaaactgtattctacaaagaaaaatatacattaaatctaaacatcagaaaccgctacacttgaatacaattttctcagattcaactataaccttatgtaaatggatgcttacacaacactttatctccggaagtgaatattcacagctgaaggttgcaagaacatagtgtgctgaatggaaagagcaagtggcagaaatggatgaaacaagaaggaagatatctttttggctcgactatctgcgtttccaccttccggacctaatttgaaaccatttatcacatgcttaatttaaattttacaagtcaactaagcagagaatgtggatgaatgtagcctttgatgttctatagcataattttaaacaaaacctttaaaatgaaaatgaaaaaggcttctttgaaaaaagaaaatgagatatctgcctgaaatgaccattcaattgataaaccaaaatcatctactgaaatagaaaggtaaacttgattcacttttaccactgattcttcccattttctcttgtttcatattcataagtcataaccaagtttgacagagtttcaaacaactattagcacacctggtttaatcttaaatctgagcgcatgtggttgccttcttaagatgaactttatgggatggtctgttgattgtctatgccggtccgctgcagaaataagctggaagaacaaagatatattaattaattagttacagaaactgacaaaagagtttcaaacagttagcctacatgggattaatcagcaaatttcctgcattcaaccctagcacaaacaaatgtgatagaaactaatactaaataataacctacgatatatctcctgtcaatattctagttgaagattttctaatggatcctattcaagtatcccaacctaaaattgtgcactatacaagatcaggggatatgttctaggatatctctacgatccatataaaagctttggccggtatacaagttatgcgttctttatcacaataattctttgataattttcacacaaagtaacaaactcacttaattctttacattctttttttttttttttt

SEQ ID NO: 308706 - DNA, 1762 bp, Cannabis indica
  modified_base (1748)..(1748): a, c, t, g, unknown or other
acaaaacacagggtccaattggtaacttttgtaaaacaaagggtccaaaatagtatttaccctatatataaatatatatatatatatatatatattactcaatcccaatctgaattatataatttaattttgccaggaattctatggaggaaagaaggaattggaaaagtacaagagtgatattgagtcctttgtttgtgctatcatgccaggggagtagctctcaacaaatcaaaaccactccaggtcataattaattatttttaattattgagtgattaatactctgttttgtctttaaatatggatattaattaattaattaattattgtagggggtctattgtatataagagatagcagtaatttacagtatgtgacaacatcaaccatggtgttatctatctatgcaaataccttaaattctgctcatgttgggagtactgttcaatgtggctccactaaattctcaccttctcaaatcacagcctttgcaaaatcacaggttcaatttgccattagccattacttattatttcttatacatattatatacaattaaaataaataatcttaacaaatttagttaatagagtttacaactatcatcatattcatgagttgttgtttcttattaggtggactatatattaggaaacaaccctatgaaaacatcatacatggttggatttgggaacaaatacccaactcaacttcaccatagaggctcatccattccttctttgaggacacaccaagcaaaagtgagttgcaatgaaggccaaactgtgtatttcccatcaaccaagccaaacccaaatgttcatgtgggagctcttgttggaggcccaaattctaatgaccaattcaatgatgttagatctgactattctcatttggagccttctacttatatcaatgctgcttttgtgggctctgttgcccctttcatagcccaaaaccacatccaacaacaacaacaatcttctttggtcatcatgcaaaaatcaaattaacttaatttacaaattatactattatataattatatggttgattatgatatatgtcaagatggactacttaaggaattgccaactattattaatagtactattgtagtgaaggaagaaattactattaagctttataaactagcttatgttatatgtattgatgttatataatagtgtaaaaaataattgtacgtaataagtgattaataatatattaatgtatactagctatttattttctctacattgtacttaatactaactaatagtctaagctcttgtttggctaataagcttcaatctttaaagtatattttagcttctagaattgaaaattttatttagagttgttcgtgtaataattaaataagattaattaatttatatgtatattgagaaattgagttctctaacttctctcaaaaaatactatttagaagccccttttttttttaatttttttagaacttttaatatttactcataaaatataaatattttttttattaatatccgagcattttgaaagaaaaaaacaatcatataaaaatgatttttttacatgattattatgcaattttaaaaccaacaaaataatccaaaacttctacttattttaataaatcatgtatgttagagacttgtttggaaataggtgaaacgtacaagaaatggaaacaaaagagcattcctcgttcgagtttttacccttttagtactaaatcaaatatntaaaaaaaaaaaaa

SEQ ID NO: 308707 - DNA, 3092 bp, Cannabis indica
acagcagcaacatcatgcatacgctatatggtctcctttttaacccctacatcattgtctggaacagtgtcagcagcgaattttaccaaaaatgacgctaaaagactttaaaaactgcatctaaaactcaattttatagaaaaatatttgtatgaaaacctaaaatatttaatttaaatctatctaaataacttaagactgttacacttagtctacacctagattcacccatgcacatatatatacacaataattgtaataagatataatttattatgtgtattcttttcatttctttttttaaagaaaaagtttattctttgaaaaattgaaagagagaggaaaattaaagtaacactgaaaatccttacaaaagaaaaagtaataaattcgagtttattgaataaattcgagccaaattaaagtcacgagtcaagagcacaaacatattatatatatatatagcataccaacgattccacgatagtccacaagaacgtatgtatacattcatccaaaatgaacttccccacactacttgtcccatcagttctagtactactcttttccataacggcctctcccggaatatcccagccgaccggagccagatgtccggcgataaacccgccaccaaggcctaacccaaccgtccagtacatacgtccgcgacccccgctctacccgccgggtcttaatctcatgccaacgcgtccagccaataaccctggccccttagctaaccgaaacagaatcctgttcatcacccaagagctcaaacgaaacataacctacgaccctttcagatatacaccaacctgggtcggaaacaactattgtctcttcaaaggtttcttctgcgacacagtaccggacttaaacatcaccggactcgctagcattgactttaacggtgccaggttcggtggcagattcctcaacttctaccgattcattagaaacttgcccgacatagccatcttccacgcaaactccaacaacttcagcggggtcatcaacaatgggttaagccagttgcgatacctctacgagctcgaccttagtaacaacaagtttctcggtgttttccccaggaacgtcctcggcgcgaagaatttgactttcgttgacttgcggttcaacacttataacggaacgctgtccaatgacttgttcaacttcgataccgacatattgttcatcaacaacaacggcttttcccaaaggatacctgcaaacttgggcaacaccccagcgatttatctaactctagcgggtaacaagttctcgggtcccatccccacaagcataggtcgatcttggaataccttaaaagaagttcttcttttaaacaaccggcttacgggttgtctccctttcgagattgggtacttgaaccagacaacggtgttcgatgcggggtctaatttcttgaggggtccgataccacaatcgttcgggtgcatgaaatatttgcagttcttgaacttggctcataaccagctctacggagccattccggagtccttatgtaggttacccaatgcctataactttacactcacttataacttctttacccaagtgggtactcagtgcatgagattgatacgggctgggaggcttcatgtggaccgcaactgcataatgggcctgcccaatcaaaaacccgcggcagagtgtaaccgtttctttgctaggcccaggtcctgtgctcgtgagagcaccttcagctttgttccttgcacactctccaactccaggacctcctcttccaatattgatgatattgatggtcggcacctacgagagatcacaccccctccgccgccacggacctatgctgctctcgagaagggtcagaactgaaatccatctatctatattttatttaattaaataattgttattgtgtttgttttcttttttaatgatatttgtatggtgagatctctggcgcttggatcaaggttattttgctggttaattagtgtgtgtggtatatatagtagtgcgagtaaattttaaatttcatgtttaaattaatgtgttggtgtatttgttatattatttattaaataatataatatttaagattaaaattgtgatatattatatatattattatgagtataatatataatgtgattaggagttacatatgtaatatttaagaggtggagttactcatattttgtaatttctacatgatcatcaattaagtgtgtaaagagtagttacacaacttaattttttgaaattcaaagctataatgcaaatatagctcttgggaatttaattttatcatttataatataaaataaagtgggaatgatttggagagttatttacaaaagctgaaatttatagtaactagttacttttttttgagctttaatattagaacctttattactatggggatgccttttaacaacccccataacatccaaatcactcatttaatctcatttacactcaattaatagatgataacagccgatgttgaatttcaaagtgtgtaatcctaaacaatataaatagagaccttgattcatcctttgagacacactcttctcttctatctttcgaacacaaagctagagaattctaagacttgataattctcagaagtatttctacaaagtcgtaagtgtttaaaacagggggaaataatcttcttggacaaaggtgtagaaaccttgttcaagcttttggtgatccccatctctactttaggtatttgttcttctattcttactttgttctactctttatttttatattgttctcttattctcctctaaacactcttatatatatcatatatattatatctctactatatagtattatatatacatactgttatcccaaagtttgcactctaacgtggcatcacgagaatggtgacacgtggagtccacttggagcactgctagggaagatagaccgagcaggatgcatcgctggcacatccagaatgagatattcagcaatccgtgcagagcactcaacacttagcgaattcagctttcgcatcatgagtcatcagctcaatgcctatagctcagggatcaacttacgtggat

SEQ ID NO: 308708 - DNA, 1810 bp, Cannabis indica
aagatgatgttgagagttttggagtgcttggagatccttttacggacttgcctacgtgcctggtgtgagttctaaacggcttagagttaaccacgtatgcatacagtatttgctcaagtgatctccttgcttcggagttttcattcagtcccactaccagtctaccacacacagagtgagaggagggccaagaagtggccatggaagtggcaatgagctgctgcagtccttcgccatttctcggcaaattccgaacaccttttcattctgtacgctttgccccctctctctctcgctctacatttcctataatataatgtgtcttagatacatgttcattcttgtttaactctacacgtttgctgttcttcatgattcctatgacctatatagttttattggaaataccaatactcgaatcgattgtgaatagcttcatgaattttagtattacaagttttggggttcaatcatattgttgtaacataccatgatgccgtttctcttttgttctatcttatatgcattcatattagggtactgtactttcattttagtttccaaatttccaagtttcgtgtttatttattggtaagaggattgcttaaatgtagggaatatcacaattcagagaagttattgggagttcaactcaggcagctagagttactgcactgttttggggtcctaagaaggttgctgagccaaaagaattgaatttttctctaggcagttatgctttggcagggtcaagcccagaggtgtgtgtatgattttgttctatttgaatggttctataaatgggaatgtgttttttctgttcattgggttggtaaatcttatctagtagctattggcttcatcaattgtattggttttttccagggtgttttagagagtgaggggaaacctaaagtgttatcaatttcagttctttcatccatctcggatgtctcacctggtgtctgggatgcgtgtacggtggatgcaacgggtcctgagaaatttaacccttttcttacacatgcttttctttctagcttggaagagtctggttctgctgtgaaggttaggaattatgaactcgatacaacttaagttaataatggtgaatggtgattaattgagtttaagcaactatttttacttatatattctcaactcttaatttattaattgagtttttttttttttttctttaaaaagttactattaaggaatttttatgaatggtgattcaaagtaatcttgtaatgaaaatgtgagaaatggaattaggcgtacgcgttttcaatacaatgtcactgagtgctgcattgcactatatttaggagttgtctactctaaactggttcaacaaaaagggaaaatgaaacaatgttaatagatattttcatgcaaggatatatggttattcaatttaagggtcatgttaatgtcctcttctctcttcctttgttcctataaaatttggtacaccaagtgagtactattgagtaagttagtaattggtatttcaaattgtgatctgatctactctacaagtgtctcatgtactgacaactgcttttttgttttcctatacaaagattatatcagtttattgttatgtattcaaaagaagttctatttactgcatctttttgtatgttgtagagctcatctattattattagaatgagataagcatcaaagatacagcactgtcttaattaatcattcattttaacaccaggaaacaggatggatgccgtgtcatatcattgctaaggatgaatctgataatgttgtaggtgctgttccactctac

SEQ ID NO: 308709 - DNA, 1844 bp, Cannabis indica
tcaaaatttaagtcagaatgttagatatcattttttttaaaatatattaaaacgttttttttatttattgtgtacttatttggagaaaattatgaattaataagtacaaaatcgaaaaacaacaaatcaaataaaaataaggggcgaacaaaataataaaaaccaaaatatagaagttaaacaaatttaacaccaagatatatatactgttttaagtcctatagatcgatgtgatttataactttactccagttctcgaacactaccgaaatccttttttattgattgggcaagaatataagtacaatagattcactgtagagtactcttcactaagtgttttaactccccacttacacctaaatatcttcttcatttacagaagatgcctcttacaaaacttaaactcaatctctctcttttctctgcagtacctttccctttacctcttaatctcgtgaattcttccttcctcaaaataactcgtcagggttgtctttatagctttaggatcaagatcttaaagtcagtggctgcagaagcgaggttgttaaattagttaaaaagcaactccttatagaacgaactccacgtcagtttaagaatttgagcttccgggaacatatatgagtttctagatttacggactaaagacactcgttgatgatgttaatttccgaataggattgagtctactggagttgacaatccgaatctactatctagctaggagtaacaactagccaatactagaagtccaacccggagtgaagctagctaggctggacccgaagtagacatgatagtcatttggaaatatcttttcgtactcaactactatttctcaagaccttccgagactgacttctacgggtgaacattgtgcttttcccttgatcgtatcacctgcaattgaacctgaaacaaagttatagacttataataattagagggatcaaaactcaaaagtgaaatagtctcttttgcagctctctctatatcattaaactaaattcatgtattagtacacataatgaccccatactacgtatactattactatatcatataaatattaaaacataataataattcgtttttttatatatgtcatgaggcttgactttggttcaaattcaaaatagagtgtctgtaacctaacagataagtcacataacagaaaatattattatgctctccaataatattactattttaatactccacataactatttacaacaaagatatatatgaaacttgttttgataaaatctattgtcttataaaaaataaatcattacaaaacatgtgacaatacttaataacttcaatcttttaaacaaacttagtaatttttttaaaatcattgccctataacttagaaactctatatgtaaaatctattatggtgacttacactatgtttggtaggaataatggagacgggtgagagactggaaaggaaagatagaataatctttgtttggtaggggagagaaaggaagaaagaggagatgtgtcaaaatccaaactttaaaaatccaatctcaccaaatttaaaaggatttgaaaaaagacaaaataaatataccaaatactaaaactgtcctttaaaataataataaatatttataataacaaagatattataataattttaataactaatttcctatttatccttccatctttaatccttattattaaaaataaattctatttgcattccataaacttaaaaaaatacactctattattaaaaaaaatataaacgtaaataatttttaaaaattattcttaatattttttaatttttttttccaaattattttatgttaattt

SEQ ID NO: 308710 - DNA, 653 bp, Cannabis indica
gtaatgcgaatggtgtggctcacgcactagctaagtctgttactagttctgttgggataacatactttctttcaaaaaaaaaaaaaattggagtattataagcacccggtctttaataataacaatattcttatatgtggcttatgcgaatgtttttttaatttgttccaaattatatacgtggataaccatatgacagacacgtggatcacgaaacacgatgttcgtgggagcaccatttaataaacacgtggatggtcgatgatctacaatgactactcaatatatatttacataataaacaaaataatgtatatattgtatttgtatgttcatatccgaatctaattctttatcttcttgtatttacaaaacaccttgtacttaaataaacttttcattgtcttctttttaaatgtgagtgtgtggttatgcattcattactgaaatatttttattaaacttttcaaaaatatatcatataatattttatatattaaaataataatacaatcgtatgcggcaaagcgaaaagatactctcaaacctttatgctataaataaaatggttttaccaagctccaaacaataattgttaggcaaggaaacaaatctttaaggactcgtttggaacgccgtattaggtcgtattg

SEQ ID NO: 308711 - DNA, 1576 bp, Cannabis indica
acaaaaaaaaaaaaaactaaaagcctcctggttaggagacttagaagtaacatcctcggcttcaactgagccctccgcgtctttagcttccatttcttactcgaattctttagcttttatggcctcatcttcttcctctatcttttcaaaggtcttgatgcttttctcgacatgaggctctaagaaagatgtgttcatcgtcttattattttaacgtaccctataaagagataatcgaaccatctcatttagccttctctaggcatcctcctcgtgatcgtcaagagctttcttcttttccgcatccattgcaattaaagccttttctagttttgaaattgtggtatcattttgctcaagttcaggaactatcttgtctttgtaatattaaaggtgagaaatttccttttgaaagagggaaattctctctacgacagagtcctgcttgacagttaaggggttcttttgttcctcattatcttgcagaacccaatttatgcgatcgagtggaatgttgattatacaaagagaagctcttatgagccataacagagatctgtttttgagaaagagaaacaataaagttagcgattcttacacttagaatggcaacaaaaacaactcgcaaaataaagaaccttaccatgcacatcaagctctcgcttctgtccattagttcaaatatattactgtgattgagcatatggcaatcatctttctctaaactatgaaagaagcgagcttgcttggtgagatgctcagatacaagcttggcctctacaaccccaactaagtggtttggaggaaggctaggatcgaaaaggtggacttcagggttatcagcgttgaaagtaattgctttagcaggattgagtgcttcgttccctttctcggttctctccaaagaagcatccacgttgaatgctagttgttggctagaatctgttatggtttctgaagtcgagggattcacctggatattggagatagtcttagcgggagggtcaattttattctttttcgaagtagcagttgttttcgaggaaccctttccatcatctttgtttcatctccttcccgtttttataggtaggctcaaactttggagaagatctgtgaagttattaaccatctctacacaaccgagaaagcaaaataagtaaagttagcgataagattgactaggcacaaaaatattaagacaaaaagtcccacctaaattactatctgaaatgttagttgagggagaatcatatcgactcgattatatttatactccctcaagcaagtgatttcatgaatgtctaagctattaattgggaatagttcccaaattgatgcccaatagttgttcgagttgtattggtctggaatatcataatacaagttgttaccagtgacctggacatgataatgggggtaccaattatcaaacctatgggcgatcgatgagatctacgtaattccaaatataaaaattatattgactgtcactgaatttgacaagacacgtttaatcagccttaaggacaatagactatgttgaacttggattagatatgataaatttaccgta

SEQ ID NO: 308712 - DNA, 859 bp, Cannabis indica
atttagtttctaatattaagaatattaaatttcaaaaataaaataaataaatgtaatgcatctgagccctccatgtgtccttatttatgagttaacaaaagtggtagtaacgagtgtaagagaattataacattaggtatttttgcctctaaaaataaagataatataaaatctaaaacattaagtatttatgctgcaatttaccctaaaaaataatatacaaataaaaaaaaatcaataataagttggcaagcaattaacaaccaattgctaaccatagaccatctcagtaaggtgcttcctctcctttcggtcaactgcccgatttgtgacagtgaataagaatcgcatggccatctttttgtggattgtccatttacaaagcaagtctctgttgaaatcaccaagtggctgggagttattgagtggccaaacagcaacaaatattggattatttggttttcgaacccccttagatcgttacaagataaagtcatgaatgcagtagtctcggcaactatttataacatctaaatgaatagaaattactgtgttttttattgtaattgtaaaatagcgtgttatatcaataaaaacattaaaaacactgtgaaatatagagtcatgcattgtatgggtgtaagtaagaacagtcatgagactcatatttgtaatgtaatatcgaagttgtttggcccctactgggttgagtagtgctggttgtgttgggctcttgtagcttgctttggttggtgtttttttgaataagtttctctttttaaaaaaataaaaaatcaacaacataagaacaagaatacaaacaaaaaaatacacttaagactatattttatgtaaataa

SEQ ID NO: 308713 - DNA, 774 bp, Cannabis indica
aataaaaataaaaataaaatacaatactttaaaaacatttattaaatacttttacaaaaaaaaagtacaacaatataatgttcttcaaaacataaaatattttgaaatgttacaaaataaaacgtaaacatatcatatttaaaaacattaacggtctatttggcaagtcctataaggagttgtattttattaaaataagaagaacactatttttggatattattatgtattgtgttaattattacgatcacaaattttaatagaatatgaatcgtattatttaatacataagaagtagtcctcattagcttgtattataatatttagaaatggtctgaggcttgggtttggggttgggttcagaggttgggccagagtctggggtcggggttgaagtctgaagctaggttcgaggttggggtcagggtcgggggcaggtgctcaggatctaggtcggggtccggagttggggcttggtgtcccagtctaggattgaagtttgtttctgggtccaggattcgagtccaaagttcgtggccggccggggcaaggtttggagtcaaggtcaggtttatggtaaaagataaataattttgcacaacctattaatacaatagttaataatactatattaaaataatataatacaataccacccaacacattactatatacaatataatacagtacaacacaatctaacataacataatgatggaatatattttaccaggatcttagatctactcataagtatgttgtttaaacacccta

SEQ ID NO: 308714 - DNA, 1331 bp, Cannabis indica
cttcccacttttctattctcaatatttcagctattcttctcacttttctctcctctcctttattatctttcctgataggctaaataaaactcttttatttggctccataaccgttatctaaactgactagtaaaaatgtcaaaaaaagcaattggtacaaaacatgaaaataccaacttaataatcaaattagaacaaaatttaagcaacacaaataaataaaacatcacatgattgcaataatgcatataaaaaataaaattacttaaattttatttaataaatcaatgctataccgaaaggaaagctatgccaaactaactgtttaagatacaacaaataagtttatggtcaaaatttgaccacccaaaacgaagactggtgtcttataaatatatgaaataacgccctgaaaaatcaaattaacatcattctcaaagaaagcatgtagtcattagtagcctattcaaaattacaaccagctgatccaaaaacatgtatgtataaacttgacctatatgatcaacataatgatcgaattttgctcctgattcttctatcctcaagcatcaaaagtctgcttaaatgaatggtatataaatattttcgccaattgtggccggagaaggactggaatctactcaaagaatggatatgataacaaactcaaaaaataagttgtattaaaggatatatactttgccattatacccgctgatttcataactcaccattcaagaagaaattgctgaagaaaatcattttgaaaaatccaatctagtcgtttggatccatttcttcatcctgctcaaacaatagagatgtgttagtattgccagagctatttgattcaggttgttcaaccagattgctttcatattctagtaagtcatcgtcatcagttttgccctcttcttctgcaaatgattccgaaacaatattttcatcatgctgcatccatttagggcactcttcttcaccaccatataaaacacgggcatccttgcctctaacaatatttggagtctctgcagaaggtattctgcaagagcattcgggaagtggatgtgaaatgaacgatgctgatttcgacaacagggactgcctaataaggccttcctcacccaagcttttgtttaggtgttcctgcactacgagtgtccaattatgctttggatggtacaaattgtcgcgagtaatgttcaaaagttctgcaagaaatttcctgtttaaacaaacaagtattagaaaccaataataatgacaggttcaaaataaaaataggcttgtttcatcttttccagatggaaatgcagtattgttcttacact

SEQ ID NO: 308715 - DNA, 874 bp, Cannabis indica
gacgaaatttctataaggatgggtaattgtaatacccagagattaagaaaatggattagcaaatcctaaaattataatgctcgtgacagttggtatgatcactcctcatcaaagcattaacacctacaatgctcgtgacattcaaaatgactcagttgaagcaaaataagtaatcgcagaaatcattgcggatgaggcaaagaaggccatcaagaaggacaaacgcttgctggaagaatgggcccagttacatctagaaccaatgaatgaggaaacaaagttagagattcgctttagagcgatcatttcagacggaggcactccatgtgctagcacatccgaaagaggtaactctcccttccgcctattctgcactccacatctggaagagataaatcacatcaattagggagtattcgatccttatttcttggaactagaccatcttcaatatcccatgattcattattatgatagggtagataaaattatagatatattcttccaccatcctaatacattagagtaaatcctttcgtcttgatgaagggttcagatttcttccagtatgataacttcttaggctgagaggatatttcattatttgctcaaggagattcaaaatacaatagtgtcaatggttgtatccagatcaaagtcttatttgttctttgtatactgatttttatgcatttattgttgcttccaagtgtctaactttgatgctttacttgcatagaactcccagactatccagatgggcactttgaatgatttcttaagcaatgtggatgccctaagtgaggaagcaaggggaccagtgaagcctaatagagggaaaggcagagctagaatatcttgttgggttttatgc

SEQ ID NO: 308716 - DNA, 2414 bp, Cannabis indica
aaaacaagatgcaccttgttgatataggtagtaccaatcaatccatttaagctctctacaactgtgcagtcctatacctacacagtctcagaatcatctcacttgaccttctccaagcgatgtgggattgcacagcttatccggtatttctccttacggatcacgagactactgactgtcacaattttagactaaaatattattgaaatttactaataattaaggaaaagttaataataataataataataataataataataataataataatataagatattattctttcatttcagattttccaaattaatttaattttcactatttttatttattttgaaaggggtaggtttatcccatagaagaaaagtttaaatagatgggaggatttcgtaaacgccctatgttagataattaagtacagattcattataattagttgcactaaactttgaagatattaattggtaattaaatatataaattaattaataatggctatggctttacactgagactgatcagacaaacttcaaatacataaaatatgtcataaataataaaggtcatgatagagagtaaataatacaaatctcacaaccacacaattaccatagacaatctcaatgttatcactcataaatttcaaaggaaaagaaaaaatctaaaattaataaaaaccaataatgacaataaacttgtcaactcacctctcttctattttaaattttgtattttgtaaaaattattaaccaggctctttatttgttaaataacaaaatgctacaaaatattatccttagcttaaatttcgaattttttttagtataactaacttaaaaataattaatagcatgaataaatgcaaaaaacaaaaaaaataataaattttgtcataacacctttatatcaagttattattaaattttattttgattaaaatcagctcatgaaggtactattttatattatttaaaaaattatatatctaatttatcatttactttaataaaatagaagatttaatagataactattgtaaaatattaaatctaaattggtaatgtcccttaattaatcattatttcgtgtgtgaaaacccaatatttcatcatataattaacacaacctaataatcatggctagctaattaatactagcaaaaccacatacttaatcatgagagagactagtacaattaacaacaattaatattgcgttttattagggcattatgatgtatagcactactcaaagatgtcattctatatatataattaattaataattattaaagtaaaataagacacctatgacgggtgctcctttcattaaagatgtggagcaaaattaattagcttttgggttttgtgggtgtgtgtggaaacttataatattaatttaatttaataaataattacctggtctctccttcattagtgtatattatgtgagatattaatttttaagttaaaaattattactcgtttttaaaagtttctgtctccaacatatattaatttcacttatttttaaatgatacataacatataaaaattgttaattgtagtaatatttatataaatgtagttgatgatgatgacacatgattaataatttatatatgagacatgaagatcacatgtgattgttaattattttattttttttcggttggctaattatataaatgctttaatttttgtgctatatgttttgttgtatatatgtccctagctatagtcaattgaaatcaaattgtttgttagtaaaattaaataatcaagatattaatttccatataatttaaatcacaataataattaaataataattaagtatatgcttacttattaattgattacaataattttaatagtgtaatactatcaattaagtttttctcactacatttctaaattaaaagtaatttttattttataattatcaaaagtatataattgtgatgagataatatgtatttatatatagagaacttagctacataatcttagttgaagggattactcgacttctgttaactagaaaaatccacacttatattttaattagactttacaaatataaatattaaatccattaactattacattaatcattaataatatggactaatacaattaaaactatccaatcaatctaaattttaataaaattattaaaaattaatataaactcaaataaaaattctaatattctttactataagtacatggagtgatctagcgttaccaaaggtgggataatttatgagtattgtctggaatcctagatgaattaaaggtgacgattgtgtagtaattttgagattatgtaggagtgggactacctatgttagcaagaagcatctttttttggtagctcaccatgacggaactccatggttgagt

SEQ ID NO: 308717 - DNA, 1537 bp, Cannabis indica
taactatgttagaaatgataatattaattaaatttttgtccattctttcaattcacttctaatatggaataacataaaaaagtactacttctctccattcatagtactctttatctttactatactctcctccttgcaactcaacataggctataaccacacattttacaattactataagtttatacatataatatcagagtatttctattatagaattgcacaaaagagttaatttattggatgaccagttgaagagcaagaatcattagttggagcccttatcattttcgttcttactatcaccttcgtttttagcctctggtttgcgataaacttcttctacgtgtttggccatgaaaatgcccgacttggccatattccttatgttgggaacgttgtagttctgagccacgtaagccccacaaaaagtcccaaacacgaaggaaaaactgaaccttattaaacccatttgttgaatcaaatcgaagctcgacttgcttgcttgatccgaggaaaagatcgattatggtttttctttttttttggagaaaaagtacgtagtataagaaagcaggtggaaatttgactctcgcttgtttttttttggatgtgtggttttataagtctcatttagaaactttcttatgggccaagactctttcttggaggaggcttaagattagtgagttggtgtttggttgtaacttgtaaccccttcttcaagggtcaactcgtcacttcgctaagtaactttattttaataagtataataagttgttatctcttatatatggaaatatattctaagctattattctatcctacttggtcatcctgacctgacctccccttacacctctgagtgttattctttcccactatctacttaatggtcatgtcctgtttgtgtcgattatgatttttcaaaacgatgatgccatgccatacaaattttaaaataaataaatgtatattaagtttttagagatagacttgctttattgcctgtttttctttaatatatgtcattttgacatatttgaagcttccgctctttaaaataatgtcgtttgtttggataaatacttctcattattttgttctttaatatatgtcgttttaacattttcgaagcttccgctctttaaaacaatgtcgtttgtttggataaatacttctcattatttgttttaaaaaaatgtttattcttttgttttaaaattctgtcactctttgatagatatttgaaaagtatattacctcctctccaaggcttcaaagtcaaccacctaacttaccaagaaagtaaatttgggcgagttgggaagcaaactcatctactacataggtcttagaattgaagaaattgagccgagtcgaaaggaaacccaactttaggcctggtaaattatattatatattaataaagggaaacttataagaatttggtcaatttttacaaaaatactatcacacaaaaaaattttcaaaaatactgtgtttttataaaacaatagtagaatacaaaacagaa

SEQ ID NO: 308718 - DNA, 1678 bp, Cannabis indica
tagtttaaataaaaaaaaaaaacaagtataatttctgtaaaaaaaacaacatctacagttgagatcattttttattattttagtgttttatttttttaaaaaagaaaaaaaataaaaagaaacacaaatttaaagttttttatggcattcctcatgactttttcccatatttgtaagtttttttttaaaaaatgccatatttagggtaatcacatatatttcaaaacatatcttcattttcctatatttttgtaaatagccctaaattttgtcatgcttcttcaaaaacctctaaggaagtcttttaataaattttctattgaacattgtaacaatctaagatggggtctaatgctactatccatcctcttgttggattggctatttctttagatcaaacaaaggtttggtggtcaaggctctcttgctgtctttggccttggtttgatattatttgtaatcctcctatttgtttgtttggcctttctagttttttataaactctaatgtattttcactaaaaaaaaataagagagctgagaaagaaaatcatatatatatataaaaaaaaaaatgaactagatattgataaaggaaaatataaaatagactttaataataataaaaaaaaattaatatttttatagtaacttacttttattcttattcaaaaaatagataataaaaaatcaaaactgttttaccaaatatagttttaatatttttaattttttaattaaatcataaaaaaataatttaaataaatattacaagatatctcttataatattattagccatgagtactgacaacacttagaaatggggtctagtaatttatttagcaatatctcctaaaaattaatacatttatatagtatcgatacttaattacatcaataacgatataacatctttaaaagtgttagacaccactgatgcattcgtatgtgtttgaaaccttagatattggtgggtatgatttttttggctaaaacgtgattatcgatgagttatcgatagtttatggataattttttgtctgtgtaccactattttgtgcataaacaaaaatcatcgataaatgtcaaattaacaaaacataaacaaaaatcatcgataaatgccaaattaacaaaaacacaaacataaatcatcaataacctatcgataaatatcaaattgacaaaaatatgttatacaaataaaaatcatcaataaactatcgataatcacattttgataaaaaaaatcatataaggcttctggattttgaggggttccttttatgtcaatggtgacacaggatggattatctttcgtcgccatcgacctataatgaggagaatgggagacgatttgggagtatgggaatgaacttcagccttcttccacccaaaaaaagaagtagactaagagacagacagggggagcgcggtgtcgacgacaaagaaagacaaagaaggagactagacctttcgacgtagtcgaagatagagaggggcatagggtcagttaggagtgttcatcaaaccgttcaaaccgctcaaatcgcctacaccacactgcaccgcaaaaaaaatacagtttgaaattctttgcggtgcggtcgtggtttgaatttttcttaaaccgcgcggtgcggtttgcggttttaaattattaatatgcggttcaaa

SEQ ID NO: 308719 - DNA, 1565 bp, Cannabis indica
ttaagatctaattattcttatatagaggtatattttattaatacgggacttaaaaaatgtataactaattacaatatagaggttattcttatttataactggcccaaattgggacttcattttttttataacaaattagaggttattcttgaatagagtattcttgaatagaggttctactgtatctctctttaacaaactacaatgtttgaaatttttttattcattcaaattttaaaaaataaacccaataattaaacaatctttacgattaacccattcatcaccgccaaacacaacaaaacccctctctcttcatgactaatataattcattttgaatggtttgttatttttttttttggaattcttttctcaacgaaatttgagtgagcgattgagtattcacgatgttgtagtttaagcagaagaaccagactaaaagggcctattatactcgttgtcagtgaggaagaacttggcactgttgttatcgacactgctttcaaatcatatacacacaaaggccatcttccaactctcggctcatatcttaatgatttccttctatactgtcccaatattgttggatcagatggtaagcaatttttaaaactttattcattaattgacactacataatcattggattagactccttttttttttggttgttcccattgtcaatgtgaataagtgttatatcaagtaacttagatgaaaaaataacaattatgttgactattcatgacaaaagcgtatcatcaatgacgatcatatgtatgtgcaaataattcttgtctaagaatctaattttcgagatttagaggcagacactaaatggacttaacaactggagcaatttggtgatgatctaaattagagactatgctatttggcaatatatgtcctcgttaccaaattaaattcttaatttttgggtgtattttatgatgaaattgctcaattagatagaaatttctcatactctattttgcggctgtagttagtgttgccaaataatttcttgttccaatttgaatggataatatttctatcaactaaaacatgtattttttgatttcggaaaagagagaatggtattgaattggatttttatgcatttggtttgttttcattttgtattaaacataacattatttaatataataattaaaaattataatacattattttttataagaaattataatacaactaagtatacgtgcatcgcacctaatttcagcacctattcattcttaaaattcatgacttctggtaggctgacagtggtagcttcttaggaatacttgtacacattaattttgattttgctctgtttttgactccatatctaagatttcttcttggtagtgagaatgttccttcaagtgttagttattcttaattttgtaatatttgaactggaacaaattaaacatatattataaccttattattattgtttccaattatgtttttactaacatttgtagtttaatttaaactccattatactggacataaaagttaaatttaaatttattattcaaatctctctaa

SEQ ID NO: 308720 - DNA, 883 bp, Cannabis indica
ctaactaactaaataaaaataaaaaaaaaaaaaaaaaaaattgatgccatagacaagagccacctactcaggtaatggttacttctctaacctatgcattcccctttatttttcacatggaaattatgtttgtcactattaataacttactaaaaccaaataaaaaacaagtggtttttctataaagttggttagtttagtccatatgaaaattgaaagttgcagtttgatttacaattctgagatcatcatttataatgcatacattaatttaggataattttttttaattttagtgtgataactctaatgtttaataccaaatattatactatatatcccactaaataaatatgttttacttataagatctttcattttatattatttaggtttataattaaaaatagttaatttatgatatgattatatcaagactaatggtaagaattcaaaatcataaaataatatttaattaattaatgtggtacataatttgatgtgtattattaaaattaaatagtatgaagattctaattcaatttggttaaaataattcaccattagagatgcaatgaggtgtgacaaatatcaaattaattgccaaagctaccaactaaattcaacaaaataacatttgcatatatatatatataatggtatagcttagtgacctactcactttagagcatgctttaatatattatgaaaactataattttcatgttttacattaaattcttacattatgtcatacctccatttcctgaataaaatattttttgcctagaggagtagaaacttgtgtgcagtggcggagccagaatttaaagtgaggggggcgtaaataaatttaaaaaaaatatataaagtgtagttagtg

SEQ ID NO: 308721 - DNA, 2125 bp, Cannabis indica
catatttatcataagaacttttaaaatcccatagtaagtgtaatttcctctaaagtatggtgtccaaccctagaaaataaaaaaaaggataatttcacaaatacacaaaaacaataaaaaaattacaaaaatacggttttacgaaattttaaacaatttacggttttttgattttattagcagaaaatatggtctttttatgttgtaatcttgttaatttgttgttgattttttgttatatgtatgttattttttgttattattttgatattattttcatgttactcttatgtagtttttttgttatttttatgaaaaaccgtaaaaatataaacaaaaattccttaaacattaaaatgtacttttttttacaaaaaatagtgccttgtgtaattattccaaaaaaaatgtctactcattgtagaattaaccactataaacccacaatttttagaagagacaaaaacataaataatatctttaatatatatcaaaaagttatttacaccaagataatgtaaagggataggcactctataatgctatttacttttaaaattactcatagcaaaattcatatcatccaaggactccacaatcaatacttttttgtgagaaataatctttactcacttgaaaacttttaaaaagtattagtttaagctttagctaagactatggaggtgatttaaatatagactaaatttagtagggaatacaacatgcttatattggaaaaaaaataacaacctaaactaaagttaaatcattattgataatatagctttatttttttatctctatccaaattatctcttataacaaaaatctcacccaatttccttttttttatgacataaattttaagtacctatcaaattattatcggaccactgtcaggctatatcgtgcctttatcaattatcgtactaccatcgaaccattattgaattttcattcctaacctccaaattacactagtatcgtacccaccattgtaccctatcgaaccaatattgaatcatatacaaaaaaatcgtagaaaatgtatgtttcactaaaatttaattttttaccaaaaaatacaaagaaaccacaaatcgttcgtcttcccgttcgacgatggtggtcatgggtcgtggatcgtcggccccgcaccaaagagaaccagagagggagggtcgtgggtggtggtgcgataatgcgatagtgcgagtggtgaattttgggatagtttgtggtggtcgattgagtgagaagaaaactgccaaagtgagagggaaagagcgagagaaaaagagagaatagaaagagggtttctttttttgggctttttgaaatgagagggataattttggggtattctaaaaaattgacacacaaaacctatacacattaactttagtttaggtggttaattttaatctaatagatgcatatttaatcatttctcaattaggataaagataaatgaataaataatatataatataatagttacataaattaaaatacaataaaatatatacaataatgtaacaccctactagtttaggcgtgttatcgtgattttatattaacggtgcaactcgttgctaatcaacgagtttaataaaaatcatgaataattaaaactttgttcaactacttataaacatcaaaattataacatatgtataaccgacatcccgtttataaaatatttacaactgtttcatggtacataatacaaaagttattgcctagtgactatacaaaatacgtccaacacgcccaaagactgtacgctccagacctaactgccctgatatgtacaatcttcattcgctcgctctcacggctgctcaaccttagccctgcccttacctacacatgcaagcattaactgtgagtcgacgaactcagtaagaaaagcataatcataaacataaacatatatttagaccgcaaccaggtgcccatacacctagtcacaatctgctaactagattaggaacgttctcgacaaagtatgactaaatgcgaatccagcttatactcagtactctagtcgtactgatgtggtagccgttagtttatattatctgatagcctaacatatatctattggcatctctgtgcaact

SEQ ID NO: 308722 - DNA, 2498 bp, Cannabis indica
tttttttttttgaaatattttaagatttaaaaataaatttctaaagaaaaaaaaaacttaaaaattcacatattttattcattcattttgaagcaaaactcatgtaaaaaatttagttaaaaaataataatgtagaacaactattttggtggacaatcataattaattttttcgccataagtgtgtaataattaattgacatgaaacttttattgcttgtgtaggtttttgaacgctggcatatttgggcacggaacagagtcttgccacactcttcctcactcgtcaaccagagccggcttgcttgttagaattaacacccttctccaaggttactctggcattagatttgagattttggaagccatggcaaagctccttaacaacaatgtcaccccttgtttgccattgcgtggaacaatcactgcatccggtgaccttgttcccttatcttacattgctggtttacttactggtaggccaaactcaaaggcagtgggtcctaacggagaatcccttaccgcaaaggaagccttcaaagttgctgacattaactctagtttctttgagttgcaacctaaggaaggccttgctcttgttaatggcaccgctgttggttccggtgtggcctctactgtcctttttgaggcaaatattctagcagtgttagctgaagtcttgtcagcaatttttgcagaagtgatgcaaggtaagcctgagttcaccgatcacttgactcacaagttgaagcaccatcctggtcaaattgaggctgcagccataatggaacatattttggatggcagttcttacgttaaagaggcaaaaaagcttcacgagatggacccccttcaaaagccaaagcaagatcgctatgctcttaggacatcaccacagtggcttggaccccagatagaagttattagattctcaaccaagtctattgagagagagattaactcagtgaacgacaatcctttgattgatgtttcaagaaacaaagctcttcacggtggcaacttccaagggaccccaatcggagtttccatggacaacacccgtttggctattgcagcaattggtaaactgatgtttgcccaattttctgagcttgtaaatgatttttacaacaatggtttgccttcaaatctctctggtggtcgcaacccaagtttggattatggtttcaagggagctgaaattgccatggcctcttattgttctgagcttcaatatcttgctaatccagtgactagccatgtccaaagtgctgagcaacacaaccaagatgtgaactctctaggattgatatcatcaaggaagagtgctgagtctattgagattctcaagctcatgtctaccacatttttggtggctctttgccaagccattgacttgagacatttggaggagaatttgaggcacacagttaaaaagacagtgagtctagttgctaagaaagttctgacttccgcagtcagtggtgaactccatccttcaaggttttgcgaagctgatctacttaaagtggtagacagggaatatgtttttgcctacattgatgatccatgtagtgcaacctatccattgatgcaaaagctacgacaagtactagtcgaacaagctttggttaatggtgaaactgaaaagaatccaaacacttctatcttcaaaagattggagcttttgaagaggaattgaagaacatattgcctaaagaggttgagagttcaagggttgctcttgaaagtgggaatccaaccttaacaaacaagattaaggattgcaggtcttatcctttatacaagtttgtgagagataatttggaaacagatttgttatcaggagagaatgttagatcaccaggagaagagtttgacaaagtgttcactgccatgtgccaaggaaagattattgatcccttgttggaatgtcttagcaactggaatggtaccccacttccattgtgttaattatttcttatacttcgattgtccttttcccttttttattatatatatatgtccataaatgttgcttgagttgcaacaaggtgactgagctaagagttgtaaaacaatatttgaacttgcttttattatttgatatattttataatattaactacaatcagtttcaaactcatgatgcatatgatgtatcatttgatactgaagttcattgttctacatttgaccacattttatggtagccattatattatataatagagttatattgaaccatttaataaaacaagggattataatggaaaatctctctatataattttctttggcagtcaactaccttgtacaaaatttggcaacaaaaatacttacttagtgaattttattgtagttaactatatatatatggaataatttttaacgggtattacctattaatgggtaataaataaatttaaatataaatattaattttaaaaatattaaatcattaaattttggtcgatagcgaataataaaagagaaatt

SEQ ID NO: 308723 - DNA, 998 bp, Cannabis indica
gactataatatatataatacacatatatagtattatgtactcttacttcttaagtagtaggtacaacttactaaatactatgtattgttattactttactactactattactattatatatatatatatatatatatatatatacttgatcatcactatatagctctcataatcacttattccaaacattgatattattatgatgggaatagaaaggccaaaaatgggaatgaattcattttttctttttgagagaggctctttcaatacataatgtcaaaaccttatctctttttttattgcatgaaaagttataaatttaattaattatataaatggggtgggttgcattttgttgcgtgtgccatgataggtatgattgtttctctccaaaaaggatataaatagcctttggtttttggtcaactattatactaattactctttctagctctattcttcttcttcatcatcatcatcatcatctctttctctccattgaaaaagccatatatatgttatgtgggaacatttggttgggccatgagtctatatatgtgtgtgtgaaaccaatgaactaggctacatataaatatatagagaaatataattatagtatatatttgttttagctagaactgagattacatttacaaccatatggttttcattgcactcatttgatataacgtgattggtcgagtggctatatggctcatggggccatagttagggtcggcagagagagaattaatatgtgttattttcttatatatttttattttataattatattataccaaatttaatataaatatttaggaatgcttgttttgatatttgtacaatcacatataatattaggtcgcgcggttaaattttaaattcgaaataataattatctaggtatttagggagttttttagatggggatatcacttgtgctcagggacggacacagtaataagagtgtggggttatagcccccactaaaaaaa

SEQ ID NO: 308724 - DNA, 3362 bp, Cannabis indica
ttttttttttttcttttaataaaaatgataagatctatttatcaataaattagtttaaaataatagagcgtactttagagaaatagtcctttaactaaagcacacgacttgtagagaaataagagttttttgccaagcaatgagccaatttatttacaaatcgttttacaaaatacaaattgtgaagacataaaataccgctttgaattgcttggacacacaccaagctatctgtttccaacaacgaatgaattgcaatctaattcaatgcttctttaatatctatggtttttattaatatatatacttatcaaatttacactataaatttttttacttttagtcacaatgaaatttatgatcaaaagttaaaaggttgtgattaataaaaaattattattcttatattgtgactaaaatgtccgtaactaaatgtattaatcacaaaaattacaatttattgtgattaaatgtaattttagtcacaatatttgttgtgactaaaactaaattaatgacaacttgtgtctaaattaattaatggtatgttttagtagggatagcaattcgtgttcgcggatcgtgttcatatcgtgtcgagacctatatataacaggtacatgcttgatctgaacacgacccgtttaataatcgtgtcaaaaaataaaactcgaatacaactcatttataaaccggagttgacaagacacgacccgtgtaactcgtttataagcatattttatttaagtattatgtcaaccaataatacgtttatgaagtattcaacacgtttataacctatttatgattcattaaagtattaaaataactttaaatatgtcattaacaggtcaatatcattaatataattttttttttcaaaaaaataataccaagaaatactgttagttatcaaatatattatgacatatatgtgggtggcccacatgttagaatgggttgtgtaatatattgttggtttttttagtaacaaacagacaagagtatttatcaaaatgaaaattaaatagagtacgtaatcagtttacaacttttgttctctatataataaaatgctaaaattggacaacagttgggaaaaatattatcaatttttgtatagtattttagcttaatttgatattaagagaataaatatgtatgtttataataaattaataattaaagaaatattggtataattctttgataggaagaattcctcaaaatagtatattattgccattttaaaatgattcaagatcaccgaaataatatctaaacctaataattgaaggcgaagataaaggatcaaaaacaataaaatatttaatcaagtcttttgcatgaattttacatttcctaataattttctttgttgtaattagttactaactagtactaattaatctaagtagagaataatcatataataattaaaagacaaattctacgtacacgcaaaaacaatagcattaaatccaaagagttatagcaccgttcaaaatatgagtatagagccaaattagtatagttagccatttttgactaaaaactttactttaaagcacaaccactaccaaatatcttccaaagtcccaaccccatcactacaacacaaaaattactatctataaatatataacactccacaacttcaaatttcaaacacaaaaccctagctactttattgaagtgtcattatcactatcattattaattttacacaatattatacttatgggaggatccacctttgtagttatgaagctagttatttggttgttattggttgtggccatgccattgagccatgccttaacctgtggccaagtggccacaggtatcaaaccgtgcataaactatcttaagacaggtggggctttaccgccgcaatgctgcgacggtattcgatcactgaacaatgaggccaagaccactgtcgatcgaaaggcagtttgcaattgcctaaagtcggctgccaagagcataaccgggatcaacctcaacatcgccgctggacttcctggcaagtgtggtgtcagcgtgccttacaagattagcccttctactaattgcaataagtaacattctttaactttacactaaaatttacacaatatataggtttcgaatgtagtactgttatttttaattttgtagaatatattttattttagagtaaattaatttataataatattaaagtaatttagaaaaaaatacattcataattaatttttgtatttatatatacactataaaactttttacttttggtcacaataaaatttgtgattaaaagtaaaaaatttctgactaattatgaataatcattcttatattgtgactaaaaaaactataactaaatatatattagtcacaaaaatcatattttgttgtgactaaatgtatttttagtcacaatatttattgtgactaaaattaaattagtgacaacttatatctaaatactatatattttagtcacaaataattttttattgtgattaaaatttacatcttattactaaaaatttatgttatattttttttaataatatataaatatatagatatttatctatatagattggattgacgagtgaattttgttatgttgttttgttgttatatgcagtgtgcaatgagcttggatcatgatggtgcaagacaacaaaataaagtgcaaatggagctattaattccttatatggagtttctttaataagttaattatagttgtataatttcatcatgtactttttgtcatgaataataataatggagttcttaccttctttatactaattaaattaattaatattgtattttattccaagagtattgttattttgacaactcatacatacgttagcagttatttatattatttattaattaaaatgtgtgaaacacaagaataataaaatgcatagcaataggtgacatcttaaagtgctccataatatttctcttatcgcaatatttcactatacactgatgtaactgctttttatttttggtatctagaattctctgcacctaggcccagccctgggcataggcaggctaggcctgtgcctagggcccacctagtctaggggccccaaaaaaatatttcccttttgaaattatacaatttttttttattgattttgaaaaatactacattttttttctaaataagggcccaaaataattttttttctatgatccactaattatcaggaccggccctgtctgcaccttgtcgaaaagttataaaaatttagaagagtaatttgcggcgaaatccccttatgttttgatttttatacacttaacccccttatctttatttttggtggcaaaaccccctt

SEQ ID NO: 308725 - DNA, 2490 bp, Cannabis indica
ttttaataattttataatttttagattttttctacataaaatatgatattttttatgtatttttatgttatacttttgttattttgttgttaattttttgttatttgtatattattttttatgttgatttgttgttgtttttaagggtgtgcataaattaatccaatctaatgataaccaaccgatccaattacaattgaccgaaaaatattatatatctaattgtgatcggatcaaattggatgttatttttgaatacccaattggatcgaattggatactatttttgaatatccaattaaattggattggatgttggatgtactgttcaaaaatctaatccaacattctatcaaattaattaatattttatttagtttgaatgaataattagattttattttgctatacgtaaaataaatatgtatgtataaaaattaatattaaaattttactatttttttagattgaatggatccacttcaatccaatagatactactaggtctaaaatattagataaacctgaattaaatcaatagatatacatgaaatacatccagcagatagaactgatccaatccaatatccattagaagttggatcgattagatagttaaattaattggatcagattggatggtttaatgtaatatccaatatataattggatcggatcttattagatttaaaaacattggatgtggtcctagttgttttaatgttattttttttactttcatgtaattttttttattgtcttcttgtgtttttatagaataccgtaaatatatatatatataaaaaaaatctttgaacgtaaaaatataaaacttaatatgttatgtaattatttctataaaaaaaaatgtgaagaacttgggtatcatgaagcatagatacctataaaatttggttgaatgaattataaaatttttccgattagattacgatcaattaaaattaatttatttatacttactatatcattaaaattattatttgagttaaattataatttgaatctcatgaagaaaaaaaaaaatctaaaatagaaaaaagaaattgcatagcttgagaataacttaggaattttgttcattgtattaatattttgggatcattatttaattcatcatttttgtttatttcaaattttatatatttttatttagagtttctgtggtacgatatattgtattgtgtaatattgtattgtattacattagtattatttaatacaatactatgtttggtgttgacttgtatcaataaattgtgtatagttgtaatatattttcaataaactcgaccccaaggtccccaacactgactacgaatcggtccaggttcaagtttgggtccaagtctcaggtccaggtctgggttctaggttcagatcttgagtctcaggttcgggtcccaagtttcgggtctcgatccgggcctaggtcccttcccatctcgagtttgggttcaagtccaaatctgggtctatgccccagttctaggtctaggtttgggccccgagtttaggtcccagttctgggtttgagtcctaagttcgagtccgggtcccaagtctcgggtgctaagtccaagtttgagctctgggtccaggtctggatccgatatggtctagtctggtccgtgtccgtttcgaattcgatccaggtccaagtctggatctaaattctgggtttgggttcaggtccaggtcccaaatcctaggtccaggtctggattcgggtcccgggtcctaggtccgagttcgggtttggatctcgtgttcgggttcaagttcgggtcccaggtctgggtttgggtcctaggtcccgggtctggattcaagttcgagtccaggtccaggtccgaggtctgagtctaggttcaagctcgagttcggttcttggttcaggatcctgggggtctggatcccaaggttgggtcctaggtctgggtccgagttcgggtcttgaatcttaggtcagggtccgggttcgagtcccagatcgtggttcgagtctggggccaggtccgagattcggtcctgggttcagtcccgagtcaggtccagatttgggtcgaagattggagttgagtcgaatcctttataaatattataatacaagctaatacggactatttattatgtattaaataatacaacttacaatgtattaaaaaatttagtcgtaataactaatacaatacattactttgtccaaatataatattatttattatttaatacaatacgacgcttatacagcctattaaacgagctcttagtgtattatccatatgaatccatcggatattagcttgcacaccccttttcttaaaagaagattttaagtaaaagggacggtgcaagctaatatccgatgggagatagacaagtattaaggatgaccttacggttatccatggtacggagtttttacccttaagtctaatttttgttcaacagcagggcgttggagaaagt

SEQ ID NO: 308726 - DNA, 4756 bp, Cannabis indica
ttagagatatatcctatatatctacacgctggcaagacacgacactatccctaaattcatgggatagattcgtagtatcaaagaagaaagaaaatctgcttaagtttcccattttgcttattgtaattatagaaggtaaatagatttcttattttattttttattgattttgggaaaccaatttgatgtaactaatccctataagtagtggactcatctcactattcagggagagaaaactcattcaggaaaaacactcacgagagaattatagattcaagagtgaaatactcagatcattgcaagagctttcgagagatataaaggcattcttgttcatcttctcacaagtcaatacaactaaagaggagtaggctattaccatcaataagaggccgaacctctataattatagtgttttctttactttatattatctatatttgttattttaattccttaaatcgctttaatttgactcactatcgttggctaaaagtgaggttaacattttggtgctttcattgagagcaaagaaacacaagtctttgttttaagtctttttcaagatacaaaatggttgtacaaacacggagggaaaatcagactaaagtaactaatccaatggctatagatccaaacatgtagacgcctgcaaaccctagagatccagctaggacgtactcccctctgactaatcctcagccaccaacaggcctgcaaactgtaggtcagtgagtgattaccttcagctaggtttactctaggtttgcaagaaactggaaccaccagtactgagatcgaccaaactactttcagtactgcaatcccatgttctacaaattctcaaaggccaatcagtgataccaaactaaaaaatttgcaagctgcattggggcaaacacacaaccacaataatactctttactatgactagaaagatactcgagcagctataaatcttacttttgaagaacaaagatgccaattcaaagagtggagggatcgagatatgggaatcatgagagcccagcaagcgacaatcgacaaccgttccaggtaggccgcttgatcagaagagcctatcaagtcattggccaacaaccagtaacaaacacttatattcccactgggccacaacacaagccagaagaatgtccagctgaactccctcagcaaacccaaattaatggactgtccaatccaaggccacagggtcaaattgtgggccaaatggtagacgcgtgacttttaccaactcgttatttgggagagattgatcagcctaacactcgtcctcaaacagaggtaccgatccaaccccttgctcacaatggctaggcaagaaagcctccaggcaaattattctttacccaactggctaccgtgcacgaccttaggaataatttgaattatagaagaagattagatggaaatgacattcctcctaccatgcatccaaataatacaaattacgatgtacccgacccagttctaaaagatcctcatgtgacacaggtcggtcaacaggaaggtcaagttgatacattggtgcaagcatagatagatcaactaagaacctcgttcaatgcctgaccagccaaaaactcacaaatctagaacttgaccggaccaggggatcaccgttctcaccagaaatcaatgctcttgacctaccacccaatttcaaaatgccaaaatggaaaacaaatacaaacaaggaagatcctttgtctcacagtaaatattttgaaatgaaaatggacttacaagcagtgagaggtgatgtacggtgcaaaattttcccagctaccttggcagaagctgcctaacagtgttacttcaagttagcttcaggaaagtttaatgtgtagaattctttcatgtcatagtttcatgcacaactctcctcttctcgacagctcccatctcacttagaagacatggtcaaagtgaagcaaataccaggggaaaccttgagagcttacatcagtagattcatgactgacgctacaaaagtgaaatgattaattaaagaagggagactgtccgtaatcctaggaggtattgagcctctaagagaattgttgaaatacataaaaagacataatatatggtcaatggcagaattcttggaccaggcagatggatttataaagcttgaagaagcagttcggcatgtggacacaattggaaaaagaataaccaacagacaccattgcaaccaatacatccgtctagccagactagaattcataaaatcacaacaaatcgaatcaaagtggtaaaaggccaaacaatggcaactgtcagggcagtggaaagaaaagcagtttcagtggcaactccgaacaacatcctcgggagagtgcctcaaagttaactgcttttactatcctaatagagaatacataaacaattttcacaataacctagtctatggtgtcgtattaaaaacctcctcccatgaagaaagatatgaacaagagggacaccaccaagttttgtcactttcatgcagactatggtcatgaaattaatgattgcaataatttgatgtgggaaatagagttcctcatcaggaaaaataacctgcacttgtagaaatatgtcaagagtcaagaccgaccaggaacaaagggtcgcccaaccagataacacacaaaaccagttgatgcctccacaagtggatggacatcttcaagttattattggaggcccccacattgctggagactcgggcaaaactagagaaaaatatgctcggaccctacaacatgaacaaaaaaaaatgaggttttaattgttgaagaaagaaagcctaaacaaacacgcattcgggaactagttatatcttttagcaaaaatgactctgaccacgttatatatccgcacaacgatcctttggttgttgatgtccagattgcaaataaaatggtggcttgaactatggttgaccagggtcctcttaaaatattttgctcaaaacaacctatgaaaagattgggcttcatctcaaagacttggtcccatgcacttagttgttgtacgacttctctgacaaaagcattactccactcggttagattcgcctaccgctcacattaggacaagctccaataagcacaatggggatggctcaattcttgataattgatgtgccttctgccttaaatgtcatactaggccgaccaaccttatatgacttgaggtggtcacttcagtatttcacctatgtatgaaatttccaataagaaatggagtgggctgtctgaaaggaaaccaaagagctgcacaggaatgttataaccttgatgtatctatccaaggtcaaaaaggaagaaaccttcgaccagagttcaggaagggagaaaacattgcccaataggaatctgcccaaggcggggacaaaaatatggatctctgcattggggaacctaatgcaaatgttagactagtggaagagctagatgaagttgaaattgatcctaccatactaattaggaagcttaaaattggcaaaggtttattgctcaaaataaaatcaactttgataaaatttctaagagcaaacctcgaaagacatggtcgagatcaatccagttataatgtctcatgccctcaacattgatccagactttcatcccatctagcagaaaaggaaattgatggacaaagaatgtgcacaagcactaaaagaagaggtagaaaggctccacataaatagatttattattgaagccttctactcagcctgggtagctaaccctgtactagtacccaagctgaacaagaaatgacaagtatgtatcgatttcaccgaccttaacaaggcgtgccctaaagacttttttccacttctaagaatagatcaacttgtggatgcaatgaccgaccatgaaatcttaagctttatggatgcctatttggggataatcagataagaatacatccacctgaccaagagcacactattttttgagtaggttttggtttatactgctacaaagttatgccatttggcctcaagaatgctggagctacctaccaaaggttagtcaacaagttgttcaaggaccaaatcagccgtaatatggaagtatatgtggatgacatgctcatcaaatctaggaagtctggagggcacattgaggacctagatgaatacttcaaaatcctcaaaaaaatacaacacaaacctcaatcccttaaagtgttccttcgggtcagtttgggtaagtttcttggattcattgttaatgctcgaggaatagaagataattaagagaaaatttaagccatcctagatatgaagttgccaacaaaggtgaaagaagtgcaaagcctaactggtcgaatagccgcattaagcatgtttgtcttaaaaccaacaaacaagtgcgttcctttcttcaacatcctctgaggtaaaaagaagtttgagtggatagaggaatgtgagaatgcttttcaagaattaaataagcaacttgcagaacctcccaacctatcaaaacctctggatgaagaagaattaagggcctctgattttggtgaactgacattgcatcttccttgatgttcaaggcatggaaaattttgttggggttgatccttgtcatgtcagaatggcaccatgcgagcacatcctaatttgtcatgactatatccacaatcttttttttcaccactggatgtaagtttctcacactttgatggtcgtagtgggatcttaatcgtatatttggacttcttc

SEQ ID NO: 308727 - DNA, 1835 bp, Cannabis indica
aaaaaaaaaaggaaaagaaaaatacttgcttttcttgaactcttcttctctaataaagaaaagtgtcacaatagatgggtgtgtctcgatatcatgtatgagtttaaaaatcaaaactgacattttgtcaccttaaccaactcttcattattagagcaatatatggggtactcgtaagacttttttttggggagagagaaaagtttttcaatttactaataaaatgtggagaagactcattattgcaatctataatttttgctggaagtcaataaattattgcaatctatattgcttattaaattatgattataatagtacatatggtgcaaaactaaccagcccaaataagatagttttagtacgtttaaaatcttatctcttctttttgtcaaacgtcacataacacattcactaatagttttccacatatgagttacttttcttattagcccccttgaagttggtggatcattttgaatgtgcataacattacattaacacaacatataatctttattattcacctccatacagtgtcagttattctttactttaatcatggattccacttcatacacatacacactataaatatatatatattcataatacacattataaatattaatattatagtctatagatagtctatagatataatattatttaaatctctctcggatcacccaacctctccattataattttttgtctacatggtataatgatcaaagctccaaatgtcttgatatgggccaatatcatggtacacattgcttgaaaattgagttagaaattattaaactcggccacataaggctgctactaaaagtctcaaacccagacaaagaaagcaacaaacaaagctagttgtttgttgtgaacattaattaagaacccctttttatttatttattcaataattttacttttttttttgagggagagtgacccgctaagttatagcgagcaggaaaagggatcacttccatttcaaagtcaagtgttatctaacccaatagacaattacactaagttgtgtgttgttgtattccttagcctgttaatgtgagataagaaaacaattgggaaggagaacacttctttaagagattctgttatggtgcgaatttttttcctagaaactcaagaccgggctcctataagaatgacacatggactcacatcccttgaggatcgttgagctttcaagaagggactcctcgagaagttagcctcgcgagatgatgtgactctgacagggtctaatcacattattacgtctcgcctaataaaaaataagcaggaccaagaagggactatacaagtcgcgcatataccgagatatatgcgatgaataagtagtcttctcctgcgacttagtaaagatcatttctttacattaggaattggttccaatgtcccagtgtactcgatgactcgataaggactcgcatgtcctatgttatcaatgctgataatgtgtccacatacgctactcgaccaggatgcagataccttagtacaaggtccattagcctcctttagaatgataaaacacaccctaagcctgcgagcttgtgtgagaagatgaacaggcaactcgcactgtaacaccctaactagcataagcgtgttaacatgattttaaacatactgtgtagctcgtgctaatcaacgaggttattgaaaatcgtgattaattaaaatttgcttatttaattaaaaacttaaaagtattatatatataatatttcgagatcccgtctacaaaatactttacaaaaggtttgctattcatttacaaaatatttgtcgcccagcgactaaac

SEQ ID NO: 308728 - DNA, 2166 bp, Cannabis indica
ttactctttatagttggattgatcgtatgattattaataattattgaatgtctgaatatatcgaatcagcttaaaagctaattattatttcgtattttgtagcacggtgtattatgggcaatacaaatgttatggaaggggatccggaatgagtaaacgtgtccaatatgcgcgcaactttacgagcgaagaagttgaacctttcttgacccaagacttcattggtggcaaagattggatcagaccggttccaaccaaattcaccaaagctactttcaaaacagttggtgcaaaaaactagctaatcaaaaatattgtgccctaatatacacaacaaattcttttaatatattgcacacatgtcattactttgtacttaaaataaaacacaacatattcttttgtataatatataagtgattattattattattaagtgaatattattttaattattatttgattttatttgtttgttcctagtagaaaacacatttattgcatgtgaaagtccataatccttgtattcatttagaaatgtcaaagtaaataaagaataatatatcgttattagatgataatggatattttgtcaataattaataatttcatataattattgaattaaatatatttatgtaagatctaatattacattgcaccattatcatccaattctaatttaaggatagagaatttgaaatggaattttgataactaaccataaaataatcataataaatttaattacgaattaatttagatacagaaaaatgaagaaaaaattaaaaaatgatttattataagaaagagagtgaaagggatatagtatatatctatcattatgtcattgcttaattactaagtacaaatatagttgtgttgtgtgtggatagtggatgatgtcaacaatcttcttaacttcaaaagatgattttaatcaaataatgagaattctttgactaaatcaacagtccacaatacatgtgacgtggcattatatggttagaaaatttgataaaggaaaaaaaagacccacttaagtggcattatgataaacttacaacttgggtatgtatgaatgatcataaccatacaaaaataaaaatcataacctacaaatagttagtggcaacatattaaaagtttaattttacattttaataataatatttaaattatatttttatcgtaagtgtataaccgttaagtacttttacgtagttattgacttaacacttaacgaacatgtacttattaaaattttaaaaatataacttaagtattattaccgttaaaaattaaaattaaatatttatattacaagttattctttctataagtattactaaagccatatgacatttcatagttgtgatagacactataagtacactttaacatttactaaaaaaaatgaaaataatactaattactcttaatatgatcaaagctgccttaactaggtaagttaagcatatcatcatatattttcttctttttcacattggtggtggacattggacaagaaaaagtcaccaatagatgccttccaactcatttcaataccattcatttatcataattctaagtgtatatatatatatagttagtgatacaatgaaagtgacttcatatgtcattgtgacaaaacaaaaaagatgaaatacaaaccaaacaactttaaccaataacaagtcactatatatctcatcctattaccatcaattaattaaaaaccataactatattgttcttctaaacttgtttgttgttcatatgaatcatatcaaggaaagaacttaagttttgattcacctttcaaattcagctctaaaacaaaagttaagtggtttttattttctctttaacaaattcccaactcaactcattctgtcttcttagctttacttttttttcccttactttatgatcaaaagcttatctttttaagcaaattacttaaatataatgtattactctgattttggacatgatcagattttgaataagttaaacaaactatcatatcacatatacacagggccggccctaggcataggcgggctaagtccgtgcctagggcccacactttctgggagcccaaaataaaaaataaaaaaaattattaggcttttatttaagtaaaatttaaatgtattataa

SEQ ID NO: 308729 - DNA, 2319 bp, Cannabis indica
tgttattacaggttaaagaaaaatgtaaccatatgggtacaataaaaatgtaaccattgattttcattagttttcatattttatatatttggcagttgagatttaaattagtcatttatgattatgatagattctacaattgaatattttcattaattaataaagagaatataaattagtcatttttgactaacttgataataaatactatttattaatattttttaaaagtatatatatatatatattgaatagtttgtacatttatcatatttactactttagaaacaaaataggatctatcaaaaattgtgttgagaatatatatatatatatatatatatatatatttacaattgggcctagatgcgaccatatgtaagttatgtatttttagatttacttttggattaagttagttagaattattttgttagttgatctgttgtagcttttataattcagttacaagttggttattttccaactaacactttcttgatgaactgagctatataagctcatttctctcaatgtaaatttcagttgagtaataacaagattttgctctgttcttcctctctctttctctcttttctcatatagtatcagaagaaatcttgcccacagcttccatggtaagaccttcgactcgttctcaggatggtgctcctccatcgacaatcgacaaccaagcagcagaggtcaattccgatcctgttcctgctccaaatttcttagctattcctcctcgcaatccaccacttcggcctcaatcttagaatgcagatccaactcccaaggaccaatccaccatcattgacgacaacacgactcaggcactcaattctcgatccgttgttgatgatcattccagtcccttcttcctcagcaccggcgatcaccctggcctcgtgtgcttgtgtccactgtcctcaatggcaccagttatcaaccatagaaatgaggcatcactatggctttcactgccaagaacaagattgcatttatcaatagatctcttcctcgtcccgaacctggtagtccctatctcaactcttggttaagatgcaacaacatggtcatgtcttggttgattaattttgtttcctctgagattgcacaaagtataatgtactttgatttggctactgaaatgtcgaacgatcttgctgagcgtttcaatgaaggcaatggccctcggatatttcaattgcaaaccaagctcactcgtcttcaacagggtgatcactctgtttctacatattttacaaaaatgaaattcctatgggatgagttgaaggaatttcaactaataaccacttgcacttgtggtgcaatgaaaaatttcttggattactacaaccagaatcaagtgcttcacttcttgactggattagacgaatcctttgcttcggtttgagctcaaatttgctcaatgaaccaataccaaatatgattcgtgtgtttgccatgatcgtttaagaagagcgtcaaagatcacttggctttgctgatgcaattccactggctgctgcttcaagttctaccaaccctccaagagccaagaaaccttggccatcttgttccaactatagcaaaccagaccacttggttgataaatgctatttcatacatgggtttcccctggttatggagacaaaaagaaacaagacaagggaaaagctaaggcaaatcttgcctccaccaacaaccccaattctgacactgatggaatcactgtgagtactgaccttgcttctcaatgtcagcacctgatctccgtccccagttagcaacttagccataacaaccatgttgatctctttgtctcttttctcatatgtatggactgtagttgctaaataaaacttagggaaatttacatggtatatttacttttgccattttttttcttctaaaatactgtcaggcggtatttttttacttttttactgtgtattttataagtttcatactgcagtatactgtatttattttttagttttttttgtttgttttagtgttgttttacggttgtttttcataatttattttttaacgttcgaattcactgttcttactccatcttgctgaaattaatggattattttttgggtgttctcgtggtgctgtggtggttatatctgtgggtgtggaagatggaggctacacaatacttttcttcttccttctctatggttattttgtggttattttttttttattttattttgggtctcctaaaaatatatttgacgagctcactagaatttttttttgggtattatacaattttgtatacattattttaattaa

SEQ ID NO: 308730 - DNA, 1581 bp, Cannabis indica
tatcaaaatccaataaaaaattaatcaaacttatgacaagaatgaccaaattacccttttttcaccatgaagtaatctttttgtctaagcgtaaaatggtcaaaaccattaaccgtcctaaccccatcattctaaatgtactcaaatcttgtcctgctaaatcttaaatactcaacctatctatgtgactctaatggcaatattggcgtattctattattattgggcacgaaatacaaaaaaataacataatgcatgtatataatatacttagaaccaataaaatctccataattgagaaactatttagcaaacacatatttctaataataggtcccatttaccaaagtatgcataaacctaattaataattgaaaaactattaatacgccactaagttccatgtttaaatttgtgatcactacaataggagtatccccatcacgaaaactagatttctcgacgatagttcgggtggctacaatggttgttgtatacaactttattggtatcacttctttcttcagctctcactaaaagcaccaaaatttctaccaagattttcaaaaactaataaaatataataaagcttaaagaaatatattatacacaaagaataataccagagtttttacatggttcaagaattaatgatctcttgtctacaagtcaatattataatgataagacttgaaaagtctatgatatagttaagtgtttgtaccctagaattttcctgagcactcaaggaaagagatcttctaaccctttgcatgaatagattttgttatatttgtagtggtagggttctacacattgccctctaatgtgttaaatacatataatacattgactttggacttatttgatgaagctcggcccatgcattgatcttctactgacgtggaggccacatcatgttgatagttgtcaaaccgtatcctactttggtggataagaaacacatataaatgcttgattgataattttttgtatttccttattcggaagatacgaggaagatatgaatcctagacttgatcctagaaataaaatcctgatattgtggaatttggcaataaaatgttgtaatacggagcttgatatctggatgcttatttaatcactcatgtagaagatctacctgatgccatctgaagacatgttatgccagagatgtatcttgtctggacgagtcgtttgtccaacatttggatgacttgactttgttaattgatccattctattatcttggttggttctgcgattgggcctggaacaattagctaaaaccgtcttagaattacacgtgtcatttatccgaaaacacggataatactttctattctacctttgttttcagtatattccttaaatattgcattggacgtaaaaataatagaaaaatttacatagaccaaaaaaattgaaaaaaaaaaatacaatcaaagaaggaaaaaaaaaatttttactctttgaattttttatttacaaaaatacatttttaataaaaataataaactgtttttttttttgtttgttttatagtttatttatagttataattgtcatgatgttattt

SEQ ID NO: 308731 - DNA, 2034 bp, Cannabis indica
accatcgggcctggcaaaaaaattagttttctctctaaaactcaaattcgactattttgaccctaactctaacatcaactcacagataatatatattagtcatacaatttattcctttgacaacattgatgatggagaagttgtggttgatggagaagtcattgggtatgtgggtcgttgggtctgcgatggtcattgggcccgttggttgttgggtatgtgctcgtggtggtcgtggagagaagggatcgaggttgtgggtggtgggtcataggttaagtccttagggtgagttcagtgagagagagagagaaggcaggaagagagaaggtcaggtatttgaaatgggaggaatagaattgaattttatgaaatattagtctattctaccgacatgggttaaattaaatttagaaaaataattttaatccaatttgtgcatcgaaagtcaaattttcctattattattgtgattattttcaacaaagttatactccattataaggtttaccataataaggcatttcattaacgactcaaatctccctagcctaatcatatagtttgaactaaccctcgatcaatggtattcttgaattgtacaatttaaattaatacatagcctagatcttattaaaaatatgctaattattatttttattctcaaatttaatatgtatcaaatcattctcctaaaactattgagattattagatttaaatttttttatttaagtttgtctctgaattgattgaacctgctgctagagatggccttaagtcaagccattaaatatttgatcaatggttgacacatgctttgtaatgaccgcgtggttaaatcataggaattaacaaataattaagaatataattattaatttatggttatgtacctcttagtagaaaatagggcttattgtcagaaataggccatatgaaaataatttctcaattacggagatatatttgaatgttcaatatattttatatgttatatgtgaatttttatgattgcatgttttatgcccgataatagtagaatataataatttggtcattagagtcgtttagatacggtgttatattttggaatgagcaggacgagatagttagacattgtgaatgttgagattattcggaatagttttagaccattttacccctaggctatttaagttgctttatagctaagtaaaggcaaaattgtcatttcgccctaaggtttcaactattgtttttactgaattctagtaattccttaattagttatgttgaatatttttggagaataagacaagatatttagattatatctttttatttaaaaagtaaataaagaaaaaaaaattttacccttatctttttctctttctcggtctctctagaaaactaaggaggactcaaccatttaacttttgttcttgatgattacagcaagatttgaaggaattttcttgggtgaattcaaaggtaagagccctagttcctctatgcctttgttttctatgttttgagctaggttgtgaagtaaaattttatttatggttttgtttatgtttgagttgcttgaggtttattttcagagttgattttgtgcttattggtgctagtttgatttctttttgtgagtttttgtgtaggttagctaagttgagctcaaacttagctcatcaatggcaaaactcaatttttgagctttgatgatgctacttttggttgctttgtcctttatgccttatttaagtgttttggaaagtttggttggatttgaggaagttttgaataggtttttgatgttgggagttttttgtaggggaaaatggttcaccatttccccaaaaacggtgaaccaatttttctagcagaatccaaaaaaatggtagatcgtttggagttttgcttcactggattttttagattttggggcttagttttttatattttatcaaaatttaaggtatttttacgctatctatcaatagcaaaacttttcattttaagtttaagtccccaaaaagtaatttagcgtatc

SEQ ID NO: 308732 - DNA, 738 bp, Cannabis indica
caattctcattactattcttatttcgttatactgattccattaccattactattacattcaaaccaaacatcacctaaatagtgttatgatatgtgtggtgcacaaatgcactaaacaagaatccaagactaaacatatgaacaacaattgttaataatgatttatgcagccaataataacaaattaattagcaaaacaaaaatataaaactataaaatcaacatagaatgttactgttatagttcttaagcctttataaaacatcatgctttttatatactatagaaattaattttgtttagtcaaatgtattgtttaaatttttattttcatatttatttattcgttatacatctattaatgcacaacaagtaatgtcataatatcagtgacgcaatcatcgtaaatataattatgattgtacattcaaataaatctcaatcctaagataatcagtgcacaaattttatacttgctagtctatgatataataaagtgttacattttttttaagacattgacaaaaataaataagattcattactacaaattatactattcacggtcaacactactattcatagtgttgaccgacatgaaatatgtcagatggaatgaaaatgtattactattcctcaaagtataaggtacacagtacaaggatatttatagtaaagaaaaagcacattgagggacacatggcaccacgcaaataatacaagaaatgaatattaatc

SEQ ID NO: 308733 - DNA, 989 bp, Cannabis indica
gctttcttaaacactaatatattgcattcattattcaataataatctcactttcaaataacataaaaaaaacctagtaaaaaatttaatatacgtgccttacacgtagttttttgctagtatatatatatatatatatagtgtagaggactaatagaaaattttaaataacttttaaaatgaaggtgttgttgtttcatttttcaaatatttgaaagcttttttattttagggttgatgtaagtgtactttttaactacgcagatgagatgatataaattctggttacctttctataaagataataatatagattctcgttatatttcattttagatatttgtttctggcatgcatagataagcttttataaactaaatataattaattatatgatagctgacatttactaaaggtgttatacatgcatttcacaccagacacacatattagaataataattataaatttaataatctcaatataaacttaaaatctctttctgtaaagttattataattcactccagcttgattgatcgatcgtaactaatagcattaactaaagtaattattaagtaatacataagatttgacagagtttgatgatgtcagtggcctaagtgactatatccattggatctcaaacctcaagatagaaagatgatcagagatgtctctctttctctctctatatataaattatatactgtcatcaatatgtatagatctctctctgctatatatagaatatcaccctgtataatatgccaattagagctgatgataatcagttggagcagagggatagagagaaagagaaagtaataaaattgatgaaagtaagtacatgaacagtagataataattaaataaaaaaaatgggagtggggttttagtataatggcagaagaaatagaaacagtgatgttgttgtagtaaataatatattgtagagagagaagagagagagagagaggagagagagaga

SEQ ID NO: 308734 - DNA, 829 bp, Cannabis indica
gggactactgactgtcacaacaggttaatagataataccaacaaataatttaccacacacgacacttccaaagtaaatatgtgataatgaatagtacgcttgcatcaaatctttgcttcacacacactttaatattacaattaaactaatgcatttactcatatatttgatgctaaattaaaactcaatttggattctttaatgggaatatcattatttgggatataaagttgcatatcaaacaaggagagaatcttaagatgcatgcattgggctcttgagataacacctttattttcttatcctaaaatcattcttttcctttattatattattattattattattattattattattattattattattattattattattataatagtatagtaagtaattatttatctgacagtgtgccacctgcccacagacatcacttaaactgacacatgcaaatgaaatagtttttttggtgttaactaattatacaaaatcttcacaaaattaattaaattatccaaaattattatattttattttatataaaaatataactctaactatttatagactgaaaatatgtaggatcgattatgttatatataataggtagatggaatagtactcatacttattaattgattgttttaattattattaatgaagctaaaatgagtactacttcgtgttattatcgattacacgagtgataattaattattgattacatactaatataatatgttaatatatttcggatatattatcctaaaacatgtctcatattatctctctattatataattaattaataaataattaa

SEQ ID NO: 308735 - DNA, 1824 bp, Cannabis indica
ttttttaaaaaaataaaaaaacaccaagacaaaatgcccacaaacaaacaaggcacactttaccattataacactcaatctgaatcctgctaatctcaattcccttttccatttatctcattcactatacacagtgaactcttacccaatcatttagataaaaacttcatgttcgttttcagtttgtccccattcaaaatttagtgtctatagttcatagtttacaattgaatcatcatcaacacaaattcatgcataacagtaacgatatcaagactcacccaacggtaattgagaggagcaactattccacccacaaaagcgatagccagaaaccattccaaatacaactcactgatgaaaaaaaaacctcaaatcaatcaaccatttctgctaccagttaccactccggaccagaataaagctgcttaatttcttacctgttcaaagctgcgacggcgatgacgtcaccggaaccgataccgagggtgagaagagcttgagcgagagcaaagacggcgtcgacaaagtcgggagcagtctttgggcggggacggtggggggagatggtgagcggagagttgggagggagagtggataagcgggtgaggcagtggcaaatgtgggggtgggagtagttaggcattcttcttcttcttcttcttcttcttgagttttggtatggagatggaaatggagttgagaacgttatctggtttgaggaagcgggaaatgtcgtttggatatcgttatatacccaaccaatcatgcatttacctcattttccactacataataataaaaataaggcttaattagtattttttttctccccaaactttgatatgtatccaattatatcccttgagcttttatggctgttaaaacttctccctgaacttaatcataagaggttcgatctcttaataatgataatagcctactcccctttaatttgtattgacttgtgagatgagaaccaaggagtctttgatttctctcgaaagctcttacaatgatctttgagtcatgcactcttgaatctataactctttcttatgattcttctcgtttgttttctatgttaatttcctatccttgaatagtcagatgacttcactaataagaaaaataagaaaactaagcaagttgcctttcttccttggtactgtgtatctatcccatgaaattaaggatattctcgtgttttgtaagcacaaagatatatgggatatatctctgaaaatgtccaacttgcattctctggtaagctcatgcgagctgcccacatgttggaagctggtcgaatgctatcgcacaccctactcggatgttacagcttctgctaactttgagtatcaaatctccatgtacagttcattacaagtagaatcttctgtccatgtcatagaatttgttccacgtgtcacccaaatagatactacgtcactctatgtagaaatttggataacataaagtaaactagtatcagatgtatcagctatacatcagtcgactgatattgatagtggaaaagatatcataaacttacagttttatcttttctaagtcaatatcattcagtagatcatagatcatttgatctcaatcctgagatgattaagctctaacttaaatacattacatgagttctttgacttattcattactgaaaaaccgtgtttttgcaaatgtcagttgtatataagaaattattaaaactgtaaatgtttgcagcaacagaaagtaattctgctacagcaaaacagaacaggcagaatataaaatatttgcagaaaaataaataacttgacacaagagatt

SEQ ID NO: 308736 - DNA, 4183 bp, Cannabis indica
tgatggatgctgccattgttgaggtgagtttcttcatatttcggctggtgggttttgaggtgagttacttttggcgtgattttcgtggtaatttgtgtgtttttagtcacttgtaacaaatttttggtgattagaccgtgtttaatgatgttaattatgatttatttttaccttttacaacctgcttttattaaaataaataaggcctttatacttttagattcttttttaatttttattttatttaatttgtatatttactatatttaaatagatttactcgccagaattatggttggatttattgcgtgaatggaatatttattgtatctttatggctgaaatgttattggtttcagctttaattttagccatttacgtaccttgattattgattttttgcatggcccttagttattttcttttttattctttatataatcttttaattaataattttatcatatattgtatattaataattatataaataccatttatatgtataattttttttgttaaaataatttacattaattttttagtaaaatattttatttatatgtaattgtaataatatacactaatagtaatttttgagattttttttttttattttcagtagtatatctaattttaattaatagttcttaatatattatagagtttaatagtaatatttaagtttgatgacggttgagtttaatagtttttaagtttccgtttagtaccctaaccctcgattcttttctgtagtaaagtatcactgagtaaagacgagtgaaactatctatttcctctcattgcgaagaagaaattaattgtctcgaagcttgctaaggtcatcacacaagaaggttcaggtgctctcccttcgatccaagctaatgatggcaaacatcctttggaggttttccatgatctgattgaaaatcctaatggagaccatgaagaaggcaatgtgtgctctgcgaagaaaggaacacctaagtcgtcgatctgggctaaagcctaatgagtataaggacctcaacaaaattatcttttcgttctatcttattgaagcttcagattatcaagcttcagcaaaggaagtttggagtaaattcaaagctaatcaagtaagaaccccttctactcgacttgaatttattgaacctatgcatattggggatcaaactgtggctaagatggattttgacgaagtggaagctgaagctttgcactggcgaaatttgattgtgtgcattgtgttgggagccaattctccgtttagagattttgaaggattcatgaaaagaatttgaggcaacctgggggttgagagaattgctagaatgcactcagggttcactttggtgagtttcagagatgaagaaacaagagatctcatccttgaaactggagtgattcattttgacatgaaactggttattcttagaccctagacattggagatggactattctttattattatttttggaatagaattacgtttgttttcgttggtttcaagattcacatttggaatatataaattgatcaaattttagaaaataacgatctataaaatagagaaaattttataagaaaataaatctgaaaattcaaatctaaattcaactatgttttgatcatattttgaaaaaagttataacatggaagttttaaattcatttttcctcttcacaacgcctcttgaatcaactcatttggagttggtatgtgaaaattatgcatattttactgaaagaagttgaagctggcaattagcttcagtagtcacgaccaccaaagaccatagtcgtgatgaattatgtggtcgcgactatggagtttgggcagaaagcttgtttttcgagattagcctatggtcgcgactatgtgctaaagacgagatctttaggcagttttgtaatttcatcacttgaagatatttgtattattttctatataagggtctcgtattttagaagcaaaatactcagaaattaaaccctaaaattgaagaatgagacaaaggagccaattgtagcgacccagagcaagattaccaactagttctttcttctcgcttttatgtctttatgttaatttctgttttatttgtatggatgtgaacatgagtttttttaattaaatttccaatttagggatatgataaatgtttgatgatgtttcttcaatttagttaatgtgattattagtttttctttcttgtattatgtgatttgttcttatttattttaattatatattttagactggttatcctaaatgtgatttatgatcctaatatgaaatctaagaagtgaatatttagaatgctctaataggacaaacataagttttggtgtaaaccgacagtatttacaaagcttatgtgatttttagattttgaatttaatgcaagttatatgttaatttacttcaaagatgcaagtagataaaatataatttaggactttaatgatctgagaagagttaaggttaatttgataatctatcatcaccgaaagggagaaaattaataataaacattaacaattgggaaactgaactaacgagattcatatttttaaatattcatccatagttaattacacttttttattgttattttcatgctttttcaatttttagttatttaattattcaaccttattatcaattttttttaataaatcagcaagtttattaatgatccacaaacttttacattctattacaataagagagcatctttgattagaaagatctcaaaactacttttgtacaacttttacaacttttgaaaccattctctatctccttgaccaatcttttttggccaaactaattatactctatgcttaacactattcttaattctttgtacagttacatctttgttttctatgtgtttgttccacaaattatcattccttacaaaccaaatcgagtataccaagtgagcaatggcagccgccaatactttctttttaaacttgctgaatttgtttttgtgaatccacttgaggagttgatgtagatcataagcttgtgttctccatgacaaccaatctttgattttctccacacagtatcgtgcataagaacacctgaaaaatagatgctcgattgactcatcttgctacaaacagagcaaacagaccgcatctgaaatgatttgaattttctgaagccaatccattgtcttgagccttttctgcatagctagccacagtataaaactgtgtttggggatattgaatctcccccaaactttatcacaccaatgaaccatgttttgaattggacaaagcaagctatatccttcagaaatatggtacctattttgtgcaaactattgtatagcagtaagctttttgatagtgtcttttgctgtcacaacttgtttccaataccaactttcatgattcggaactaggtatccccaccattcttctcctttgagatatacactatgtatccatttaaccaaaatcccgcccaaactattagaggcggattttccgccggtaatactaaagttccgccgggaatactaaatttaaataaatatttaattaatttttaattattcaaaagtaataccggcggaatgccttttccgccggtaataaccccattaataccggcggtttggctccgccggtattacttccgccggtactaagtaaaaatgttgtagtgccaatatgcatagattgctgaaagcacagaatttatgaggattgttctaccagcaaaggatatattcctagtgctccaaactcgaattctagctgtcattttttctatcaagatcgagcattcatgctttgatatttttttagcacaaataaggacaccaatatacctgaaaagagtgcattgtcttgaaaaacctgatacttccaacactcagcaaacctcataaataaccttattatcgattttatctaatgatattgtaattattttggacgtactatttaatattcatatataaaaaaaaaaaaattatagtactaaaaataaatttagatattttgttacacgaataaatatttttttatgctaagtgaatatttaaattttattttcagtatttatattattcaaaaaatttactatttgtacaaaatgaaaaaaaaacaatctattttatagttcatttattaaataataataataat

SEQ ID NO: 308737 - DNA, 2205 bp, Cannabis indica
aaaggtggaagatgatcttgagacagaacaaattcatgtctcatctaaggaacactgtaatcgttcaagaaagagaagatgttccatcgggatccaaagttgttgttcactgagccaatcattaggaatgacattaagatagctcaagtggatgtagaagaagttgaagaacatactgccttttggaatagtcctgttatatgtatggtcctagtggccaatctgccaattttagtgtttgacgggttcataaaatgtgtttggggacatcttgggatattgtaggttgccaaaatgactatggggttagtcatggtgaaggccttggttgactgacttgaatgcagtgaagttgattcactggaggcggggtcatccaatttgacagaaaacctatcattgtgaggccttggttgactgacttgaatgcagtgaagttgattcactcagttccgttatggatcaggttgcacgaccttgggctccattactgggggaataggactcttagtgcgttggtcagcacaatagaaagacctattatggttgatcaacatagtaaggagcatacaaggatatagtatgctagagttcttatagaaatggagattagtgatgctgctccttgcttcataccttaattaaatgaacatggacaattaatggtacaaaatattgactatgagtggctaccactcaagtgtaaaagctgctcaaattatgggcgcaccatggctgagtttcaaaaaggtgatactaggaagaaggaagaaggagaaatcctgaagaaagctgatataagaggaaagaaactagcagctgcttctttgcaagacaaaaaaccagtagaggacggaaaatagtaaaacaaagaatggattatcctaaagaaagcaacccctttgaaagcattaaatccctatgagaagatgaaaactaaagttgtagctgatgcataccaggataacaattccttcattgccttacaagaagcatgggatttgggtaatattcttcttaatcatggatagttgcaatatagattttttgcaatgtgaggggtattaataataaagataaataggatgctatctttgagttttgttcaaaaaataaggttggagttggagctttgttagaaaccaagttgaagggaaataaagttggagaaatgatagaagaaaattttctaactaggattacacactaatcctcctattgaggtatgtattgttatagtgtcgaggaaaagctatgttcaagttattgttatagaggacaatgcacaatccacccactattttattaaaatggctggccaaattaatgtttgctacattacttttgtttatggattcaatactagtgaggagaggaaacaactatggagtaagcttttcaacatgaaatttccagttaaaccgtggctaatagcaggtgactttaatgatctttttgagctagaggataaagaaggaggcaatgctatgtctataaatcatatccaggatgctaataattggcttgctcagagccatttagagccatttaggatctaatccacgattgaccatgtctttgtgaatgatgactagaatgatattttccctacagctaaagctcactttagttgggaaaaaatttcagatcactgtgcttgtgttatattggttacggtgaatgagaaaattagggttaaacattttcaataattcaatttttgggctaatcacccagagttcaagggagtggttatggaaaattggaaaaaacctttgagatgcacaggaatgaaggccttacacaacaaatttatgccacttaaacattgtttcaagaggttcaacaaacaagtcataggtgatgtagggaaagcttatgagacagcaaaatatgttctcacttcggctaagatgaaagctcaagcaaatctgcgaaattagatgttaaaaaagcaggaaaaagaggcaccagtgagattcagcttgcaagaaaacatgtaccatacttttcctacgacaacgaagcaaggtgacttggcttagtaagggagatgacaaaaatttatattttcaggcattcttgaagaaaagaagattggagaacaagattatctcctacatcaattatcaaggggagagtattgataactgttggaatttattttaccaggatcttaaatctactcacaagtatgttgattaa

SEQ ID NO: 308738 - DNA, 883 bp, Cannabis indica
ttacaaaacacaagattcaaaatgttatttacccttgtaataatagaacatacaatgccacaacttatcaataatatttttgattatcgacctctttgagtgtatggtggtggtggtgttttctgaagctattttaatttcataatttttattcaagaaagatataataatactttagccaaaattgtctcttgaatcttacattgagcaggaacactaaaattagtctttgctattgattcatcatcacgggtgggagtttaatcagccattaagcagagagaataccactggtgtatacggtagctctgatactaagtttgaaaagaaaaaaactgagaaaataataataaaaaagagtaaaactacaaagaataaaatgccaactttgtatttatagagtgtgaaatacaaaaagaatattctaaatgtgtacaacatatacaaaatcgtttacaatagataatatcaagtatattcgaacgatacaaaaagaatttgttatgatttagggaccataaaatcacacaacaatcatttgttaacatggcacttaaacttttggaggagataaggattggtgactcaattttcgttttctaacgcatccccctaaacctatctccaattgacatgaatgtccttaaagcagaacgacgacatttgcaggagaagaacaatccatgaaagaggagaaagtagatccaaagatccatttccattgtcccacaccaaatctcaccgaagctcgaccaacttgcaccactagagaaatgcaatatgtccattgtccccacacgaagactcactgaagtatgacaacccactccaccaacacacctaagaacacaactctctaggccaagaaatggttggcgacgcc

SEQ ID NO: 308739 - DNA, 825 bp, Cannabis indica
ttttcttcttttaaaattgaaatcaagcggctgccactgtctggcttttaccagctgatgatgacgaggccttagcagacgacgtcgtttcgcggcgttggtcgtttgtagacgccgccaatgctcccatgcacttctcttttctgtcgtcttgcctcatctgtttctctctacattctaagctacaaaaggctgtatctcccctgttcaatcataatttataaaatgattaatattgctgtaattaatccattaattgaatttcagtgtaataataataacaattagttgttaaccatataaatgtttgaaccaggtttttggatctagcgtaaccatataaaacaaattaaggacaatattgaaactcatcatctctatgcgatttatatgcatgcaattaatttatctatttaattttcttgtgagtgaaattactcaaacacaaaattcaaaacaacaataaaagattaacaacatacatgtacatgtagatgtctcgaccggaggccaaacgacgcttgcagaggccgcacgtgcgcaggaagtgagcggtctcgatgaaatcggcggagtttctcctctggattctgggagacaagatggacatgaatgaatcctgataccctttgctacaaaattcatgcacatgttgttgttctgagacccatcatcaacatgaggatgatgatgccctgaagattgttccaggttcgatgagatgggggatctggggatcagacggctcagggggcttcctcactgctcggatcaacggtgatgccagtcagtgcttatggttactcttgatttggtagttcgggg

SEQ ID NO: 308740 - DNA, 922 bp, Cannabis indica
ttttttttttttttgtgttaacaaagaaagtgtcatcatcctatttaaatcgtcgtatgtgtatatttaacactatatatagcggaagctgagttttttgttttgttataagaccgaaaatgaaggaacaaaacacgttgttcctcatgtattgggggaaacgatattattgttttaggatgttataataattagattaattaattagtgattaatacttgtaggttactccattatactttcattatatataagataaaaataaataaatacattattagtgtttaataaaacaacgttacggatgattagggtggcgagtaggatcggagtaatagctacataaatatatcacgccgtcgcatattttgtttatttttagtaacttttgtaatacataaattgctatttacatgttacatatcttaacatgtattattcaaaatacatcaacaaaataataaacgaatttttcttttttaaaacaataaaaggagccacgtataccaaaaccacttactaaaactcatgattaataaattggccagtaccaaaaactcaccaatcttgagataacggatcacctttttgtgcttgtttatttttgattttatttaaatctacttcaccaatcttgaatcatctcattatttttatgagcttgcttatttattttgattttgtttccatactttcatggatcaaatgcatgcgctaagaatatgactaatcattataacatgacatggagtcattgagtctcatctcaaaattaattggtgatgagtgttgtccgtatttacgaatggataatacgtggccttctcgtgaaggtcaatgattatcaggcctatcagtggcggaactaacacttattaggaggaggggccaatgtacatattaattttaacaaaaaaaaaaa

SEQ ID NO: 308741 - DNA, 1828 bp, Cannabis indica
aaatcatgacgtctctgctctaatcccacggcccatatgctggaatagcttttcctcaggtggaaaagcataaggtgttgatctcttaacacttttgtttgtcgtggaccgaggtacccacaattaaaacacaccttagggagtttataatacctaaactagatacattctttctgtcctctctttatatccaagtaaaaacccgagtaagttgatgatacgtagccagcttgacttgaaatttagaaaaccatgcctgataatggttttttaatctgccatgtcaaaacctttgtagaccgctgctttggcagcaatagtaggagtattgacccaattaagatatggtgtgggaagtccagaagcttgcacccaaaaaaatagctttacccatgtttacacaattccatgcaccatcatcaagcgaaatcaagagtgttccatttatgagccacggtctatgttctagaactgtaacacactcttcttccaaatcaaaaaagatacccacaaaccaatcttgaatctccagttgcctttgactgattttttccaaatctaggataaaatttcctttatgcgggatcttgaaactcctttaccttcaaagaaactctctagaatacctgttctggtaatctcaaattaatctcaaagcctagttttaagtctaaagtcatagactccaagaagctttacctcataggttccagttcatcatcaccagatccttgtccggctttgtcatggcacatagtaccattttccacattagagcctccaaccacctccttatagaagttattatcatccccaactatacgttcaccaaccgcagcattattctcttgagcacgtgagtgtccatcaatgtcccccattataaggtcacagacaaaataacttagaagaaaacaaaatcccttcaaaagaatattccttccttaagaaaaaacaccaacataaaccacaagaccccaaaaatgataaaaaggaagacacgagaaaataactcagaactaccacactagacaaagattgactcgacgtcaaagactatctcagtctaagttggatctccaaccctctcaataagaaagaaaagtgatataatacgaccctctcattaaggtttgccaattaaacacgtcaattcgtataatacgaatacaaatatgactagctcataaattcctatatgtattcttaccgttttgtttaaaaaaaaaaatcttttacctaaatatggtataatgtataataatattgttgtgcgccttaataataccagttaatactcactacggaagtaaatactatgaaaattataaccataggtaaaaatcaattcattttaaacacaatccgatgtatacatgtgtttaaattgaaaacatgatagtgaatactctttttggatattcaccaacaaagaattaaaagatatatattttgtatttagttcatttccttttgcttagaagaatgtccacaataaatatatatatattaataatttttaaaatattaacttattaatattcaattatgggactattacagtagagattgcgtattttatctcactataaaaagctataatttttagtgacaactttttagtcacaacataatttttttgtgattaaatgtaatttttagttataacaaaaatgttacttgtgactaaaatatagtatttagttacaagttgtcactaatttagttttagtcacaacaagtattgtgactaaaaatacatttagtcacaataaattgtaatttttgtgactaatacctttagatacgaaccttttagtcacaacat

SEQ ID NO: 308742 - DNA, 1072 bp, Cannabis indica
ctcagtcacgtacattcactagtatatatataatgtgtatgtattttcagtgtggttgaattaaaccaatagccatgcacttgaaattaagtggtgtacacgtatactatgactactttccaatgaaaaataaaaaagaaaaaaaaatatagactatatatatagttaaatgaattagagcatgaagaaaaataattgtaataatgattcgatcagtttgtgtggtccatttggcagacaattgtaggaacagaacacagagatgaccattttgtgagcacatttttccatcttatgcttcacttccaacctttattttccacactttaattatattatatcaattagctaactaggtggatatatgtgttacggaaccctatagttttttatatatatatattgaaaagtctatagtttaattttttaatattgaaatatatacataattaatatacatatacttgcagataacgatcaaaatatgatataactaagttgaaaaacaataatttagcatgacatggattgtgacaaaataggtatatatatacatatcgatcgtatgatttggtaaaagattttggcagtatatacgtacatacaatcatacatatgtcatgtttgacatgcacaatataaatagacatatactggcctcttcttcttgtgtcatggtaaaaattgtctttattaacatccaacctattacaatctcttcaagggattaaaaaggtttgatcctttaaaagttagttattgtaagtaatgtcatctatgtaataagagtttttagggtggttattgattacccaattaaaagagactaagatatcaaactcttataactgaacgtgacttctaataaggacgaagctaaaaaataaatcaaagtgaagtgaatatgattatgttagttaagtttgtaaaattattaataaaaagaaattatactttttaaaaagtatatgcatataatttatagaggaattactttaattttatctaattaattgtagattaaataattttagatctttaatttattttttagaaattactgattaaatta

SEQ ID NO: 308743 - DNA, 3777 bp, Cannabis indica
ttctgtatgttgctcactgctcggtctagaggacttcgttcgagtgaatgtttgaagtgtcctattcggcctgtatcttgcgagcagatacctggagtcgattccacgtgtcaccatcaagtgatgccacgttagagtgcagaaattgggataacagaaagaaaaaataataaagtaaaatgaacaccaaattttgaagaggttcggccccgtgagaatggtattagacaactccacttgtatacgtattgacttgagagaaggaacaaagtgttcttcctcttgaaagctcttacaatggatctctgagtcattttctctcttagatcactattttgtcttgaatgtgttttctgaattaatttttttgaccccctccatagtgacgttacgacactatttatagggcttaatacatgaggaatggtttccctttttctataatgaataaaatcaaaatctacatcaattcgataattacaatataatgaataggaaactaatgtgtgttacctctattctctgactcagtcccacaattatagggattgcattcatatcttggaaatggcgagattgatctctacaatttctatcttacacgctttgctcggtataagcatgtttgcatcttggttggatatcttctcaacaatcgtgctcgaacatctgagtgttatagatgttaagtagccattaatgggctggtaggaatacttccctctactcaagcatcggaaatttgggacacgtgtcatccattcttattgccacatcaaggtgcaagaaataggataacattttcccccaagtctctgtggcgccttcctagtcgcacgtggacttcactcaacttggagtcttgtatagatgggtggcgcgtgtcttcgatgatggatgttgatctgatgagactctaactagggatctcttcaatatctgaccatttaatgcttattgatggttgtacctcgaatcatggatcgatatttgagcacacttgattgttgaactctctggaatgagtaattaacgtctactattggggggaaacccaaaattttgaattatgaaatgattaattcttttttcagattgcatataaataggactaggaacctttgatgaaccttttagccattttaactctcaaaacccagagcaaaaggttttcaattgagttttcacttaaattcttcaaggaatttataggaaacttcttgacgacaccatctgagtagagcaagaaagcttcaaatctgtgagtaagttcctcaatcctttcttttatacatttgcaatgaaacacatatatgatatctaaatttttgctgcgaatttttcctgttcttaaattgttctaggttaaccgtataatgactaggtttaggatttggaaatttcattcatgtctaaccataacaactaattatctgactgtgcttcgattttaaccttaaaatgttcatttccactcgtccataagattttagcaaaaatcagattccaaatgaggtttcaaaattatgggattgaaaattttatttctaggtgaaacctttgcttttgaatctcaatcaagcttggtcggcatatacaatctgtttttcattcgttactcagaccaactcttattctcttgtctcccaccttttgtagattaaccctagtgagtcttttaggggggtaagcatcatattgactaggacttgcttcaactcatatacgaagataacccccatctccatgctagtccatccttgtctagtgacaatctttcaaactctagcttcaaagattgggaagtaagtagcaagcatacaccttccccagagcttgaggtgcaacatcatttttatctcgaccaaattcgtggtgagggatacagacatttcatcgaggaacttaagaaaggttggagatgttatcttcctgctagctggacaaatagggtccttccgagtgtggttgacaccttgcctgagcgccgcccagtcccagttgctgaggaaaacctattgccaactttgctatgaccattgcaaggcatacttctgataaaactctgtcaaatataggatgatggtacaaaccgaatagaccgttaggaaaccttcatctgccaaccctcatattgcccatctagctgcttttgccaacgcagaacaagcctgtcctatagttgaggatgaagaaattgttagggacgttgacatccaggaagtggaagaccagggcgaggtctgtcccactactccttttaaggctgaaggcgatgaggaagagggggtagctcagttgctgccttctagcatctatattgagaatgtggaacgtgtgtatgaagcaggtgatgtcctggaagctggccgggactacgtcgaggaggagtacatagaggctcatcccatgagaaggagaggtctgaagggatatcgatggatttctccaccatccatcctaaccacaaaaagattgaccaatatttttgaggatggtctcttgaggaatattgaatgcttccttcccttccccgatcaattggtcaccgaccatggagaaggttattgttcttggtcgggagcctatacaaaacagggtgcaatgttgccttacttctgtacttcaagaagatggccaactattatcacattagttcgacacaattcactcccaaaagcgtcaagtttatatctatcctcttcttgctatacgcctcgcaaggatggagtgagccatcccctcttaattccaactggctgttccacctgaagtcaagctccaagaaaaactggtcggggtatttttacttttcttagattaaggagtcatgactgacgggcaccacggataccgaggtgacaaagataggtggcttcatggaggactattattttttcaaggggatgggcactaagcataccattttctggcacatttcgtcctattgctgacctccgttcacgctagaacatagctcaggcaatcctccaattccgttcaaatgatcgaaatatttctatcctggcgactgataccaattttgtcaagtacaaactctatccagctaactttgtaccaaagactgaggaggcagcagtggaggctgtgcctggccaagaggctccaagcaagaagaagaagaaaaaggctccttgaagtggtcaagtacctattgagcagtccataaagctcagggatggttctgagagggttgctggatctttcgccccagtggctggaaaaggaaagcccattgtggtcaagtagaggaggattcttttgatgatgatgctccttctatgcttgtttgggagggtgctcctgcccacgtgcagggtaatttacattgtttttaagtttatttgcagttacttagatcatacttgttctaaccttcttattttatttatgtgcaatcatgtcgcaaaggatgttgcgcgctttaaagaagaggtcaggtgatgtgtgtggccagaagtctccagcaaggcggtcaaaggtagatgacgttctgcccaagaacctaaacccgagcatcaaaacacctcaacgaattgccgagaggggtttggctggacctatagctacagttatggaggggacggtgttggatgtgaacccactggccaaaaagaaattgatgtctcaggcagcagctacttcgtctaaaggcgccaaaggggtcagtacggataggcccaaactacccaaaccttttgccactcctgctgtgctgaaccctgagactaagaagggtaaggagatgctccagtt

SEQ ID NO: 308744 - DNA, 1419 bp, Cannabis indica
cgtaaatgcgctagtaaagttagaattttgccactacgaatgtgcacgggtaaaactttgacctttttgccatcacagtttgtgaaatgcgcaggcaaaagttactgttaccagcacaatagcaaattacgctgacaaaagtgtaatttcttgtagtgccggtaggcatctataaatatatgttgtgtgacacgaacttaccttttcagttaggaatacccatgtggcaccttgctttctctaaaccaatgttagatttccatcaattcgagtaacgacgagttcattttttgcacgaccgtgtgcctcgtgcacatttttgtctcataaacgactcccgcttagtcatgctcgtaagtatccatgagcgaactgggcgcgcagattgcctagaaggggtgagggaggtgaccgaggtaggagtggcaggtgaagccccacagtcagttggggcactcggcttctacaatggaggagcagcactgaaaggcatggcgctctaagaatagaagctagtgctcttctcccccaggaaatgctcttctgagaaaggccagctgaagatcgcctgccaatattcttcttcaaaaaaactttcagtttcagctagcagacctttagacaaagactttgggcgagaagcttccttgggaggatccgtgggagccgctcgcctctcgcctgtgaagcgaccccttgatcacccacctgaagaacaggctattcgaggaccagtaaaaagatcaccctagcacaaatagcccgatcttcttccaccgcgacaccatcaccaagttcctctaaaggagcatggttaagctcatcattgccattggctgctacctcaacctccaaagttgcctttgcccccggagcttcctccttttttgtcggaggaagcagtatgacgtacaatttcttagggtttaacccagcattctttgacaccaatttacattcaatcaagttgggcaaagttagaagataatggcagagcttgcttttgtagtcggctttgaataattttagcataccggaagtatactcctcgattgtgagggaaggagggtcgcgcgcctatgctaacggagaaagaaaaagagttgaatgatcatcataaaagggctccttattaattaattaacataagtagaaacaacaaagtcacttactaggcattcagaagactttgatcacgtctgcttggctaggcataaaaataattcttgttttcaagcttttccagtgttagaaactaaactgaagactatcagatcagttgaaactttcttgtgtaggtaatagaaaccccaaaacacgaggtcgttgtaatacccggtaaaaatatacatatattttaaattttatttgtcatacaatttgtgtgagaataagttatttatttctactaatagtgaa

SEQ ID NO: 308745 - DNA, 1244 bp, Cannabis indica
tgctatagtgattgttccttggcaaaaacatgcaggattttgtgttcaaaacatgggcaacaaagtagtgttgatcaagtggtagagttttgaagagtgagcatcattttttttctgagtaatgctaaataaatagagcccaaaccctttaagaactagtggcattggggtcctaaaaagctcagcccaattcattacgaaaagaaaacaaaaagggtcattatgtggaccaggctgaaatatggaagcctaatggaaaatttgcacgctttttcacactaaatattgaatttttttttttcctgttttactgtggagtagattttttttttttttttccaaaaatattgtattttttgcaaaaatattatgtatttttttatactatgtattgtgttaagttttcagtgttgttccacagttatttcttagctgtccactgttattttaattgttttgttttcttattttatgattgttttataaaagacagtattttataaaaaaaatttcatgtaacagtaaaattgtaaattttattaaaattcagttttttttttaagaaaaatcactctatttatcattgtgttgtccactacctattaaggtccggaaatgtaggggacatatatatacactagatcaatgatatggtgttaattttgttcaaatcactatcaactcttttttttatgacagtcattatcactaactacttgattctaattttctagtgctttgaactgaacctatggcaactccttgatgaactttagattctctgttttattcatttattttattttttctttttggatgggtttatgggtactaaactgtttgatgggcttcttcattgtcacccaataaattttgggcctctaaacaattaactagagtttgcccactttgtcaaattggaacaaaataactttaggcctttcttgtttgccataacaaagtatatgttttgcataattagtacttttttattattcactgaaacactcaaagtttttaagcattaaaagtgtcatataggaaaaattaaagactttactttttttatgacatattttttttaaggaataattacataagatattttttttcgtaaaaaaattacattttacgtttttctttttatatttttacattttcatagtaacaacacaaaaataacaaaaaaactatataaaagtaacatctaaataaaatcaaaacaacaaaaaataagatacaga

SEQ ID NO: 308746 - DNA, 961 bp, Cannabis indica
tgtttttagtcacaatacttgttgtgactaaaactaaattagtgacaacttgtagctaaatactatgttttagtcacaagtaactttttgtggtgactaaaaatcacatgtagtcacaaaaaatttatattgtgactaaaaagttatcacttaaagtagttgttttttgtagtgaaggttggtgactaaatatttttttagtcataatacttattgtgaataaaactaaattagtgccaacttatatctaaatattatgttttagtcacaagtaatttttgttgtcactaaaattcacatatagtcacaaaaaaattatgttgtgactaaaaaattatcactaaaagtagttgttttttgtaatgggcgttaacgaatcattagtgttgagctcacaacttatttaataatgaagtttacaattttcccgagtattgggtttggttttcgaaagcttagaaactgacccttgcttagggatgtaatagatagttctatttataggcaccttaggccaaactagtacaagcttaataaaggagttaaaaattttactctctaatggagtgttttacaagagaatacattgataaaaacaaaggttaagtttgggtctaaaggattggaccattgccttgttgacatggacagatgtgtcctatatacacaaacagttatagtccattatttggcgcgttaggaaagattgtgcgtagtagttgtagtattgatccccaagatatgattgaatcttttgtccaatgcctacttatggactggtggagtagacctgtgacaatcagtagtctcgtgattcgtaagagaaaataccgagtaagttgtgcaatcccacacatcgcctgggaaaggtcaagcatgatgattctgagactgtgtaggtatggaactacatagttaaagagggcttaaatagattaattggtactacttatatcaacaa

SEQ ID NO: 308747 - DNA, 1210 bp, Cannabis indica
aatagttgccgaaaatctcggtcaacatctacctattagtaacctgctatcacaggttaaagaaaaatgtaaccatatggttacaataaaaatgtaaccattgaatagtcacccatatatatatatatgatatatatatttagagcaattagtatttatacttaggattttttagaggtgttatttataattggttagcgatattttttaaaaatcaatatattaaattataagaaactcgatacttaattgtgcatcaacaacaatacaatatataagagagtgctattagcattcttcatatacatatatcttaataaatgtatttctttatgtagtattgtatgcttttgattaatgtactgtagctagacttattttcttaaaaaaaataagaataaaaattgtgctatagacttgttttaatgtaatttgactttgcaataatgaacaactattagctcaatccaatccaactatgtaaactatgtaatgattatagcaatgaaggtaatgtgttccctcaagattaaaaagttgctttctatatttatatataatatatatgtatgatacacaagttaaaattaggacatatatatcgggtcatgggtcatgggtcattccttctcaggcgggccagtctcctcctcttcctcccttttctgcggtatagcttggaggttgggcggaagtggctggcggtcggattgtgctcatggggctccatgtgtcaaagtggattgtttgggaagttggggctttgcgagttcttttatttgttgttatttacactagttttaatctactcattgtcatttagtttttattattaattaaattaattattatagagtattttattttcataataatggtggttctactacccaacgtgggtggccattcactaggtctgtttaggtagatatttaccacttggttttcttcatcaactaccagcgtcaattattaactaaactatgtctatagttaactaattagcgggtttaagaaatagtcaaagccatacttaatatatatataaaaaaaatgttatctaacagcatttcaagtaattgtaattaaacctaacatgttgatctttttacttttatgacaataaggatccatttaagtaattgttcttctataagatcttaataaaagtgttaattccatttttggcatatttaattgacaaaaatat

SEQ ID NO: 308748 - DNA, 2425 bp, Cannabis indica
tttccatggttaatgtgtgggattgagtttttctgcttttctttcagtttgttctgaagaattcatgcaatcataacaggttagcgggtgcagcactagtagctcctgctgtaaacttctggtggactggtttccctgcaaatttatctaatgaagccttcaaccaacaactttggaatgaccggtgggcactaggcgttgcccaccgcaccccttggctgcatactggtggaatactcaaaaatggttccccggttcttctgttataaatggcatttctgtagttctttctccccaagacaaagaacttcagaactccccgaaaaagcaagaaaagaaaaaataccaggtacctgtattttttttgttgatagcgtcaatcttttgagtagtctaagctgaggtatcttgctaagttttcaaccctgatggtttttcttttttcacttgtttaattactttgttgtgtaatttttaatactaggccgaggtacgacaacagggagaatttgagtctctccaccgcgacatgaatgtgggattcgggaagtgggacttcagtccagtagaactggaaaatccatttccaaacaacgaaggttcggtgcacctatggcaaggagatgaagatatgcttgtgcccgtttcaatgcaacgctacattgttcagaaactaccatggattcactatcatgagttagccggtgctggccatttattcacagaagctgaagggatgtgtgacaaaatcattaaggaacttttggaaggaaagaagtgagcttcacttatatagcttctaagtttacatataatgttctaaaactattgtgaaacagaaaacaacttagcgaggcatgttcttctttcataatttgagttcttagggactaaagttgcattattttgtttatcagttttgtacagaaacttcacaaaagtcgcattcaaatatttatagtaataataataataatatcaataataagaagaagaaacaagtaccatctcctaccatcttgggaaaaagtatgcctgcctaagaaattaggctgaattggcttccaagtgggtaggaaatggaacatatacatttgggccataacaagcaaacaagacaacctatgagttaatgaattaataccatctacttaaaagagaagaatttttggattgtgccattcatgaatgatgatagctggtactttgagaaactattgaagttgagagatactattgacgagagagccttgatgaatgcaagaaggactggaaaatttaaggttggatccttctatcttaacttgataactgttgataatgctgattatgcatccaatgtatggcataagttgaatattttcaaacataaattcatatattggcaagctgtcaataaccaactaatcaccagggatcatttgagcaaaataatgaccatacctacgactatttgtgctgtttgttaaattgaaaatgagactcttatccacttgtttctggagtgttcacttgcttaaagtgtggttgttgaaatatgcaaatggataggagactatagttggcctacaaatcagcaatggtacactagacctctagttaacttccaagaccgtgttcttaatacaaccatggcttatgctctttactttatttggctgaacaggaatagatgtgttttttttttatcatacttgcttctcagttaaatatattagcaaggagattaaaaagattgtcaaagcaagggtcttgggattgaattgtaatagataaaggaggggagaacaatatattatcaatgtaattgaacaatggtaattttttctttttctgagctgctgctttttggtagtaagctttagcttgtaatttgtgtgttgtttttgaataaaactcttggtcacttcaaaaaagaaaaattaataataataagaaacaagataaaatgaaaacacattcatgctcttactataagtgcaaaatgtcgttgtgagaaccccctttagcaattcttacatttttacttatatttttttaagaacttttttttttctttctataaaaatttaagagtattacttagagcacccacattagatattctaaaataaagaaattttaaaatatttgaaaagtgatgtgttttcaatttttttaggagttttctgaaaatatatttttacatgttttatttataatttttcgatataaaatttttatttacaaaaatttaattttaaaattttaatataaaaatactttctcaaaaaaaaatcaacctctcaactataatcaaatatatataaactataaaataacaaaaaaaaaatatcgaatagtttactgaagttcattttttaataaataaaaaaattcaaacaattaaaatgaaatttttttatgttaacgtatttttgtaatt

SEQ ID NO: 308749 - DNA, 921 bp, Cannabis indica
cattccaacaagcaatgttgcaagtatccatgattatgaaaatttttacctggttccccttcctcctcggacactttatctactatctgacccccttcatctcctcctaaagccataaagctgttagcagaattcctccttatatcattcaacttttcagcctcctttggatgcttctgtgagaaagtttttctcagagtaatccaatctatattctgtgcccttgtaacatttttctccttcgagtctaatttcctggaagcagtagcctcatcttgcttgttctcttccttagtttcttgctcttgcacactggtttgagccgagtctttgcctttcatctcttgttgctttttcttcgtctctccctttcgacaatccgccatgatgtgtccataccccatacagcttttaaaatttaccggaagccattcgtaatcaatattttgatcaacaagctgcccatattcattgacatattgtatggttctcggaggtgtatcagatatgtccatttcaactaggaccctggcgaattgaacccttgtgcgatctttagtatgttggtccaccataattggttccccaacagtactaactaacgcactcagacaattgtttccccaatattggaggccaagatcatggagtctaatccaaagaggcactgaacgaacaagtttaacaacattaagatcagaagtccaaggtcttataatcactggtttccagtcaaattggagagcccctgattctaacacctggtctctcgatgcttcatcattaaatttgatcataaccaatccccttgtcatcttcacaatctgtgttatcccgagatgtccccaaattcgttttatgaagccttcgaacacagccataggaggattagctccaagaaccatacaaatcactgctgaa

SEQ ID NO: 308750 - DNA, 920 bp, Cannabis indica
aaaaacaaaaacaaaaaacaataccaaacatgctctaaggttttttttccttgttctatcgtcaaattcccattgtgcagcagaaaaccggaggtctctcctccaccgtctagactccttccagtgagtaagctccttgaaacctttattttttccttatcttcttgcacttcatatatgttccaccattgataaaactctacacgcctacaatgcggtttttagtaaggccttgaggtgccacgagttttacttttcctctaggttagatgaatgtaggttttagtttagaaaggtggtgcctttatttgtttggaactcttaaatttttaggttagggaagaatctagagactcgaagtccaatttattctctgttgtagaatagggtgtttttatctgttaatcaccttggctggcgcatatggtctgttttaccctggccgacaaattggatgttttctgagtaatattaggttgttcgaatgttcacctctctcttacctttttgcacaaatgaacctgagtgactattagagaggtgaacaccaaatcgatgcggaccttcttagtctccttttcgaggattagcctacactccacgtagatagttctccatctaaagattctctggacagttctacgggcagttttcactttaaggtcagtagtggttctcttgaaccagagacataagtccatcactactctaaacatattgaaggtgagatctatggtcggtttgtttgggaactgaatggaggctggaggaagttccttacaactttttggacatacatttttcggctaggtgtcccagacaacattgctagaggggcgtgcatcatctgttggaaattattttaccaggatcttagatctactcacaagtatgttgatgaacaccctaaatatgaactt

SEQ ID NO: 308751 - DNA, 1041 bp, Cannabis indica
atttataattaatgataatttttttactttagttacaagttttgttgtcactaaaaataagattttttatagcgataagaaccttcacggtgtgtaagagatagaatgaggtataaagtccttctaactagacacgtagttttataattgccttaaaacggggatggaatttgcactacatgatagggaaaagaaaataataaaagcaaaaattaaagtgggtatatagaatagagtaatatgcatgcatgattttggtgggacaaaacatgagtatacatgggtctaatcattgcctgttgcatgcttcttcatggttcctctctttctcataataatagactgtgttgcccacttccccactttccttttccttttccttttccttttggccttttctattccatgcgctctctttgtctctatttcagacagataagaattaatgtgcacgggggcaaggataagattttattatcaacctttacccttcaattcttctcttcccttatttatttatattttttttttgaaagtaatgactaaatttattgataatataataatgttatacattaaaaaaaacaagaataaaatagaaagtcatttagtggagtaagtagtttaatatacttgttaaattctctaacaatgcttctagatcattgaaaaaaaaaaatatctcctaacaaaagtacacaactgtttaagagtcaaaatcaatacatatatacaataaattttcaaatgaaaatcatatccaacatcacaaaaattgccacattctacttgaatattactgaaaagttcctgttatattattttataatataataagtgtagattaaaatgtggtcatatatattattatgtgaataatatatattaagtgtttggtaaatgaattgtgtaacatatgatttatttaacctaatattgtaacctacactttgtaatatggagaggagttacaagattaattatttttgtaacttctttttgttgatcatatttttctgtaataaaagaaatgttacacaa

SEQ ID NO: 308752 - DNA, 2805 bp, Cannabis indica
tttttttaaaaaaaatatataaattcatgatgtggactaatcaaggattgtcacgtggtaatttacttaatatttaataaccacatacttacagagttttagaaatataacttaagtattattgctgtcaaaaattaaatttaagtatttatttacaactaagagttaaacttgagtatttatactgtaatttactttaattgaatattgttgtaaagcactagcattagtgggcctattcacatgcccaattaagccagtggatcagtccacgacgaagtccaatcataactctgggtctaattgcaggccaactctaatctctataaaataaggcctttttggtttcagtagggcaacccgtccagaaaaggacagacttaatagaatgtatctgaatgccctcacggggtaatccaaaacaggcagtcagcgctgattgggtgctatcctaagtggcacccttctaacactaaattccacaaaatcataagtttgttcccttcgtcaaacttggaaaaggcgcacagcacataaagctacataccttttgtccaatatccattaccctcccatttacaatacaatgtcgacagcgcatgcccacctgttaccatcaaatggtactactctgcacggacgacgattatctcttaaattaagcctctcctattcggccaaaagtcaatattataatgtattttacctcatcagtaagcttaaatccatgtgtaaaatcctaataggtccgggtttacccaaaaacccagtctcaacctataaatacttaaatagggttttacccctttacgcgaagggttacaaatttttgggtgaagaattttggctagaacccctattgaaatttggcaagaacacttgtgtaaaatactccatagccaaagagcttcagtaatattgacttgtgaactaaggctcattaacgcactgatcacgtaaaaattattgtcttcttaactttaaaatcatcttttcttagcttaatcttttattaattcagtttctaaaaaattcgataattattttggtgatttaattaagatcagaggaaagtgttctccattattctcatctacaacaatggttgcaacccgaaacacaatggttaaacccaacgctcattaagaccgtgaagatgatgttgctaatgttataaactgacccccactaacagatgtttaggcaaacattgtgagggatggtgaagcatcagagatggccagtcgtccacctcgaaaaggccaacaactaaaaaaacctgttaattaaactcccctcgaagaggaaaatagggaaggccctgatgagaatgagaaggagagttatgacaaagattatgacaaaaatcacatgtaagagtactatgagaaagaccctgaggtggtgaggttaaggtaattagtagcataccaacaaagacaaatggcagagcagcaagaagctacatgtcaaatacaaggtaccctcttatagcttcaaaacatggtagcaaaggggaacctcaacattaaaaacccacaagtggaaaagtttaaccatctcagggctagactaatccaacaaacgacaaggggaaggccaaaatggctgagccccaaggaggaattatccttcaaggccaatgaacaatgctccacggaataactaaaatatgatcgacccactcctgcaaaaagataggaccatttgagccttaaggctacaccacctagtcaatttgtagagcaaagttgactaaaacaaaaggccctatactcaagtattggagcgtgtcatttggggaaggaaaaatagcccagtaattatgttaactagagcgttgaaatagagttcgtagatcctaaagacaatatgtcaacaatagaccccagggaccagttgaatactaaaagggaaaaagtaagatgtgagaaggcaaactctcgtggtggagacctcaaaaataatataaatgaccgaatctgtggttgtaaagacaacaccagaaggttgaggatcaaattgttgccttaaataaaatcacatatccactagttcgtaagcaaagtggcaatgtgtctgatttttacgatgaagaccccgaagccatgcatcaagaggattttagaagccttgctaccagaacactcttgcatgcccctgattagaactatacgaaggttggacaaaccctggaggtcatctattcggtataatagattgatgatagtggctcaagtcattgatgattgaaaatgtctatgtttccctcagggtatgtgccaatgcaaactactttatttgggttaagagcagcacaaactggatggagtgttgatcccaaaaggcacaagcaagtcaacaaaactgaagctttagttggaaataagtcagtcatagagcaaaaaggagcaacaaaactcaaagctggagtgagcctccgaaaaaaggaggacgtggcatgaaccccagtacacagaatacactgacttgaaagatacctatgataacatttatcaagcgacttgcaacatagttcacaattgaaagccacctccaatgtacaaaggaggtaaaaacaagagagacccaaacaagaaatgtgagtatcatggtgacatcaagcataacatcaatgagtgtgattacttaaaagatgagattgagaatctgatttaaaaatggttgtcttcacgagtgggtaaggatccctgtcataattttgggacagagggtagcacaagaaaaattgattattcttagacatcagggagcggcttaccaacaagctctgggaatacaact

SEQ ID NO: 308753 - DNA, 3982 bp, Cannabis indica
cataggatttttaatccaacatttgaaactatatatatatataaacagatttaaaacatatcatgtgccatgtctatgaaacatgaacaaaaatgagatctaagcatatagagactgagatggacagagaaagagggtgtgagattgggagagacaacaaagtgcgtgagagggagagatcgaaggggaaagtacctgggtttcactgatcaccaaggcaaggctagggttgtcgtccttccagttgcggtgggctggggaatgggatcgttggtagttagggctgggacgagagagagaaccttgagaaaaggtgctaagattttttgttcagagtctctgtctcacaaagattgtgagaatgttttgagggttctattagttttatggtactaaatcaggtacgcagcgaaagagttttgtattaattgattatcattgtactatatcccaatagatctgtagatgtgtgtccattaaatcaaaacaataaatagtaagtttaaaatatatacatcttgatgactatcagggcatccttgaaacttctcgcatgttgtatcccttaattataatgatgatgatgatgcaattagactcacactagtgtcttccaaatcgatccaccacacacaaggaatagtgtgggctattaggataaagtgtataagtttattcttgatgaggtctaaacacatgagcacgaattgatgagagaaaaaataatttcttttttctctcttaatttcgaaaattaaagtgtttgagaagtcttctgatttctcaaatcagactcgtatttatagtagttaaaatcctttaattaaatcagatttaattctttaaataaataaatatctataactaaattcggttactgatatttatgagggaatcaactacttgagagaatgtctcaacaactttgaaatatctttaaccactttttaaattcaaatatttatctaattgaattaatcaaataattaattaaacgaaaaagataaactctataaggacaggccacatggtaggcgcctaccttgtctgaattaagacaaggtttgtgtcttttatcctgataatttttgtcccaacaaatattgtcttgacaaattctgtcttaacaatttttgtctttttcctatttacttaatttgaaaatttatttatttattacaaaaataaataattactatttcgccaactcaaaatatatttttttgaacgagattatactactctttatccctacccttgataatgtttcaaggtggcgatttggacctataattctaagctccattaaaaaagattatttattgagtctcatcaactaaataattcttgtttattaatttcatgattactccactataaatatggaattgaactcttagtacttatagaattatatttactgagttttactacagtgtccattgatatatcaaatccagttattagccctccatgtattggttcgtaattagttttgatcaaattaccattttacccttctaattacttctttatcacattctattacaatgagagagcatctttttatcaaaaagacctcatgtacaacttttacaacttttggaaccaatctctatcttcttgaccaatctttcttggccaaaccagttctactctatgcttgacactatttttaattctttgtacaattacatctttattttctatgtgcttgttccacaattgatcatgtcttacaaacatatcatgtacaccaagtgggcaatggcagtagccaacaccctctttttaaacttactgattttacttttgtgaatcctcttgagcagttgatgtagatcaatagcccgagccttccatgagagccactctttaattttttccacacaaaaccgtgagtaagaacacctgaaaaacagatgctcatttgactcatcttgctgcaaacacaggctgcagagagtatctgtgacaatttggaacctctgtagtcgatccttagtcttgagcctattttagatggctaaccacaatataaagctgtgcttggggatattgaatctcccccaaacttcattgcaccaatgtaccctgttttggattggacaaagcaaattataaccatcaaaaattcgatacctggtttgagtgaattgctgtgcagtagtaagtgttttgactttatcctttgctgccacaatttgcttccagtaccaacttccatggctaagaacttagtactcccaccactcttcttctttgagatacacagtgtgtatccatttaacccagaggttgtcttctttgtttgccaatgcccatacatatttaaagagagctgctgaattctattctacaagttttttaatgcctgaacccccttctgatcttgactggcagacactgttccaagccagtaaaccagccccttgcatcatgtattgccctttccataggaaggctctacatatagcttcaatctcatgaatgacctgctttggtagcttcagaatctggcactagtaggcatgaattgttgagagaattgagtttatgagcaccgctctaccagcaaaagagatgtttctggtactccaaaatcgtattcttgctgtcattttttctatcaagacattacattcctgctttgagattttcttagtgcaaatagggacacaaagatatctaaagggagtatactgccttgagaatccttatgcatccaacactctacacatctcatgttctgccatgttactgcagaaaattgcagatttggtttagtttggctgtaaacttgaagtggtcgagaagagcttcaagccttggagcataagaatgatgctcctatagtcacctctgtaaaaaatcaaacatcatctgcaaaactcaagtgattgagttttagggcctcacataaagagaaataacatcatctgccatgttacttctttatcctttagttccactaagtcactagtggaagtataattcaagattccatctaaatttgcgtgcaactttccagtactagaattaacacataaagagaaacaacatttgatatgttatgaaagttaagattctatatttgtaaatcatgttcccagtcatccatattattagctttctaagacaaaagttgtaagaatcatcttctctaagaaactttaacgagtgattcaaagaaaccaataacatgaacacgagttcataattacttaagatttaggccgatctactattaatcattgttatgatatgaattcaatctttatagtaaacgacatgttagataaagacatcttcattcatatcggtctttgtcatatataatctctattatatacatcacattcactttagtgtcatactacatatgtaatccgaaatgagattacttgcactaaacaacaagcatcagtgaactgtactagcaaccattgatgaaagatttcatgactttaatatgttgttgactgtttcatttatagttaagtggttttattttgtgtacaactacaagccacatcctcatatatatgaataattttttttttaatttttttttgatatttatatataaattattcaataataaatattaataatttaatattcaagcatatatcaaaatgttcaactctttattaaatgtctttacatgctattcagggcataaaccccaacaatctcccacttaccctaaaagcaaatttggtatctcccttcgtttatatgacccatagaagatttcacttgtagcatctttttgaatggatctactaggttatgttccgatacgatctccgagatcttcaagacaatatttgttgagacaaaagttgtcaggacaaaagacaccatccttgtcctaaagaagacatggtaggtgcttgtctctgtgaagtttgtctttttgggttaattaatttaattaaataaatgtttgaattttaaaagtggttaaagatatttc

SEQ ID NO: 308754 - DNA, 2422 bp, Cannabis indica
tagtagatttatttataatttgaaattgcaatcccactagtatcttcaaatccatatgggatttatttttaaaagaaaaaaaaaactcaccaagatatcttattaactactaagtcatatataattccataataaaattttgataattgaataaatagtatatttagtgtaatttatcaaaaaaataataatatatattattaataaggtgatggatgacctttttatgagtttctttgaaaagtaaaaaaaaaagtagaaataactttataactttgtcatttactccacctctaatacttcatgttttaaagttttattttttttttcaaaaaaactttttagttgtacaaaacacataaacaccaacacactcatctttcactaaacttaaatcttaaattattttttacttttgcatataaaagtttacttaataaatttaatttggcaggtaataagttttgtaagacaatgtgattattatcgctaatttattaagcaaggtacaacaacgctgacgacacaatatcttctatttgaaaactcgaattggtccacatcaaaatatttcaagccttccaaaaagaccaacacatccaaacaacctcgcccaacttccctttagttacccgtccactcaattgaaacagccaatccgagaaatcaagcaatttcaccaccaaatgacccacaaccatggagttctaacatagagcaaccacttgacaatccatcaaagcaagtaagattgtctcatcacccctcttacaaatgggacactctctttgaacaaacacatatttcaatggagttggaatatagttggtagacaacaagtagtcgcccgccaaactaaatccttagcttttggaggaatttttacattccaaaccttcttcctaaaacccgagttcgcatcaagagaccgatgacccttcataacttgagtgatcttgtaagcactctaaacttaataaaaacttgaggcctccttgtgccaatagaagcaatcttcatggacatttcactcaatgtacctatggtttgcaattgggtattgacctccttgaacagttttttaaattaccatctccatccccgtagattaattataccatactcaccctaataaccattagtgatggtgcgggtattaattactagactatttgaaaaacaatcatagttacttataaatgttaatagtaatcatttttctaaaaaaataattataaaaatttaattaattttgataaaatctaattaaacaacattttaaatactttttcaaattcaaagtccatccatatatatatataaatatttattattcaaaaatattagataaacattatcttaaaaaaattaggtatacacatcaaaaataattaaaaaacaaaaaatacaaacaataaccataaatcataactataaatttaatgaagttctaaaatagtaaatccagcagagtcagtctagaagttgttgcaaccattggacttaagaggttttaatctaagaaatgactaagttgtgcaagttggtgtcaaagcagttcgaaataatgtctcttccatggtttcattttttggtttacccattgataattgtcatcaattatttcataattcaagtaacattttcatgctttcattcaaacgatctcctaataaggttgtctaattttgctaaaacttcttaatcttttccgctcaaatctttattaataatgacattcttccgaattataattttatttgctaactgatttatcaaattaacaaaattcttcttactttaaaaagaaaacaatttaaataatattagtccatcataaaatttcaataaacataatccaacatgttcttataaaaatgctaaagcataaaatatgacattacttgtgccggtaaactttattctttatttttagttaaagtaagaaattaactattaacgtaattttttcaaaaaaactattaacgtaattttaaaaatttagaatttttaaaaaatctttcaaaccaaactttaacttcctattctcaaatctttaacaagaatgacattcctaaaatgacattcctaatgagttatatagtcttatttgttgtgttagcaaattaataaaattctatttacttcaaaaagaaaataattaacataatattagtccatcataaaatttcgctaaacataatctaacgcgctcttataataatgcgtaaagcacaataattactcataacggtaaaatttattatttatttttagttaaaataagtaattaattattaatgtaattttaaaaattccaattttttttaaagcaacacacacgctcttataataatgtgcaaaatacgatataactgttatcagtaaaatttattatctattttcaattaaagtaagtaaa

SEQ ID NO: 308755 - DNA, 2546 bp, Cannabis indica
gaaacatccataggaattcctacaacaaaaatgtatttttagttactcaaaaacaaggtcagttccagtataggaagtaaaaatgacaagactctaaagactgaaaaagattaatagttggtaattacgctaaatgcaagtactaaactaacactcacattaaaacataacaaagttatgaggaatctaactcactaataaattaacatacttaatagaaacagaaaaaaagaacaattaatacctaataaatgtgatgaaccttacaaactcagtagtgtagacatcaactgcctgttcaaagacaccaacatcttccctctttctgcccatttgaaaatagagaagcataaacccattaaaaaaataaaaaaagaattaaaaaaaaaaacaatgaacgaaataaaaatcttgctgcctcacagcagcaaagtgcgataaaaaccaatcaccattgaaaagttcatatcagcagccggacaaataataaaatgaaaaacaatcttacaactttctagcctcgaatcgcccccaagccaatgaaagaaagagccgaataaaaagcaccatcgctgtaaggttatatagaggtggtccataacgatgtctttgctcttccattggactataaaaaataatacgcccaaattaactaatatcgaacaacatcacactgctttcttaaacttgtttttttttatactttagaacttccgtatcttatgaagtacacactcacacatatatttatgtacatatatatttaaatatcatctcaatttagaaaagaaaaaaaaacaagaagcatatgataaatagtggaaaggatacaaactatcctcaaaacttacccatcatcatcatttatttgacgggtgaaatctagtaaaacctgcatccagaaaatgaaatctaaagatttactcaaggtatcattaatttttaaaacaacggaatacaaataaacaattcatacaaagcatcgcaatgagtctagagaaacataactcaaactaaacccaacaactatatgtacatgagaactcatatattgaactatataaattacaaattactaatactattactgaacacattgtgtcaatgaaaactcgaagatgtaacgttccaaggaactgcatgactggtagcatgtaaactgcataaaagaaagtacatgcaaaaatggttcatgaacaatacctgtggaaccccaaccaagtacttcacgagggttttgtatacacctgtagctgaaccaagctgagctaactgtttcctcctgggagagtagcgggagatattacataaattttttgttcatagcttgacaaatatggtgatctaaatgcataatgtgatttttaatagttatgattcattagaattgattatttatttttttatgtttttaggagatgaatttgtcaaggaattttaattaatttgaaataggactcctagtgagatgattaaaagaggtaattaggttgtcactagttaaattacatacaagtattttcagatttacaagctctctaaacatagagtatacacttctgcatctttgtgttttattacattgattagtatccaagcaaggttggatatgaatctaatttcaataataaccaaggggacatcacactgcaaggtatgactctatggggttctcccactgactttgcaactaccaattatgaaataggaggggtttaatccaaactctcacaacaggaagcaaaagatttctctccaagaaacaccactgagcaatcctaaaagaaaggatcgtgcatattacgattctaatcatgtgataatagaagcgattgacaattattcgtgattatgatttcgactatgaaatcgaaatctcaagtttcaataagtatttatcattgaaatttgtcaaagtcaggctaaattggtggtaaaaattagaagaatgtgccgcaacatggtggaagcaacttattattccaaaagaaaccaaggcctaataacaatatgcacttaggcaaagatgaaaaggttagcaaaggctaaattgttgccatactgataggatggtagacagcagtattacaattacggaaaaagtcactagcaattaaagatacaaccagaaatttcatattacggtgttaaaaaaaagtgtacattagaagagataaatagaaattgagcaagcttgccatcttcaaagtgctgttgaacgaaaagtgaatgataagttgataaaactgaagatgtagaaggagcttaaactagttcaaataattagctttacttctctttcaatgaccatacacttgatttctaaaagggatattttattgaagttcatagtgatgataattttttggcatcaaattggtgtaatacaagctcgaggttacaaaggctccacgtaagcttaattgcaaatgcaaggaaatgacatttactattttcttcaacagccaacttgagaacaaactttctttcaaagagaaactaatgtaagacagataaaatgatttttaatactttttttttctttt

SEQ ID NO: 308756 - DNA, 1320 bp, Cannabis indica
gatttatttaacatataggaataggatatatttaattaagagttagtcaatgatgatgatgatgatatatacatacatattatatatatagtacttgtttacctggcagtttcaggcatcatcatacgccaataataggtcatggcagcggggatggcaccaatcatcactatgattctccaagcaatatcagcctcttccggcgtagcagatccacccttcagtccattattatttgacgacgaagaagaagaagaagtctcctcaaatatcctacaaacgatcatggtcaccatggagctggccagaatcccaatcccctgcatcgaaaacacagccgctataaacgacccacgtgtcttcttgttagcaaactcagacataatggtggctgataacggatagtctccaccaatcccaacgccgagcaagaaacggaagaatccaaagctagcaagaacacatcccctctttgtgcatactgagaatccacaccctatggcgctaagcaccatcatcatcagtgacatgccgtacacccttctccttcctatcagatcccctaaacgcccaaacaccagctgtcctatcactgtccccaaaagggacatgccaaccatgatggaaaccactgccggcgggacctggaatctgaggtcttgggggtttttggtttcttggtagtaaattcgaccaaggagtctcatgattggtggtatgcagaagaggtcgtaggcatcggtgaatagccccatccctgctatgattatggccttgaagtggtaccattgtgttcgtgccgtgtcaagagccgacagtactttcaaacccatatctagatcgatcgatatctctctttgatgaaatattgaactgattgatacgactgtgatatgatcaaatatatctatggtgtccccctagacaacaataacaaaatccaaatccatatatatatatatatatatatatatgtgtgtatgtgttacgagtaacaataattaaattaaagtagtatgactacagttcaggtgcattaatttcgtagccaaatatatatgtaatcgaaaggtgttgacttgtgtagtcagttaatattccaataagatgcggatcctattactgcaaccgcgtcatatttctatattttaatacacataattgatcccctttctcatctcactatttacatattccatcattgagtattgctacattagcttaaaatatatatttttaattttttatcccatttactttgatacttttgattaaattttatatttatatatattctttctcccaaaaaaaaaaaaaaaa

SEQ ID NO: 308757 - DNA, 1564 bp, Cannabis indica
cttgaggattcacatatatctccccctggcctcttattaattcctcatcatatatatcttattttggttcaattcgatctaacattaattagatctcttgtctttctgtgtgcaattattgtagctaaatattattaattgagctacatatattggtctttttttttgtaatttatgtgtataaatcaagattgaagaggccgcatacaagaggaatattaatcatttaagccatataatatatatactagctttgaagagagcaagagttagcacttaatttagattaacatcgattaatcatcatcatcatcatcatgtgtacaagaggccattggaggccagcggaagatgagaaacttagagagttggtggaaagatatggccctcataactggaacgccatagccgaaaagcttcaaggaagatcaggtatataatactactgctttattattcaattttaatttaaatatctctttctcccttctatcacgatctagctagcttcttcttttattagttgcttaaaaatattaagtaaattaataagaatatatataatatatatttatatattatgggtaattaaaacaaagagagatatttgcttccatatatattataatcttaagcactgagtgcaatctggttatacttaataattataatctttcgtctccttgagtacctgattgtcatattaattttgttgtattaattaatttgcttccatatatattatacaaatatatttatacatatgaattatctacatagaacatttatataccgatacggtagtgtctttactcaccaacccttaatgctaatatatatatatatatacatgatcaatatatagggatatttcatttaagagattggaactgtaactatttttatagtactgcttgttctatttttgtttcgttaaccattaacattatctccacaaactttttttattatatatatttatatgtataaaaacctgcatgcagcgttaatttatatgtatgtatatatatagtgctatagggtttaggacgttcaatctttgtttgtgtacatccagaaaaatatacttaattaattaattaaatcatcaatacggttttagattttgtcccacaacagtgtacagcacaattaattttcttcttcagtgcttttttatgtaccgttgtactagctttgagttcacagttagttataatacctattataaaattttcagtggtgcatataattatcagtgcaaccgttcccgttgtgtgttaccggacaaaatacaatcgtacatatatacatatatatggtactatatttagatatactatattttgaataagataatatttactttttattaaaaatggtcgatatatgatatatatatatccaaatacaaaatttaaggtagcttttggttggagtaatgtaatagaatagaaaggaaataattttttattttattcctttatttagttgtatttcaaaataatgaaatgctctttctgttaattgtttttatgcattttaaattttattcaattctatt

SEQ ID NO: 308758 - DNA, 1470 bp, Cannabis indica
aaaaagaaaagaaaagaaaaggtcagtagtcactagtcagatatgatttctcagtacaaagataacaaactctggcagtaatattaatacatataaaaatcagaggcaaaggcaaaatccgtactttttcgacccacatcccctcgtgaatcgagggacagtgattttcactttatcaggctcaataaaacacacctttctttccttttcattttacacttccctcatgggggtgacccctacttcctttttctccaatatttacctccatttttaccaacaatttataccaacatatttcaaaattattaatatttatcaaatttcacatttcacatgagcctacatgttaaaaagatccacaagttattaaccacagagtgctttctctctcttttcatttttcaaaaatataaatgagtaaaaataagtacaacattataagattatcctcaaatgtgggcttagaatatattaaatataattcaaaagaataaattaaatttatctcgaatgatagtttatcaacgctctcatactctagtggtcatacgtttaatttaatttgagcaaagggattcgaaacatgatttttcatataaattcaaagcatcttaacaatataaataagtaacaattttatattaatatatttttaaatcttagggtgcgttttagtccaatttttgagcactacatgggttcgtcttatttgtcttttcttgaatttttttaatttcgaattgaaatttatgtatttggagatctatattaaattcctcccttactccaacgaaacaaaagaatttatcaatccatctatcactctactcaaccaaaaatagtgtaaagctctcttcttgttgctagatctagttattatttctacatgtttacttatttacatatgacacgacgttataaagtattttactcttttaagttttttttttctactacaaagtacaaacaaaatattatgtattcaatagttttgctgtattcgtgggaagctaaacacaaggtactacaagtcatgccacatgttttgtccctataatactatgcttgtcccatttttgtctctttccaatgactatgtctactaaggttaaaaaaaaataaaaggttgaaactatgtgacatggattctgttttcctcatttgcccttcttatctatcctcttcctccttccttactctttagtttttaggggaaaatgcatgtaattaattgttcctactgatcatatgaactattttctaaattagagagggtcagagccatacaatatgttagtccaaatgtagtacacagttaaaagaattaaaaaacaagatatcataagaactcaactaataagtcactcacagtaatagaatttatgtacaactcaatgaaacagagctgttctttttaactatctaagaataaataaaaaccttgagtacaatttattttttattttt

SEQ ID NO: 308759 - DNA, 2293 bp, Cannabis indica
attttattttattgtttatatatggaaaagttaaaactaatttaccgaaattatacaaatattatcattacatatttttgttgatctatatttaattaaattataacagtttctggtgttctcatgctctgattcccgagtgagcccttctcatttcttaaattttcaacctggagaagctttcatggctcgtaatattggcaacttgattccaatttataatacggtataattaactattattcaaatcaaattttgaaaaaaatgtgtatatataaatatttaatcttttcttactattaattaattattacattttcttttatattatttaattaatttcatacagttaaaatactctggagttggtgcaatcattgaatatgcagtaacacatcttgaggtaaatcttaaattttttttattatttttttggtagaattaatcatacatcaaagttatgcatcatctattgatatgaccatcttaattatttttaatatcatgttttgtgagtatagttatggttaaattatttataaataaaaaattttaaattgcataggttgagaatatactggtcattgggcatagtagttgtggtggaattgaagcacttatgtctgatcctgttggctcgtaagttttttcttaaaaaaaaaagtagaaacattattagaactatatttttttattaattttgactcatagtctaacattttgatatataatttgcagtgacttcattgatgattgagtcaacattgctcaaatcgtcaagaataaagtcaaagctgaatacagtaacttgtcacctgaggaacaacgcaaaatatgtactgaggttaaaattaattattttattttatttatttatttattttataatggttgaggtaaataatagcaaattaatctcctatcataacataaaattaagacacatttttattatatatgcatacaaaatatgtaaaaaaataataaacatatatgttcttgctaatgtttcaatacatgcatcattaatgtgaatacgtgtttaatattttaattatataaataaatacatatacaattctaatactattattaaataattaaatatgcaggaagcggtgaatttatctctaaagaatcttaattcttatccatttgttcttaaaagagttgaagagaaaaaaataacacttagaggtggatactacgactttgtggatggatctcttaagttatgggaacttgagtagtaaaatattataatttctaaagctatatatttattattgattttcgtacaataattaatgtttttcaaaattagtaatacatgtgtgtttatgaaattttgtgtgatgtattgcttaattattttagggctcgtttggtatgccacattgtaatgtattgtattatattgtgttggattgtgttgtattgtattgtattgtattgtattagtattagtattatttaatacaatacaatatttagtattgacttgtattaattgattgtgtaaagttataatatatttttaatacactcgatcccagcaccaactacgggtccgggtcccaggtatcgagttcgggtctgggtccggagtccgggtcgggatccagggttcgggccggggtccggggtccgggcttgggtccgggtcggggtcccgcgttcgagtctgggtccggggtccgagtccgggttcgggttcggatccgaggtccaggcctaggttcgggtcggggtcccaggtctaggttggagattggtgttgaccccgaattctttgtaaatattataatacaagctaatatgaaccatttattatgtattaaataatacaacatacattgtattaaaaaaaaattggtcgtgataattaatacaatacattacttaatccaaacatagtgttatttattatttaatacaatacgactcttatacgacgtaccaaacaagctgtatatataattttccttattgttattattgaaaccaataaagaactatgaaaattagttatttgattttctatagtttgtttccgtcttctatatattgtaacttttagtccaataagagtaataataaaacaaatctcaggttattattccatgattatatttttattgtaaccatcatggttacatttttgttcgacctgtaatagcaggttaccaataagtaaacatttcatttttaaaattaattaattataattaactatttttttaaaataattaattaaatattttataagacctcttttagcaattaatattta

SEQ ID NO: 308760 - DNA, 1162 bp, Cannabis indica
ggcaaaagttctaataccaacattgatttgccaactcccttttgccaacatatcacacaagtaaattctattttaccagggcaataccaacttttgccagcacaaaaatgtgctggcaaaagtgacatttcttgtagtgatcgtctagacataagtgaaaacaaagaaaggagtagaaagaaaaaatagatgagagaaagagaatattaaaacaaaagaattgtcttcattacattattatggaatcaagtacaagtatttatagagagttaggattaacaagctaatctaactaacttttgataacaataaaaagaagctaacattactaactaattgcaagagactaacaattagtattaactaaattttaactaactagtaaacttgattcccttaacacctcctcacaaactcacaattggggtcactaataagtgtgagtttggatttgaatatatagaggaaatcgttgacttgagattgctttagtaagaccataagcaagctagtcaatggtagggaagtgtttgacagaaatttgatgattatgaatctttttccaaacaaagtacaaatcaagttctatgtgttttgttcgagtatggagaaccggatttgttgtgagcataattgttctaagattgcaacaccaggccataagatgagtatgttaatgaatgtgtaactcaatgaatagagattgaattcaagaaagttctactacaacagtggctaaactgcattactcaacttctgtgctattgtatgttatttttgagacttctaggagatcaaattaccactaaaaaagaaaataaaatctgaggttgtgcgtctatcatccacatttgtagcccgatcagcatcacaaaacgcttcaagctcaaaatttagaagttgtttcatttggatgctatagtggatagtgacagtaacacacctgagaatccttttgatagctgactaatgagtttggagaggattctgcataaattgacatacttacagctcttaaattttttaagagagataaagtgcattaaaagaacgagatataaaaacgtacacttattatatatatacaaagataaaaaaaattagttagaagaaaaaaaaaaagagaaattaaactaagaaaaaaaataaagaaagaaaaaat

SEQ ID NO: 308761 - DNA, 1227 bp, Cannabis indica
gctttataatttgtggtttaactctctattgtggttgtttaattttgtaagaggttatagtagtcagatcgtttgagcatcaacgggacaagggatgcaatgaaagaactctgaattatcaaacaatcaaggtgttaacaaagtgtcgtcgtctgggtgttcctaacacgaaaggtctggcacagggaggtcctcccagggaagggtccccacaaggagatccttgcaggtcccttctcatagggttctctttccaaggaccttctagcagagggtccccacaagcccctccttgcagggggccttctcgcggtttttggaactccgccttcctccgacttcaagtggagaacctttctcgcgcagattctcccggtaccatcttcaaataaaataagagggaatctatatcataaatatttttttctttcaatcatgaatttcatcaacaatataccaagagaagaagaacaaaagttagataatgaaagagttgctatatcataactatattttcttccactgaacaatgtgtgattagttataacctctaaaatgtcgtatgctatttttattcaatattcaattttttcatatttattattttcatatgatcacattactcttttttttttcttcaaatatttaagcaaaaaaataacatgattaccttaaggaataataacatcaacactcattataaacacttgaattgtcctagataattatgtgtaaaagtgattaaaaaatagccataattaatcaaacagataatgaatgattaatattaaaatataaacttttcaaatgtttaaaaatggtgaaatttcaaaaattaaaaataaaaaaggttggtcccataccaatccaacgtcttctaggtttagtgccgttggactatggaatttcaaattttttgtttttagctttcggctgaaaaagctttcaaatttgcattattagccaaatttgtctatagttaaaaagttgaaaggtaagtggggtatttttcaatataaaatacatgtatgtgtgtaaaggtgagtttcaccgttgtatagatagagtgtaattttctatatttatagtatgaattataaaaaaaaaaataaataaataagggtttttaaatggaataattacataaggcacccttgttttgtaaaatatttacatttttacgttcaaagaatgtatttttacatttttacggttttccaaaaaata

SEQ ID NO: 308762 - DNA, 1004 bp, Cannabis indica
ttgaaaaacaaaaattttactttcattttgtgattaaaaaattaaaaaatataagtgttatcaaacgacacctatataaattgattttttaacaataaaactacttaaattatcttttgttttaatttttacactttcgttaaaatgaagttgtcaagtgctaaggtcaaaggccaaggtgtactgcagtgtgtacacaaatgtttacgtaagaatattgaagtagtccacatcatttaaaaatataaaaatcatttaaaaaaaaagcaaaataaataataaaattacaaaaaataaaaatttataactccctctggtttccctcatgtggcgccaaaaacatatcggaaccactatctctagccccctcctcacctcaagcgaacctcgggtcccttttcctgaaactcaaaaccctaaaaatccccaaccctaaagcccaacctccatcactctccttttctcttctcggccctttcgttatcatggcgtcgccaccaccatcagcttaggcgaaactaagcttgagaactcaaggaaaacctgatggtcccaccctccttgcgaacccttgctctttttctctctattttctagcttatgtctcgtttggacctgaagttttcaagttacttagatagaccacttattatgctctttgaggatgctagaatctagatcatgggaggaaacttcacaagtttaagcttagaaaattgagtggttcgttagtgatatgtttgtgttcatttgtaatatcattcaacctcttcctaattatgatattgaattcatccttattacttggtggcgaatttagttctgccaaaataaacaaattcacgaaaacaccattattactctagagttcataagactgtgggcctcacaatacagtggcaacatcctagtgaggggacagttaaagtcaatactgatgatgccactgttggaattaattttaccagaatcttagatctactcataagtatgttgatttaaca

SEQ ID NO: 308763 - DNA, 1512 bp, Cannabis indica
aaaatcctaattagtctaaaaaagaattattcttttagaaaacaatttagtttaattaaccattttaattacattttttattactatttaaactaaataaaataattctaattttctttacaattaattttataaacaatataatcttcttctttttttaacaatagcatataaattgtatgaattcattaaagacaaaagccaatcaaaagaaagattaaatcaagttaaggtcatagataagtcgataggtcggcccaccaaactttagcgctattattgacgttgaaaagcgattaactccgtaccatctgataagcgctagcggccaatgaatacatgagcaaaaagtaaaaaaaataacactacaattatagtagtttacttctcttatcgcaaaaataatagaactatgtttaatacaaattaatattaaatacttttcataaagagaattcattctctttcaagcaaattataccaaattaatacaaattagccataaccacaaattcacacaataagattaatatttaattcccattaaatatgtaaattaaattaaataatattttgataactatttttttaagaaagaacttaacacatcctttgattcatttctctcattttcattggccatcacaatggttagatcgatgattgggttagatgtgtctcctttactgggagctattgctttttgcgcattctcttgtactttcatagatcccatcttagtttgtaacctagtctttaattcttttgttatggtgattctcatagacagcgctagctgttgatgctgaaaattagctcaataaaaatttggtattatgacagaatttttcagcaagttcagtctaataaatgtaatttttctctcagttaacacaattccctttcggttataatgattatctctggttcatcagtctccgagctaaaaatgatatcaaggatgtaattcaatagagttttgacaagcttggcgtgaggaagaattcgtcccccttttcgaatgaaggagtctcctatttataggcacaaaggatagttggttcttcacttttctccttatctgatttgtccacgtgaatcatctcgttttcgcttcttcgcgtgatttcctttcttgttttcgctttctaagctcttcaagctctgcactttagtttttgagtatgctctacatttttctctggttgagctctgttccccttgagttatttttctcttttggtgaaacagtgtgtttctgagtgcctgccacattattatattagttttattatttttattatgcatagtgcaaaattacttttatacccttaaggttattttttatcgtttggtacgccgtataaaggtcgtattgtattcaataataaataacactatgtttggattaagcaatgtattgtattaattattacgaccaaattttttaatacaatgtatgtcgtattatttaatacataataaatggtctgtattagtttgtataataat

SEQ ID NO: 308764 - DNA, 1265 bp, Cannabis indica
gaacaaaatgtttcaattttgtttttggcacgttagatttctttttttaattttcaaaaattttataaaaaatctatacacctcaatcataaaaaaagttaatatcaaaatgcaatccctttgagcaaaactaggcctaaagcaaaattaaattttagggccattatatatattgtttaactattatcaaaataatagtacttttgctaaaactttttttttaaaaaaaaaaaacaataaaggttggaattgatcttttgatctcttagcttaaattaaaacactttaccactatattaaataatttcttcttacttaatattttatctatctattaataaatttttcacaatttcgaggccctaagcgtttggggacccaagacgcatgcctaactcgcctaccctcaaggccgactttgcttttaaaagggtatgcactatacaattttcttactatagtgcacctacaaacatatatgtcatgtattgaataagttatgaaggataaatattaattatcaacctcctatacattaataaaaatatcaatgcatattgaacaagttttatttattagcatttttattatgggataatgagaattacgttggattaaactaatatttatcatgtattttgaattattaatatttaaattatattttctatatacattttttttaatgaaattaacttaaattgtagctaaaatagattggatggatccaatccaatctaatagaaaaccagttaatgcatccaattgtttgaactgatcaaatctaatacatccattggatcggatcagatgacttaattcgattagattagatcagatgacaaaattaaatatccaataaataattagattggatcggttgggtccaaatccattggatgtgatccaacgaacacccctaccgtcggccatagtagactatttccaacagttttaatcacttgtgtacttttcctgacgatttaaaagagttacaagccaagaaaagaaacaaagttataaactgtcggggattcccctattaatataaaaccccatcttgctcaaatctcatttcaatcatctcttgctctctctatctcttacctaccttctccatgaccgaaccaccatgagccacctcgtcctcgtccctctttgtttcccatttgctctttctcgtagatgccggtccacgagcccctccatcatcaacactggtccaccaccacgagccaccatcgtcctcgtctctctctctctct

SEQ ID NO: 308765 - DNA, 2215 bp, Cannabis indica
gaggataggatataccttttttcatagtaatatgagaaatttttaacaaattataaactcttgcattcaaataataataaggattacctctttttttattcttcaaaattaattaacttatcacacatttcattataaactcttgcacatttcataatgtatacattaaaacaattgaatagaattgatgaaatatttagtttttctttaagctagagtaatagagcgaataacaacataaatataaaacacattttttttttaaaaaaaaaaaaaaaaaaagaaaagaaaaagaaagtacagaacacttgattagatcaacacacggtatttatatttaacatttttttactaaaaataaagagatataaaatataactatggatgatcatattacaatatctcaatatcatataacaaccatattatagaatccttatttataaggaatgtctccactatatccccactttcacactctcattaatatacgaactcttctatacatatattataaattttcttatttataaaatttcatggagtctaatacaaaatccaccaagtccattgtagtagtagtgcaaaattacaaataatgattaagattctaagatgcaataataataaaataaataaataaataaaattataaactctagtaattagtaatatagcatcttatacaacaaccatgttagaacaattcttacaataactccatctcatataaaaccatgttaacaacactcacaccaacccaatatcatataagacaacaaccatgttagcaatctttacaagaacttcttagcaacttaatctcatacaacaacattaattgttagtaacccttacaagtgttggttttatggtacaaaacaagtgcgcagcaaaaaagttgtgactaattatcattataccatatgttcaagattactatatgtatatatattaaactgaaagtaaagagatgaaaagaacatttacctctctataagcctatcaaggtatcctcgatactttttgtatgttgtatcctcaaaatggtgatgacaaaaactcacaccttgatcttcctgaccaccacacacaaggactagtgtggactagtaggataatagtgtataggaaattcttaataaatatcaacccatgagcaaaaactatttctttaatgatagagaaaaaaagttttctggttaatcttttttttactctttcaaaaaaattacgtacaaattattctgttttgaaaattatctagaatttagtttatacagtatattaaacaaactcaataaagttttatgtaattaactatttaaattcaaatcctttattaaattaatttactgagattttttaaaaaataatttaatattagagccaaataaaatataattaagagaataaaacatgaagaatgtgttagaattttatgccctaaataatctatttcaatatataatcacatttgctaattaataaaatattagaaatcattttatgttgtatggttcacataatttttttcatgattatatgtttaatgtataaattctattaaatccagaatatatagttattcacgattatagtattgtcaacacagtgaaatataattataattatatgtttcaaaagtttatgtcccatgatttgttagtacactggatttacactgacatgataattagcgataaagtatacttacactttggatacgtgttatgtccattccagggcattgacaaagtatgctattatcagatgtatggagtatacatcagaccagaccgatattgatattagataagatatcataaacttgccattatatttatctaagtctatatcacctagttgatcttaaatcaatagatcttaatcctgatatggttaggttcgatctcatctgtgttatttatgttctttgagttattcgttaaagcttgatcgatccaatacttacatcttgcgaacatggtaatgcaattgagtgggagttctaatcatagatatagaatctatagcttctataagtatttagaagtgaaacaataatttccttcgagcttagcttaatagagataaatgattgagatctcatttcaataattatattagtttactaaaatatcatttatagatagttaattattttaaggataaaatatattgaaggatataacggtaaatttattcctacttg

SEQ ID NO: 308766 - DNA, 1542 bp, Cannabis indica
agcatactcttcttcttctagttcaaaatcttgttcagtttggttaatgctatttcctattaaccttcttatacatcctcaatttggtacttctcttcgaagctcttcagattgagtgttctcttcttctatataaggttgttctggttcaggatcttcaacatgagtggctggttcttctgtagcattttcttgccactctgatacttgtacaataggtttagagagtgattcttcaactaattcttgtctagcttgactttgtatattaatagagggctcttcaagtggatcaccctctatttccacctgttcttgtccactaccatgcacaacttcagcttggcaaccattattttctattggattcacaacagtatcaagtaccacattagagtcattacgtaactcctcaatagtgtagtatgctactattttctgatcaggttgtgtttgtttgattgcatttggatcctctttccattccaaagctacatgcctctcaagtaggaccatatagaattcaactactttataatgctttcttttcatgtcttcaatcacaaccattaaatctttatcactaacaatcatgcgaccattagacaacatacatcctttgggtttgaaaaaaagcccgaatggcatttggtacttcatgcaatatacagcccattcgaaatcaaacttactaaaatggtcaaactcataatagtcaaaataatctattttaccccttcatacttctttaatgccatctttgttgtaccacacacccccatgacagagcttcacagtgaaccaagtggtatgatttcctacagtcaataatacaaaccaaccaattaaaaaataatttaatgcacaaaccattactgccactcaaaaaagacaagaagttattacacatatatgtgtctttgtttctgttttctaatagaataatacaacgactttttttatgaaaataatacaaaaatggttaaaagtaaaagaaattgacataataaaagaccccactaaactgaactccatgtgcatgattcttatttctgccaagaattcactacttactttttcacacacttttcatagctaaactactgtaaatgttgaaaaataactcgaaaccacacaaaaatcaatataaaaatacacatagaattttatttttttttaatcaaaaaaaaaacaaaaagacacataatattcctttatataatacccataacctttcaaccagagcttttttttttttcaaaaaataagctaccctatatataatactctaggatacattctattatatacaatactcctctattgtcaaggaaaaagcaaaaaacccatggtatatataatatttttccattgtcaagaaaagaagaagaaaaaaccctagaaatggtatcattaactcaccatattcaagctcctctccatcaggtggacaacgaatcggcatttccacagcttcaaatagagctcgaaatgcttccacttctgagttggttatggcattggtgttggaaattattttac

SEQ ID NO: 308767 - DNA, 2065 bp, Cannabis indica
aaatctaacttgaacaactctggatattgagccctcatgtcatactctaattcctaagtggcctcctccaccttactgttcctccagagtaccttgaccaaagctatggtcttgttccaaaggactttatcttttgtgctcagtcacttaaaggccattcactctacaacttttgcaagaaggctatttttgtatgccacaacttctaaaccactttattttcatgccttcacagatgcggattgaggagcgtgtttagacacaagacgatcaatattaggatactacatcttccttagacaatcactcatctcctcgaaatccaaaaagcaggaataatataacgatcatcaactaaagtcgaatacctagccatgaccaatgcaacatgtgagttaacttggctccatccatcattcgaaattttagcatcaacatcagacttccctcgactctattttgtgacaacaatgctgtcctccacttatcagagaatccaacataccatgaacgcactaaacatctagaaatttattgtcacctaattcgagaaaaaatcaataaagacatcatcaaaaccaatcgtgttttatcaaaatccaacattgtagacatcctcaccaagccagtcttccttgcccagcttcatgaactcattatcaagatgagtgtcaaaaatctttacgcttcatctcatagggggctcgtagaccgttaatttggttgttctttctgctacactgctatatcaactcaccctctatataagcacgtatgtatttttcaattgagaataatggaaagaattttctttctctctctgtttttctactaatacttgcgattatttattttccaattgcatttgttatgtcacaagcacgtacgtgtatagatttaaataataataatatatatatactggaaaattttaaataaagtcattaaaagtaaaatattatccaaatcaatatagtttggaaattatttagtgttttagttttgaattttatttatttgtaaataataatttatgtttttcttttaaatctttattatatgattttgcttttgatttaaaattggtagatatttttttaaacgtagagaaatctatatttataaatgttttatatatacatatctttaataataataataataataataataataataataataataataatattcttatataatttactgtacacatgcatataaggattattattttatggttacatgaaaaataatgcaatatagtcattatattttttatgtaggttattattaaaaataatttatgaaaaagaaaattataatattatattttaataaaaaaactttttatgaagaaaaaaaatatcatacaattatatttttatttttggaatcttcttaatttgatcaaattaacaaacgcttatagaattgatggctcaaaatctgtccgaaatctgcctaaggaattggtggagcttccgtacctccaagagatgtaataattataagtgtgcataaatattaaatatttctttaaatttattatcaccattaacattattaatatgctcatcaaattaaatatatattaaagtactaaaacgtagcaatcatgtctgtttctgtttatttatttaattactctttttgttgataaattctgtttctctctatcattattacaaataatataatataccatgcattgcatgttattctctactaaatttgtatataatcatatcaattatttttatcatattcagtgtcctctcacacaattatcttaatagtacaatctatttggaatgggcagggtggtcttaaatattttggaggttccattttaattttaaaaattaagcccctacaaaaaaaatacaatttataaatattattatacggtatatattttacaaaacaccaaagaaactccaattaatttataaaaattgttattgattgcaatacaacaaaaaaaaatgatagaaaaaaaaataataaatagcaacaataaatttttatttggaataattacataaggcaccattttttt

SEQ ID NO: 308768 - DNA, 3483 bp, Cannabis indica
aaaaaaaaaaccactaatcatgacatgtatagtacactagggtagcagctagttaatgttataaaaaatgaaaaggatttacttgtctatctcaactatctcttcattatttcgtgcaacatatgcaataaatttaaggcaaaatattaaaagagacgactatagatattgatttacttgccagcttgtttgataatataaaaccatgataaatccaaatagtacttttcagctataataaaaatctcaattaaaagttattttcaattttttctcttccttagtgttaaagcatttaaaagaattaagtattcaccaaatatgcactccaatttgttatattagtaaatagtaatacttgtgtgagtgtgacattatatattccgtacacatttcctctcccatgaaattaacatacacacctagctaagtaatgagttatagtactcttaatttcttttttcttttacttttctttcttttgaaaagtaatgagttattatttgttgcattattgtgaggctctcttgggagcatgtgagccatccaacacgtgtcactttctaaatggatgtttgaatcattagcaaacatttgcgatgttcgctaagtatctttggatgcaaacaagtatgtattgctccttgaagagtcaagtaagcaagtctctggccgctttcttgcgaggatagtctaaaggacaactcgagatgtcaatgagaatattgcatccgagttgttatttggcaagaaagctatagccatgcaagtagaggaagaacaagaggtgaaactatactggataaccttacaaggatacgaaatacttttttgttgtaggactaccacaaatcctattatatatttctcttttactatttttgtcaattttaagtgacaatttttcatttatcttactatcattttgagtatgttaatacttaatgctcgaagttttctttataactctcgaaacttttttaataaggctctatttcatgtcatggggaactcaaagtatatggttaattctattttattattatttgatccgcatctcattaattaataataagattctcaatgaaaaaatatcatgcctcaaaatgtcatttaaaatagcaacctaacacaacactaaaaaagttacaaaaatgaattaatataattatagagtaaataaagaactactattcaaaaaaatagaaatattgatataaatgtaggtaagtttatacaataggctatataggcatacctatctataccaaacccattgtcatctctaattaatatggtgcacgtcattaattataatgtgtttttttttttttggaaattaattataatgtgttacatatattttacaatatttcaaagtgctagaatgtggaatgtggtttataaggtatagtaagtttctattgcccatcttatagccatgtgggttttggcaaatatgataaaaaaagtaatattaaattttattttaaaattaattgatgatgaatgaagtaatttaatataaagattaagatttatcaaaaagatatttgtgaggcgaaagattgtgaaatatattagcaagggcattgttattagacatcaatagtgtctagtactttttagacatgtctctttacgattagttagtgatatttcttaaaaactattatattaaattacatgaggtctaatatttaattgcacaaataacaatataacactgaggaaagtaataaccttttagcatttcaaattagacactatttctatagttttttttttaacaaatgaattttgaatttattggaaaatggtgatgtggccaattaagtaacattattgatgcccttatagcattggtcattttcgtaagcattttatttcttgtgtaacttttgattgaaatgagatgaaatttgaacccccaatgttgtacattatattaaaaataaactagtttctctctattttgtatattttcctaaaaataaaccttcaccggccttgcctttgctctaattattagtgtttttttaagtcttgataaggacacttcaacatacaaataatatataaatgacatacacaacagaagtaggccactcaattctacttcacagaaaaatgaataccaattactaaaaatgccggccaaactcaattatttttatgtaaacattttccctttttagtaaactttatttgatatatcaaccaaccctcattacattattaattaattcattgtattttttttaaaattgaaagtcattttattaaacaaaaatttccgttaccaaactaggcaacaactcaacacgaacagtgtccaagttgaacagacgatcagagtgagatatagaggccctcgcaaaggaatgagccgctacatttactgatcgttttacaaaatgaaaagaaacatcatgcaaagaacttaacaaattcctacaatcactaacaactttgccaaataaagaaaacataaccatagagctacggacagcttgaacaactgaaaggcaatccgtttctaaagtcacataaagccatgaatgatccatgatccaactcaatgcctcccgaagtccaattgcttcggccaccaccgaagaaattgcgccatgaaacaactttgtaccgccttcaacaaagaaaccactggaatctctcgccacaaaaccaactccataggccgaagaatcattaaacatagccgcatcaatattcaccttaatactattaacacttggaacactccattgctcagccccatcccccggaatgaacccggtgaacagtagctcattgcttgaattttgagcaacacgccattgattaaggtagtttgttgcagataacgatgccttcgatccccataatcctatcttgccaaactttatcattcctagcattccagattgcgcaacacaaagccaccaataagtttgtattatccaaatcaagtatttcaaactgatacatgcaccaacccaaaaaagagaactcatgctgcaataccgtgccaatacccacccgatcccacacagctgctgcaattggacacaataaaagagcatgtttttcatatagaaaaccatatatatgctaaaatgtatgtttttctctgttttatctttacatatataaatgtaggaatttttaagataggaatttactatcttgccccctacaccaacaaacaaacgaatcaaataccaaggtcaatttcgacctttctctgttcactttgacttttcaaagttaaccccaaaacgaccccgttttgtctttgaacaaaacctaggaatggatcgagaaccttctcatttgtttcctttctctctgaaatgctagaaaccctagcagagagtttctcaaagagaaactcgaatccaaaccctagaaacccagaaatcccaaacacaaacccagcaaaaagatcagatctaaaatgatctgatctttacacccata

SEQ ID NO: 308769 - DNA, 1061 bp, Cannabis indica
gccttgcacttctcactctatagctgaccctatccctctctcttttcctcttcataatttcgaaccttagtgatagagtagtgcccacacacagatcctggtaaaaataaaatccaacaggattacctgtgcacttatccaacatatatgaaagatctgatattgagcttattatttgcacaatgtggtttatttggtatgagtgtaacactgttgttcatggtggagttctgagacctacaacagttcttgatactgctgctgcaaattatttgctcaactaccgtcaagcacaaatcgtatacaacatcgatgaccattgtccttcaaaggccactctgtctgctgctgagctggtcatttggcggcctcctgctccaggcaaattaaagctaaacctagatgctgctgtcgatagctctagaaacaaattaggttttggtgctatagtttgcgatgttcatggagatgtggttgctgctttctcgaagcctattgttggtaacttctctgctcgtgaaatggaagctaaagctatgtttcatagcttgaattgggttatacaaatggagctacaaattgcagaagttgaaactgacgctctaatggttttgaatgctttgaataggcattactgtactatttctacttttaaagatttaattgtagatgtttctagtcttttgtcaatctccctagagttgctattgtacatatcaagcgtaaagccaatatggttgcacatgtgttggctaagtatgctatagagttggatgaagctaactgttgattggagaattttcctccctaaatttactctgatgttgtaaataaattcctttaatttataataatggggtgttttctctaaaaaaaaaacaattctattaaaacatgaaaagataaaggacaaaaagcaccttttatacataccaaactgaaaattatacgtatttgcttacacagattgacagaatagtgtaaatagaatgtatttaaattcatatgaagaaaattgtaatgccctaatctataaggacgccacgtgtgtgattttataa

SEQ ID NO: 308770 - DNA, 2020 bp, Cannabis indica
gattgtgcaatcattgtaatcattattttcttaacaactttccgtactgcctaatactttgtgcaccacgtgtactgctgtcataggctcattttattccctctgtattcctctgtattggccgtgtgccatttaatgaaaagtttcatcactcactcatgggagctgagttttcataatcaaccattgtaaatttcacttggtatcagagccacggcttctttccctaccatgtcgactgagcagagccaaacagctcaagtcacacctgcaagagctggagatggaaactcccatggaagctccggagcacagtcgtcaatggctgctgcaattccctctctggaagctcctttcagcaacacgttgagccagccgtttcactcaaactggaccgcaacaacttccctctgtggaagacaatggtgttcaccattatcagaggccacagattagaggggtatttaaatggtcagaaaccttgtccacaggaggttgtttctgttgaatcgaaaagtaacagtgatgaagtcattactgaactacttcccaatccagattatgaagcatggattgttcacgatcaactactaatgggttggttgtatggttctatgtccgaaggaatcgcatcggaggttatggggtgtagatctgctttctctctttggtctgcacttgaagagctttatggagctcattctaaggcaaatatggacgatctacggactaaacttcagacagttcgtaaaggaggacagtctatggtagattaccttagacagaagagagtttgggctgactctcttgcacttgcaggcgacccttatcccgaaaggcatttaatagccaatgttctgtcaggtttggatatggaatatttatccattgttttattgcttgagcatcgtgttgatcttacctggcaggaacttcaagggtcactcctcagttttgacagcaagttggagcgtttgggggctgtctcaccaaacaacaaagctcttggatatccatctgctgctcttgctcagaaaccatctcagccgagtaacagagggggctttcatggaagaggaggaggctatggaagtaattctggccgtggctatggcaataactctgcctatcaaaatgctgcaggaagaagtggaaacaataacagaggaagaggcaggtttggtagaggtaattctagacccacttgtcaagtttgtgggaaatatggacattctgctgctatatgttacaatagatatgatgagggatatatgggtcagccaccacagtcagagaacactcaaagccaggacaaacaagctcaactaacagcccttgttgccactcctcaaactttaaatgatgacagttggtacgctgatagtggtgccactaatcaccttacttctgaagccgagaaagtgaacaacaaagtggagtacaatggtaaggaacatatgattattggagatgggagtaaacttgcaattaagcatgttggttctggtatactaagtctcaataattcaactcatttgaaattgaatgatatgcttcatgttccttccattactaaaaatctcattagtgtgtcgaaactaacctgtgataacaatgtatcaattgaattctttcctgatttttgttgtgtgaaagatctaacaacagggatggaggtgctgcgaggaacaattaaagatgggctgtactgtttcaatcctactgctgcatgttttcacacctctgtctcctcacatactcactcacccgtgtctgcaacaaagtctcagtccgagaatgttggttcttctttcaattccctaaaggatacttggcatagacgcctaggacatccatcaatttctgttttaaatcaagtgttaaagatttgtaatgttaaaaccaaaagtaatgaaacacatagtttttgtgatgcttgtcagtttggtaaatcacacttgttgccattgttaggttatttttagtattaattttagattaagtttagtatatttttaat

SEQ ID NO: 308771 - DNA, 1206 bp, Cannabis indica
ctttacctccctttgttgctcagatataaactgtccagtcaaatccctcaatatgtccaatatgtcactgaatgtgacttttccattgcaatcagaatcgtatactctgaagataactacaaaacaaagagaacccacaaaatcaaaattcagtaaagagacaaccgaacactgagtttgaaaatctctctagcacagatacatatatagtaagatagaatgattacactcaatcttttgttgctgggtcgctctagggctgaatgctgacaaaaatgccacaaattccttgaagttcaatccatttaatatccccatcaatctctgaaattgaagacttaattaatttaatatgctgaaagtatccaattatattatagatacagatgcatccaattccatataattccatagataatgacctgcgaaaggggattgacagcgacttcaggtatagacaacaactcatctgcggagacgaaacctccgccattgcgatcaagctgacagaatctctggtacagggagacgatctcctgctgcgaaactaatcatacggaaaaatcaaaatcaaaatcgagaacaagaacaagaaaagatgggcgatcaaaataggttacgaaccgaagcaaaacgatttgtactcacatgtgttgctgcagtggtgttggacttcttcaatgtcgtattgggtgagcatagaggaaccgttgcccatggcgtggtgaaagaaagagagaaggcagagaccgatttagggtttaggtctgagcgtggagcattagggatagtgatagcctcagtctctctctctctccaactccgcccagcttgtctcagatgaagaaacccacagtcgttagagtggagcgagcctggttggttggttggttggtctccttcggcgtgtgcgtcatacccacgcgctgcaaacggcgattagtaatgtcgtttcctgagcacggcatcgtagcccattattgcatacgacatgtcgtttataagacatttcaaaaagagaaaaaaagtcagcatttatatatttgagttttcaaaaacaaaaataataatttattaaacaatttgtgtcataaatatttaatttagaataattatcttttttaccccctgtacttatgatactatactattatgccccttaatctattcagcttgttataaatagtccttgtataattttatatg

SEQ ID NO: 308772 - DNA, 1856 bp, Cannabis indica
ttttttgtttttaaaatttctattctcaattaaaaaattgaaaagtataaacagtgttataaaacatgtttttgaaaaatatttttcactttttcaattttaaaaacaaaaaactgattaaaaacaacaccatagcaacacctactgaatatcctcatacattcccacatagaaaattatgtaataatgtcaatgaaccaaattttccatttaaaagcttggaagcttttcaggatattcttttgtcatcatatatttgttccctattgtaggtagtgtgcaatatcaaaataagcttgcattacgctcccgtttacttagaccattattaggcttctagctgagtgttgttaaaatgcttaaatagaaagtaaagaaaattacaaatatcactaaatataaactttcaaaatacgctaattaattaaacttattcgtaactctacatatgccaaaacttaattattatacgtacgtagtagttgagccttaacaataagggaccccggccagcgatgcaatctagctgaaggaacgcacatgagacctaattaagcactatcgatttttatatgcgtatttatatatacacatacgtacacgctgtcattacaacccatgatagaaagtcaaaggggctagcttccacgcactagacataaaatacttcccaacatggattcatatatacataagtaaatcatttaattaaactgggttaaattgttgatcatctaagaatcctttctccctctctgtcctcacactttttcaaacacaattaacagttatggttaaagtacctatcgaaaaggcttacctggatgtggtgttggtaccaattgggcttcttataatgttcgtgtaccatctcattcttctatacagatacattaatcaacctctcgccacagtcttgggctatgagaatcgagacaagagaatttgggccgacaaagtcatgcaggtcagtacaaattaactcatagaatgttctttattaatatatatgcttaattttccttaattaccaaattttttcttatcctaggctgaaaataaaaccgaagtacaatccgctatagccgtagtggcatcgaacataactgcagccacgtacatgtctacactttctttggcactatgctcattgattggaacatgggtggtgaactcttcttcgaacaaactcatccccaacgaaatcatctacggcaacacaaaatcaacaatactttccataaagtatatatgcctcgtaacatgttttcttttggcattttccttctttgttcaatcagctagacacttcgttcatgccaactacctaatcagcacgcccggacagggcatgcacttgaggaataaggtgggagccgcggtcactagaggcggcgagttctggtcaattggtcttagggctttgtatgttgctctcagtttgttgttgtggtttttcggcccaattcccatggttgtttcttctcttcttttggttgtaatgttgtatcatcacgactttaaaaaagtaaatgatgatgaaaaggaatggtgcgaatagattcatatatgttagaaattttattacaatccaaagattattataatttacattggtaacttttgttattagtttaagagattaagtttggacacatgcttgttctcaatttttgaattcttttgtaacaacaatttcttctaaatgaattttgcatttctttgacaaaaatcataatttataatataacataagacgaggaataaaataagagattaattaaataaattacaatagtatttctacaataaatatatacaattatatatacatatatataattatcaaatataaa

SEQ ID NO: 308773 - DNA, 1678 bp, Cannabis indica
gtggccaagtgggctttttcccatcaaaggtttggtactttgcctccgacctccttgcccgacaatattttttataatgaccgacaggtctaactgatttatgctaatatattgcacgcttttcttaaaaaaaaatgtctatggccacgtaagggaaatatttattgattaagaatttatgactatcgatatttttagttttagattattggatactaataaatatagttccgcttcgcgcggttatataatagtaaatataaattttggttatgtattttaaaattattggtcgttctctctatttagttaaactataatttgcgtatagtgttttgcaaaataaagtataatgatacactaaatctaattgtaatcaaatatttttactctaacatcaaaactttctcttcctaaccctcaataaagattgtgatctgatttgtgatctaattacactaaatcgatccaattacactgaatcagtcaaatccaattcaattacaaaatattagacataacagttacaatctatgtgaattgaaagtgagtagttgtattttaatccactaggatcctagatacccttttatttgcaagtgtcgggcgtcctattctgtgaaggtgataggcaaactcattatccgaggacattgggtaggagactgtactaacgtgcatttttctccttccccgtctagctcttttaagtaccttttctgagagttcctagtgcttcctacgaggtgcagtccacctgaaatcgttgctacatgtccgtaaactggtggtggagctagccctggaggatatgagttctggagccacgtacgatatagttatcgcagtcggagctagaggaggagggagtgttggaagctgcattcttgagaattgagggtgacctaccccctgcgaaagatttatggtaccctactgttcgggaataatcacctgtctgagatatatgatgggaattcgaactcattgcccaagatggcctactctaactagcatctcgatatctttcagatgcttgcaattattggtggaatgttaatctctctgtgatattcatacctttggttcgggtgtttcttgaaatttcccccgtgaggtgtccgtgggggttttctatgatggaccatattagaggtcgttttataaacattcttgcaagtgtccaccaagctggagtgaaacgatagttctcttagagcttggctaaacgggtttaaatggtgaagtacacatttcagtaattatattagtttactagaatatcatttacaagtagctaagaatttaaggataaaatacattaaagggtaaaacggtaaaattctccctactcgatgtaaattattaataaaggatcattgattattcagattgaaacaacttggtatagaacattctatataattaggagtgtgattccgaatctatagtgaagtcaagaagaattaataaaatgtaaattctagaattacttgttgggagcttgatgatataggttcatggtcctcatattagttgagataattttgtcttgttgactcaattaattaattttattaatcgattagaattctatgtcttatttatgaatttcactaagcaagggcttatttgagaagaaaaaaagaacttagggtttatttatttattaagagac

SEQ ID NO: 308774 - DNA, 2469 bp, Cannabis indica
tcccacagttcataaaattgattcagaatcagtttaatgttaccattaaagctcttaggtctgataatgccaaagagctacaattcaatgaatttttcagtgaacttgggatcattcattatcattcttgtgtccaaaggccacaacaaaattccgttgtggaaagaaaacatcagcatttactcaatgttgctagagcccttttatttcaatcctacatacctttggtttattggtaagagtgtgttgctactgcagcatacttgattaacagaacaccaacaccaaatttaaagaacaaaacaccttttgacatccttcacaataaacctcctacatatgagcatctcaaagcattcgggtgtctagcttatgcatctacattgagtcaaaatagatcaaagttttctcctaggtcagcaccttgcatttttttgggatatcccacagggatgaaagcttacaaattgcttgatttgaacactaataaagtttttaattccagggatgtttatttttatgagcacatcttcccttttgtgcatactggcagtgtttctcctagttatgaatcttttttttttgctattcccagtaccaatactgaacccgattcatcttcctcactgaattcatctcctattcctcaaaatactaaacctgattcatctattcctcataccagaacagggagacaacttactaagccatcatatctgaatgactaccattgttatttggccactcacccttctgttttttcttcacagggttctcaagttacatctcaccctttgtctgaagttattgcttatcacaggttatcaccgagattcagagctactgtgctcactatttctagccttttttagcctgaatttttcagtcaagctcatggtatacctgaatgggacaatgccatggacaatgagattgatgctcttgaaaagaatcatacatggattgtggttactttacccgaggatcaacatgttattgggtgcaaatgggtgtataaaattaaactcaatgctgatgggagtgttgaaagatttaaggcaagacttgttgccaaaggttataatcagcaagagggggtggattatactgacacatttgcaccagtcaccaaattggttactgtcaaattagttttggctttggctgccatgaaaggatggcatttacatcaacttgatgtaaataatgcctttctacatggtgacttacatgaagaagtgtatatgtctctacctcaagggtatagacctaagggggagttgccacccaacccagtttgcaagttgcaaaagtcattatatggacttaagcaagcctcaagacaatggtttgctaagttctctagtgttctcacagaagaaggcttccatcactctgctaccgaccattctctattcattaagcactttgatggagtcttcatcttcctcttagtatatgtggatgacattatattggctagcaatgatctgcaacaacttgaagccttgaaagtcagattgaatgaccgatttaaattgaaagacttgggcaagctcaagtactttttggggttagaaattgctagatcaaataaaggaatactttgtttctcaaagaccatatgcacttcaactccttgaagatcttggttttttgggcagcaagcctatgagcacaccgatggatggaaatttaaagcttgggcaagatgagaaggaaaatttggctgatcctacaatatacagaagaattgttggcaaattgcagtatttgaccattactaggccagacatttcgtactctgtaaataagctaagccaatttctatctacacctcgggttacacacctaaatgctgcacaaagggttcttcaatatgtcaagaacaatcctggacagggactgttttatgcaacagatacagaggtaaaaatccatgcttacactgactctgattgggcggcttgccctgatacaaggaggtctaccacaggattttgcatttttattggttcctcaataatctcatggaaaagcaagaagcaacacacaatttccagatcctctgctgaggcagagtacagagcgatggccaataccacatgtgaagttgtgtggatcttgtctattctaaaggagctaagaattgaacatcaagaccctgcttttctctactgtgacaacaaatcggctcaatacattgttgcaaatcctgtgtttcatgagagaacaaaacatatcgagattgattgtcacttggttagggaaaaggttcaacaaggaatcatcaaaacagtacatgtttcatcaaaggatcaactagctgatattctaactaaccattgtttgctaatcaattcaatgtctttaaagcaagatgggcttaaaagatatatatagcccatcttgagggggtgtatcaagagattagtagttagttagaagtagttagttggttggttagtg

SEQ ID NO: 308775 - DNA, 1186 bp, Cannabis indica
ttttcatttaatcttcttcgaagatcatttgtaaatattgtcgtctgaaactagttatacttcatcaacatcatcgctttgactattagtcatttcaacgattcttcaaatgtcacctaaaatgtgagtttgttaattaatgattgaaagtcaaattatattttcaccacctaaaagtctaatatgtatatctacaactactttcaagtctctttatgtagtttcaatttattgatgttaatttctctctctttctttttaattcaacaatatagtagaaattaaaaagaagtcacacttttagaaattctcgtgtttggctccctctcctgccaaaatcttcataaatttaaccttatccatcaacatacttcatgttagaataataataataataataataaatttattattttagtcgcacttgaataaagaaatcaagatgttaaaaaaaaaataataataaagaaatcaagatttaaggcaacagtaatttttctatttatagacagttgaagacagtcaataaactaaaacaaaaatcacatgattataatgttctttgtcgataaagggatgcaaattttacaaacttattttgcagaagaagtttatgtattattatacttaatacattgttctataattaatgtatctttttaaagggattctttcggtaatttttaaaattttttagtccaaattttgtatagtgatccttatttaagaatttttatgatcgttcacgttgtagttatttaagatattttgtaaaattttaagatatttaaaaaatttaacacgccaaaaataaagctctcaaatagtgtgttacatacgaaattcttttattttatactcgtgtgaaataaattgtttgaactatattttcgacatgttaagtttttttaaaatttatcaaaattttaccagatgtcctatataattacaaagtagactaccatgaaaaaaattaaactaaaaaattcttccagatactaaaatagataagaggtgcaacaatagaactcttttagggctgcaaaatttttctatattttttaataaatttatgaaataatctaccattcactcctttaaaagagatgtagtgatgtgccctgatctattttggtatttgaaataatattttagtcaatttttttcttatggtcgtgtacgttat

SEQ ID NO: 308776 - DNA, 2030 bp, Cannabis indica
accgtataagattaatacaatccaaaaaataagaccaagaggagaaagaatttggctcttgctattgatagcattaaccaacacaagacaatctgactccataatcaccgctctaggacaaaagtcctcagcaatcctgccttcttcctagcttgatttaacccaactcaaagcctctttcattgacaacgcctcagcaacaacatgatcaatttcacctcaaagtttgacagcagcagcagcagcaaaacacaacccagcatgatctctagcaatccaattgaacaaagctctggggccacatggtgcctttggagtggtgtaaaagttgctacttaacagcattgcatgcatgcctactgaccaatccaaatatgttaaagtaggtagcaagcactattagaaataaatataatgtccatccaaatgagttgtataattgaccgatttaacacatcatatatattccagcccatactcatacatactaatgctccacataattactctactctcagtgctctttactttttacacctaattgatttataaagatgttctttttacgtagtaaaattaaaaagcagggtgatgatgcaatgtgcatgatttggacttccatgatttatagtgtattattacttttcccacatgcattgatttgcagtactactcattaattgcatgcatgtttaatttattaattaattactcaaatttcattccaatattttgtatatataaatacatgtgaagagtgttttactcacaagaagtagtaagataaatatgaagaatcccattcccatatctattaataataatgatattgatattgatcttgataaacttcctaaaaccaaaggatggttaggctcttctgttctttctctttaccaaggttattggtgtccttctagaataattccaaacatcaagctcttccaaacacactttcaacctcaaagccaagacatcattttagcatcatctccaaaatcaggcacaacatggctcaaagctctcctcttctccattgccaaccgctctcgctacaccctttcaaacactcccttactcacttccaatccacatcaactcctaccctttctcgagttcaatctctatgccgaggccaaggcccctcatgaccttggccccgatgctccagtcaccacaccgcgcctcttctccacacaccttccccacatattgttgcccgagtcggtcatcaagagttcagaatgtcgtattgtctacatttgtagaaaccctctcgacacgattgtctcattctggcatttcgccactagagatcgtgtcgagagccagtcacaatggatgataaaggactatgtggacaagttttgtctaggcgaacaagggtttgggcccttttgggatcatgtgttgggatattggaaggagagtttggagaagccggaaaaagtattgtttttaaagtacgaagatttgaaggaagatattgaagttcatgtgaagaagattggtgagttcatagggtgtcctttttctgaggaggaagagaagaaaggggttattggtgaaatatcacagctttgtagtttgaagaatttgagtgatttagaagtgaacaaaagtggcaagttcatgccaaattttgacaacaaaagttactttcgaaaaggacaagttggagattgggttaaccatcttagtccctccatggcacaacacattattgaaattattgacaaaaagcttggtggttctggcttagaatttatatattaactgtgatttgaatgaaacatcaaaaatcttggtgatttttatttaattagttactgttattagctttgttgtattgggaagacttattaatgtttttaatgcttttggctttgctttttattatgctgaatttgagtgtattatttattgtgtgtcacttgtacttttgttttgtgttaaggtgttgatggtgtttggttttgtgtaatgaaataataatagtaatagtaatgtaataattaataagaattgat

SEQ ID NO: 308777 - DNA, 1549 bp, Cannabis indica
taaaatactgtaaaaatatatatgaaaaagtgtaatttttttttttaccaaatatagaaatttatgtaaatttttctttataataaatgctgtcaagagaggttgcgggattagtcggttgcagtagattctataggctaccgaccaatcccgcagtactcacttggattgtgagacttgctcggtttagcgctctacaaacttttttaattcggttttgcccccttggtatttttgcaatttgttctttaaaagttaacaaaaatgcaaacttgtcaaatgactaaatagcaatcaaaattggaatgttttttaataaaacataaaatagctacaaagatatgaatatttcccaaaaagaaacttttgtataaatgattcttgattttttttctcccttttgggtaatatttactcttaaacaatattaaattatccttaaaaaaagtattaaaatgtaacttaaatgattaccccccaaaaaaacttagtaactaaattgttgttatttttatttatattttgctcaaatcatgagccacatgacatattattataaattaaaaagtcatgcagagaatcttatttaagatgtacattatataatttttattatttatagaaaaataaaaataaaaataggagcatcttttattcacatgctcataaagttcctcttacaattcatttttttaagaatatattttgccctttgtgtttattttattttccctcttaaaaatttatttgctacttgtacatttagatatattttaagttaaattattgaattaccaagctactgtatttctatttttctgtatttctttttagaaaatttgaaaatctatatttgcccctcttaatttattttttttttataacattttacaaaattttctgtggtataagttcatctaaataaaaaagtactgcaaacgttatttttagaaagttgttcactcacggttgccagtcctggaaggagttatgtggaatgacagtcgaatccagaagggtgttctcggatgactatcatgtccacttcgtgttcaattttcagaatagctagcccttccctggaaatgagttctaactggttagttgtcactcttgggatggtagattcggatagtcaactccagcagaccatatcctatctgaaagtgtcatatgcgagtatccttggtccctaagtctaaaagctcatatatgtttccggaagctctgatacttaagctaacatagagacttcgttcaaagaggaattggttaagttagtttaagttagttatttctaactaacttaacaatctcgtttcttgtagccaccgactttaggattttaatcataaacctataaatattttcatgattttataattttatttatagaaaataagatcttttaatgtatttttatgttatagtcttattgatttgttattgattatttgttatttttatgttattttttgttgttgttttaatgttatttttctattacttttatgtaattttttttttatttttattaaaatactataaa

SEQ ID NO: 308778 - DNA, 1278 bp, Cannabis indica
ttttttttttttttggttttactagagaagacaaaaatttatgaaccttttttcttactaacattataattattaacaagcacaattatggtaactggagctatagtgatagctagctggttatatagaagtggttactctttcagaatgcagaggtaactgatgtaagtttcagacatgaccttgctgtaatatgccagtaaaatgtctgtgggttgaggtaggtgttctactataaatgaaaaagggtcgtctaatgtaattcaagagcccaaaactgtttgcaggttgagataggtgtttcaacaaatgaggttatttatacttttttattttatttttcaaaagggtcgtctaatatctcacaaagcatgtactttatatctctatttttttcgaaacttacatttttttttaacttgaaatcgaatttaacagaaaaccaattctttgtgtagacacaggattagagattcaagtactatagaagacacggatccaagaaaaataaaacacgcatacaagttacataccttttcaagcatgcgttcaagacgctgaatttctttcgtggcataatcagcacctttctccagactgcttttggcagctttcaagtagatcttaccatacctgatgaggaaaaaagtagcaggcaaaatgtaagaacttccacattaaagaatagatattttccgtagtgtagtgccaaacgggcatagatcaagtagtttcaattcacaagtggttgcattaaccttgcggaggaacccttaagctgctcaacttcctcctctatctttgcgaggattgccttcttctcatcattgctggctttcacaaattccttcaccttgttctccaaagattcaactataccagcctacataaaaaaaacgtagcaacaaagaaacaaataagataaaatataaatgaattagtatcttaatgattccatatattgcttactgactttggaagtaagtttgcccttttccatctctactagtaccacatttctcgttaataaaggttcaaaatcatctacatctctgccaccgtcataatcttcgccagccttgttgccttttggggaaaaatttcaatgttggaaacccacttattccgtacctgcataatacaacatgtttacatcaggcaacttctcttttgcaaatgttgacagagtgcattcttttttactcatttaagatactaaatatgaattttgatagaagattatacaacagactgctacctataaactaataaacatat

SEQ ID NO: 308779 - DNA, 1037 bp, Cannabis indica
atcccaaaagactaggtgtgtacatatataagaaaattaagctcaaaataatatacatctatacaaatcaataaatataaataaattaagaattaattggtgggtgtgggtcatacggcgcgtccttcgcctctaaatatgtttatagcgatagggacagatgtaaaaaatttgattttgatgtaagaaatgcaatggaaagaggggctgaatgagaggtcatcatgggacccattgacgtgaaaaaagcaaacttgcacatatacaaattttggaaaagtcatacatattctataaacacattattctttttcttttaataactaatctatgcttatttgaactaacaaataaaattgggcgattatttgaactaataaataaaaattgggtgctttttgattcactaagattacatcaaatctcttcttttttatctttcttcaacattggttggtataataataattaagaagcattagtattatcttttagctaaacctaaattttcaaacattttacagtgactaaagcgggccatgtcaaaaacacgtggctgattaattattaatatttttttatgaaaggacaacatgaaacaataaaataaatgagttttagacaaaagaatgtgcacgcaatataaataacgtataaataactctacaaagccaaaaactaaacatttgaaagatcataaatacaaatgttaaaggtcgacacttatataatttaatatgataactgttatattattttataatatagtaaatatagattaaaatgttgtaatatatattattatgtgaataatatatattaagtgtttagtaaataaattgtgtaatatataatttatttaacctaaaattgtaaactacactttgtaatatggagaagagttacaagattaattatttttgtaacttcttttggttgatcatattttgtataataaaagagatgttacacaattgatgatggaattcaaatgttataaaatatagttgttacaaactatggtggcgtttggtaac

SEQ ID NO: 308780 - DNA, 2373 bp, Cannabis indica
tttactagtaatctcgattagggatttaaggtttcataagtttattgggtaacgtgcctaattatttagggcgttgcacatgttgtcacaccaaattgttggaggttgaggcacttgaatcccacgttcagagaacaaatagtgtaaccaagtaaattcagcaataacataggaaattaaatttgagacaaagaatataacaaaactagtggtgcttctcctgtcatttggatcagaggcctagttatcatcacaatatgcagttaggtcatatgacagtggcttagtgagatgaagacccatctccaaagtgccttttatgtaccttaggatttgtttgatagccatccaatgagtagtaagatgtttttgcatgaattgacaaactttgttgacattaaatgacaactcaggtcttgcaatggtgagatattgtagggctccaacaatccatcaatacatctgaacatcttctacaggatccccctgttgagctgacagacgaagtccacttgtcataggagtaggagaaaactttgcagcagtcatgtgagctttttctaggtggtctctagcatattttgcttggcataagagcaagccatcatctattttgtggacttcagttcccagaaaaaagttgagagtacccaaatctttaagagagaattgagtgtgaagagaagaaatcagctgagtgacaacctgagaatcacttcctgtgataagaatgtcttcgacatatattaggacaaggatggtcgattggggagtatgtttgatgaagagaaagtgatcagattttgatgatgtaaagcaaagtgaagcaagactatggtggagcttttcaaaccatgctctgagtgcctgtttgaggccataaaaagccttattcagctagcaaaccagatgagtttggctaggaatttcaaaacctggtggttgtatcatgtaaacttcctctcgtaagtccccatttaagaatgcgttgttaacatcaagttgccttattgtccaaccctttgacaaagcaagaaccaagaccaacctaatggtaactggtttgaccactggactgaatgtttcagtgaagtcaaatccagcctatggatgaaatcctttagcaacaagtcgtgcgttgtgcttgtacattgtgccatcaaaattttcttttattctgtaaacccatttgcagtcaatggttgttctccctacaagaagcctgacaagaacataagttttatatctcactaatccaagaatctcatcactcatagctttgttccattgttcttgaagaagagcttcttgaacattggttggtgttttggaaaccagtaaagcttttggtttatggattctagacttggatctggttttcatatggtgattgttgcttttaccaggagcattagaacaccctgtgacttgagaagacggggaaaggatgacatcaacagtttgagtgacaactgcagcagtagttacaggggtgatggcaacttcactagtaggaggaggtgaaatatcatgagtaataggttgtggagcatgaggaggggacctaattagagaaccaataactggtgagggaggttgatgtggttgctctttagattctgctccctgtcttgatgattcacttgtagcaaaaatagaaggttggctaggaagccaattgttagtagcacaagtaagcacattggtgttatgtacacttttatctattaaaacatgttcatcaatcctttggttggaaccagtgggactgggatccatggttagataaggtgtaagactgtctgtaatgagaacattttgaaattaaaaagattatgaaaaaacaaaacaaaacagaaaatttgttatagaaaattattaaaaaagattaactaaagttataagggttaacaaacataactaattttagtaggaaaataaaaaattaattaattcaatatctttatttaaaaaataaaataaaataaaaattaaggggagcatgacagttgcatgtggttcagttcagctactattacacaacattttgctaagattttctgttcggtttaattaataagcaaaattcatactttttttattcacttattcacgtatacatctcataaacaaccatttgacttggagtgtgtccaattagtacatcactagctaaatgagtagatctccatttgattataaaaagaaatgaaaataaacttgagtagatctccattctataaaatttatgctttactaaccatacataatgaatagtagtttaatcatagagatataaaatatatttattaattaaggtgacgtttggtaacacttttatttttcaattttaaaaatagaaaaatgaaagta

SEQ ID NO: 308781 - DNA, 2753 bp, Cannabis indica
atatatataatatataaatatttattgtcatggatcaattagttcaataattgactaacacatccaatgaagataaaagaatgtacttatatatatatatacatgatcatcatattaataaagccattacgtatatatatacacgagagagagtggacattcttaaagaatattcttcaattatatatttcttctaataactaaagcagtattatttataatattaattatttagttaataggatcatatataatatagctaatagtactcgatgtattgatcgatcaatcaagaattagagaatattcatccgaatattactatcttaatagtagaaattaaaaacaatgataacctttggaaatataataataaattcatcccactcatcgattatttttttgactatgaacttaaagctatatatgtgtcttgctttcctttggtttttaatatcatcaataatttccttcatataaatctcacttccttaatttgtcaatatattaaactaataggtaggtcttataattaaagaaacaaaaatgttatattattataattataattaatatgtcacattcatccttttaagtacattctttattttccaaaaaataattaagttggaattttcctgcccaacttctcttcggaagaaaatcaaaagaaagaaagtttttgtttgtattttaattttggtgcatagacttttgtccaagtaattaaaaacagagacaataaaaagagtattttatcgttccttctattaattcaaagaaaaaaataaaattaagccaccaaagtcacattgatctttctctcatgactactttcaattagtagttaattaattaattaacctccaaatggttaattagtatgtactatacaggcccttaattgatcaatgttgaagacaaattatgggctacatcatatcgtatctacttaatttcactataattaaaaggaaaactagttaggtttgaaattgtcttttataaaaactaattaattaatttaattaattatggaataataatattggtactgaatagttattctgtagttacagaatatatctctgcaactgcaacataaatcaaaaaataaatagtacagaaaaataaaaacacacaagaggtttttatacgtgatgtcaacaatccttgtagattattactattccacaagaccatgtccagaaataaaattcattagataggtctcaaaaatacaaaataattgacttatgcataaatattctcactctcattgtatactacaagcttgatgtattctaccttctaactgaatcttgctaaaactttaagtgctcgaactcccttcgatctccttgaagagtgattacttcctatcgaggcaagacttgtagaactttctgttgaaggtagcactattctttttctttttttgtagacttgattgcagactcaacacaatttaacaaaacatcactagatcaagttattattgaactttattttgataagaaattattttattgtactattttgtaccattttaaaaaatgtaaggtctaatttattatttaacaaaacatatggtccaattaataacttttacaaaagaaatagtccaaaatagtactatttaccctaaaattttccttcattaacttgataatatgtcaccatatttgtaacacaatatattataggattaaaagttgaggcaagatttttgttgaccaattccattctgttcataacaattttgtgagaattttcatttttatggtttttaaggtataaatttacaaaaatgtgattttttttcaaaaaaaaaaattatcttatgggaaaaattacaaaaaaaaggttaaaaatatctagaaaacaattttacccctcactgtttttcagggtttaggacccactcattttaatggcccaaataaaaaaatactttttaaaaaatatatatatatttttaattattttttaaaaatattatttatctttatagtaagtggtccaaaaaaatagttcttatttcaactcagggtcggccctgctatttttctcaaatttttgtgagagaattgacttttttttttatttgaagaaagccatatttttgtaatttcttgtaaataatgttatagatagatatgaagatccaattaggttgtgatatatattatctcagtatcttctttggtgggcttaggtgataaaagcccgaacgtgcatgtggcccacccaacactgttcagtgacttgtaaatcatatttgaagtgttttgtgtgtatattttccaaattaataagttaaatgttaatatcgttttgctagtgttattcatataaaatgctgcctggtcggccggccggcatatatataaatatatataatataatttgtatttttttatcatataattagaaacaaaacaaacatgtaataagtaattatcaagttaaggacatatatacttatatatagttttagataattaatatgaattaagttggagtatgtatatgcatgcaggccaggccagccaaattaatctcgaagctagctaatattacttgtcttatattctgaatttaattaaatttgggaataataaagaaagaaataaaaaacatatatatatatatatatactagatagagttacgtggcgtcccacgtaaatattagttttatataagttctagtgatttttgtttaagaatttagtaactaagcaacgacaa

SEQ ID NO: 308782 - DNA, 1035 bp, Cannabis indica
ttttataaaaaaaatggcaaaagttagtataccatgtaaatttcccaataataaaggtgtgctttgctatcccattaataattctagaacaatacaccaatgaaacattatcaaaagcacaactaaattcttacgcctaaaaaaagaaaaatcttacaaccaaactgaggatgctcactaaaacaaaaaataattgacattgcttgcccaacattagagagaaagtggtttgcaagaaccaagtagcagatgccaaaatgccaccatgacagtcacaaaccaccaaaccctaccccacttgtgctcttctgatattcaaagcagcaaccacattgactttgataatgccagcactgggtttgaaccactcggtcatttagataaattacatttggtgaaatagagcctaccacctcactagttattgttagagagtctcacattaataatgtgtgaaaactaaataccatacatacgatgtatgtgttactccttttgttgtcaattggttttgaaatgaacttcatgtaccttaccaaactaaactctaaagggtattcaatctaaatccaaaaatattgtccaaataatgaaccaaaagagtcgtcgagtcacttgtaatctgcaaaatttgtgagcaaaaaagataattaccatcttgaaagaatgttagagagtctatcttaacaaactctaacaatcatagttctcacattcgcaccttgataagcatccaaaaaacaaagagcccaagtaacaataaactatgtggttagcatagagttatggtgaactaaatggttccagtgaaaataatttcatatgaccataagagcgtgttccaaattcggatgagagaaccgctcaaataattcaacaaggaaactataattcaaatttacacgaaataaacgagttttgatttttttttcttaaatgaatatttttagatagagatgttcataaaatagttgatcaaattcaatccaatctgtaaagtgcggattgaattggattggaaaattcaaaatctgc

SEQ ID NO: 308783 - DNA, 1305 bp, Cannabis indica
atccagggcactaatattgatttatcatgtcttatgtgtggggcctatggacatgtggccaactctcgatttgccacgtgtttttggtaaaaaaaaaatacgaacaacatttatccctaagttctaacttgcaattttgtaagttgggacttactattattttgaattttcaatttccttccggaggggttacaatatgacatcacggttatacaaagcacacatgtttttatgaacatgccacgtgccttgatggggatggttcaaagtcttgcatgctttttattcctcaattttagtgatgttgattcatttatgaaattaaatctcgagacatgcaataaatgttgggtgacaactgtataatcgagtactctacacgtcccctcataaatgtatttctctgcatccctccccaaccgttggaccaatatgtgttgattggaatttgaagggaattgtaggatcacaatagggccaagaccgagggttgaaggctataaataccacttgccatctccattttcacattttcactttcctgctattttctttagagcttcaaactggaaaaaccttcaagcaaaccaaattttcttctattgttccttcgacgttgctagacacagtactattatcacagtttgattgtgccatcctcgttgtctttacctcgaatttgtaagtatcgaagtttctttacaattgattttatcctctctttttttcttttattgaaagaacgctttaattctacgaacatatgtagagagtagagatttttcaaatgacttctatttttcaggtttttggtttatgtgccttagccattttgtgctttgaactgggaaaattcgcaatacacgttcttcttttcttgctatttaaatatgcatgtatatgcctagttttctttttccaggctcgtttattatgtttatatgaaaaactgccttttttccttcgcttttacgcttcgtgttcttatttttggaaaccgtgtgttcggcacccgataccttgtctatatatttcttggtcgctggtatctagatggggcctcttctcggtaattagaggatccaattcctatctttattttttgagtttagtatgggggctaattgatgggttttttttttcatgttcccatatgagcaaagcacttcgggaacttcacgcccacggattttactcctttgatcaagaaattctatctttatactcgaacgaaaaaacaaagtggtccacctaggaggcaagaagggttccaagcgaatggaaggggtgttgggttttatgccc

SEQ ID NO: 308784 - DNA, 1879 bp, Cannabis indica
ctacacataataaaaataaaaactaaaaatataactaatcacataacaataataataacctagtattaaatactcatcactagtgtggactgtggtgtgctatgttagttttaattggtaaaacaattgatataatttccgaattcaagagataacctttagatattattctcttgtgttttaaatattagatattagatatcatttctcattgaattcatgttctcctatgatttaactctaaaattaacattgtttatatataaaaaaaaaatagaaataacaagtgcctactgatttgatcgcgtgcattattattattaatatattttattgtcaaaagactcaaaacttgtgtaatttacccattcaaaaaaaaaaaaaacttaatgaaatttatcaaaatgaattactgaatttagacatatgcatcttaattcaatgcaaaaaatgcatcaaaaaacattgaatatgaatgtaccaaattaattttcaataataaaaaatcagattctttcactgattaactttttcactatttatagagtgaatcagatcttatgcatgttatataaaaaaaaaaaattggagaggaagattgtacgtattgtaacttgtttgagatgctacaaaaaagtgttaaaaggtcctaatccaaacaatattcgtgaatcatgaattgaagggcatttttcactgattcaaaacaattgtgggccttacatatgcacatataacaaatttcttccccgagtgaagagggttgagaattttagggaggtaaataataaataaacaatacttaaaggactaaactgcaaaacaaagaaaaaaagcactccaattctaagagagagaaagagacgttggttaattaggtgctattttaatgccggcctttctttctttctttctctttcatctctttaaaagtgtccttgtttctttctcactgaacggtataatccatactatatatacacacatataatacactcttattcatatatcaacttcttgactccatctatctctcttttcatttctgtttcagaaacattattagaaacccgttttcatatttcggaatctgatttctgttaaaccagaatccttgaatctcggtcattcgtttctacaaagttgttaacttttattatttaagattagattggagaagtttttggttttcttcttctgtgtgggatttttctccttttagcaaaaaaatggtggtgaggatgatgaaatggccgccatggccaccggttgtttggtccaagaaatttgaagtagtggtgtcgtttcgccggattgaagggcttgatttggtgaagttggatggcgaagagaaaagggtattcgttgaggttcaatggaagggtcaaaagggtacggctttggggtctctgaggcgctcaacgaagaagaatttgagtaaagaaagctctgttagtgacaatggagtcgtggaatttgatgaagaatttcggtctgtctgtaacttttcgggtcctaaagagggtgcgtttcatccatgggagctcgcattaactctcttcaacgtgagtccctatattgaaaatcatacaatacatgacatatttttgttttatttgatttttcaacatatacgcgtgagtgattgaatttttatcttttttttttcactaagctactgggttttctgatatgatctttctgatttattgcccatatatgattgttcttattatctatttttcgtctgatatagtcatgatattagctatggatgatgagatgtcttttgtttttttcttttttttttttctattagaaaattttgagcagggtagctttgggttacatatcaagatgattagagatatggttggaa

SEQ ID NO: 308785 - DNA, 3038 bp, Cannabis indica
aaataatttccaacaacaacttcctcccttctacttcattaaaagcatacacaaatgtaacttgaaaaccaaacttaccatctaaagtagccacttgtaaatgaataagctcgctggtacatttgaggatgttcaccgaaaagctaaaaggattccatgccacaatgattcgacctccttcatgccacactatattcggagtaaaacaccaccctctgaacatgttaacatataaggccccaagcttcgggaccttaactctcatctcgaggagaccaacaagcccaattttatgaacatgtatcatgttctttacttgattttgcttgtataggtcattaatccctcggacgttccagcagacaatcttatccttctccgaggaggaactccccctcctcttgtcttgtcaattgtatgaattctgtgagatccaatagagattgcacctgctctaattgtaacctctataccttcctctgaaacacaagccaaagcattgtaagagttatctaattgagtctcagcaactaccacattttctctagttttaccacccttattgacttgttggaaaccatctttatccactgcaacattattcatagcaaattccacttctttatcccctgcaacattattcacagcagtttccacattagttttagttccttaatcacccattgttgctctttccctgccttcttcttgcaatcagcagtagaaagcccaagtccatggcaatggtgacaaaatattggtttccattcataagtaatggaagaaaatacatcataaccatgctcatcttcaaatagtatacgatctggaaactcttgctgaatagcaacttcaataagaaccctcagatagctcaacttgtttctttctttagtcattgcatcaacctgaaggggtgtgcccagctgcccaacaatcttaaaaagagatttctcaccccagtaattcaattcaagatcaggtaattgaatccaaattggcactgatctgatatcttcctttttaaaattaactttagggtcccaagccttcatcacaacaggtcgattattgaaaaacacatatcctccattaagtatttcatcccttatctcaactgtatcaaactgaactaggaagaccccataggacagagatccaaccttatcaactttccctttccatactctcctaatgaatccatcaatcacagataacgggggattggaaccaagaacataacaaacaatagaggaactccaataatgaacctcatcctcaatatcctctagagttattttaaccttgctagaattaccagaattcttaaatgtactttctaaattcctcactacgttaccagatcgaaggattggaggagtgataggattaccttgaactacacttgcagcacagcttcgattcgcctgaaggaagtaatcaaagtccttgttgatatcttcttgtctcttgatagcttatagtgataatttaggtaataatggagcctgaaacagatcaacatctactcgcactttctctgtattgtcatccccttcttccttagaaaaaacgattggttcaacaccaataatcgaatcaagtgtcttcatcttacgaacgtcaacagtagaggttggccctcgttttttaggtttcttaatctctgattttaatttcccctgcctccccctagtcttcgccatagcaccaacccaggagagctgcacaagagaggaagggaaaaattttcacgggattttcattaaataatcagtttcatataacttagaatatgtagatctttcgattaagatagttaaatatatttgtatgattattaagttagttgcttaatattacaaaaaaaatttatattaactcaaccatattactagattaactattgtagttgtctataaaagtttcatgcagggtaaaccattcgaccaacgtcaattttagggccacttcgcatatgccgcccaaggtaaatgcaatagagaaagtcgacactttcctcctatatttatcaattaaatccgtattttcaagggattttcacacgtgaatactgtaacttaggaatgtaactagtttttctttttatttcttttggaaaacctaattaatgtaattcttccctataaatagttgaaccatttaactatttattgatccaaaatcaataattcaatagagcacttacgctgctaaaatttttgtaaaagctttcgagagagatcaaaaacttcttgtttcttttctcataagttaatataagtaaaaggggagtaggctattaccactatcataggaccgaacctctataacaaatttgtgttcttattacttaattatcatttattatctctaatcctttaattgactcaacgttgttggctaaaagtgaggtcaacacctatagttttaggcatcagtttaaaactaacaataattccagctactattgtcgtcagttttcgatggtcggtaacatttgttaccgactaaatgttaccgactttttttttttccactgatgcctattgcacccagttttgcatcagtggcataggcgtcagttttaagacccaacaacaataccttacccatttattttaagcagttgggaagagtctttttttttagtagtgacaccaacaatacacatttgatccaaacttattcttatcttctctagtgcacttgcaattctctctatgatttcacattgtatttcatgtttttagaaagattttgctttgtatttcaaaacacatattcaaaactactcggttgtaggtgaggttgacattgcttttgtaaacaacctgagtagagtcagattgtcacttcaacaatttgatagtaagattgtcactacaacaattcagttgaaaggtgaagttggcacctatgggaaaaataactcggttagctaatgagattagcacttcaacaatccattgaggttaatatttcttggtagggttgtatataaacttttgtaaaccgcccaaaccaaaccgagataa

SEQ ID NO: 308786 - DNA, 1327 bp, Cannabis indica
taaaatatttccaacaaaaactgccctagtgatttagtaaactaggatggtgggacagggggacagtactccgacgacagttggtccacagtggatcttagaaggcatttggacaccaaatacgagaaagctaaaagtgagaagacgaagacatgtggtaatgaccttaaaaatcacatgaataacaaagtttgtggaagagatatcccggatagtgacacaaagagcttggaagaacaaattgatgcggtgacaaaattagtccagaaacaaagtgggcccttaccaactctaaggatgaggacccagagccccgtgtaaggaggatcgcaaaagctccactcccgaagaacttcaaaatgccccaaattgagatgtaggatgggcgtactgatcctaaaactcatttagcaaagtataacaaaatgatgcaggtggcaagagccagcgagcacgccaactgtttgtgcttctccctaacccttaccaaatctattgaagattggtggaaaagactgactcccaaatcaatcctctagtggaaagagttacattctccttgtgactatgacttagaaatgggctccatcaccaacataaagaaacatgcaggagaaagcctaaagagtttcatttactgaggcggtaatcaagactatgtgaccgacaacatgaaaatggtggctctacaatctggacttgcagtcggctctctagagaaatgcaaagaagaagggttgaaacgttgtccgaattcatggctaaggcacaaggctttatcagtttggaagatgcttatcaacaagagttcaaagttcctccgacaccagctcttgttgcttcctctcccggatttacctcaccagcttctattcttgaaacacagtacacccttatagtctatggaccatctgcatttgtataagcacccactcaaacctatctgggtatggagcggcatagaccagatgcagtattgctcccaaacaattaaaagcagaagttccattgcataacataagtcattcccagaataaaaagggaggaaaaggtcctggacctcagtagatatcttcactagaccccaaattttatattagaatattgaatgaaaatacataactatttgtaggaacaccgtcgctttatcgacactaccaaattcaatttatcaacgaaaaaatagacaatctaattatatgcggatccggctataatgaaaagtgtaaaatacaaaaattacactattgtctctgtcgaagcaaaggaagattaaaatccacccatgagtatcattagttttcttatctacaatttttagacagat

SEQ ID NO: 308787 - DNA, 1010 bp, Cannabis indica
tcgggtcataattaccaaaatgcccctggctcatcaacggggttttaacatgttaaatttcatataatttcacatatatgaaactatatgataatataattcctcaattaaatcataattatctaataagggttttgctaatccttttcttaattctgggtattacacttcttattttaaattgtactggcaccacactgaaaagatcttctatctttcagatgagcgatttattggacaaccaaaggtgtgagtctagagatggggcttttgcaaatgaatctgaaaaaggtgctagcttcattcccacatctttatgggaggacaaaattcttgcgagaagagcccaagaaggctcgctatccactggcaaaataggtcacatggttcaagagttagaatgaccaccagtcaccatagaggtgcagggaagtaaatccatggtgtttcctcaggggagttttatttatccatgagctgctcacgatgctgaagtcaaggagatgggtgaagacttcaagttgcctacctgccgggttgaaggtgatgatggcgaggagagcgaatcagactcagtagaaaattcccctctagacgagccattttcttgcgaagacttagtctcgcgggtagaaagtctgatctaacaacatttgaaagattgagtttaataaacacgactactcaaagcccatatcgatgcaacgtcctcatcttcctttcatcgatccccatatcatttctactcaaaacatggtggtctctattcccatcattcgttgcggtgtcactcttccctttcaccctttcataaaggcaatcttaacacattacgacatctctccgttctaacttacacctaatagctatcacataatccttgcgttttactcgatgtatatggaatacacgcaaggacaacccactgttaaggaatttagctatttttatgacataaaaaattttggccatgacaatggcttttattgttttagtaaatgttccaattt

SEQ ID NO: 308788 - DNA, 1259 bp, Cannabis indica
aaaattttattaaaaagtttttttttcttaatcaatattttagactctaacgctaaccttggccttgggacccgaacccagtactcggacccagacctcggactcaaactcggaccctggaccccgacttcgacctcaacccaaactctggaccctagaccccaaccttgaccctgacctggaacccgaccgcggacctggacccaagctccgaactccggcttcggactcgacttgaataaaacaacaaataaaaataaaaataaaatttacaaaacacacttttattttctatttttaaaattaaaaattaaaagaagtcatagaatatatttttatttttcaagaagaaaactttacttttatttttgtatttaaaaaatttaaaaacaaaaatgttaccaaacaacacgttaataatttgagtagttatgttacaaattttccttatttaataccaaacaaaaaattaaaatttgctttccagttactagaagaattagcatcaatcgttgtggatgatatatggaaggtccagaataataaggtacacaacaacaatttatttaacattcattattacattaatttaatttctcgttgttatacaaattaccatcactctattctgtcaccttcctctgctttttgtattggtggttggttctctttgcttgtgaattagatcaaggtcaactgttgatgtgattattggaagaacttctatgtgtggtgttgcagtggctaaggaccaccaaggtcgtactgtgtgggcgtcttcgcgtaggtttcttttctctaaatctctcttggctctagagtcaacagttgctaaggggttcaattttatcattgtggaaagccattcgaatattgataactacgtattaaattgtatcttgttatctaattctattttaacttgtaattttgctaagatctcaagaaatttaattattgttgagtaaactgctagcaaaataaaagaggaacgatattaccgaatgaagaattctgggttgagtcacggactaagtcgctctctttaagacgttcgcggcactgcccaggagtgtgcaagcagtcggaaattgccggtcgtccccaggataaaacagcccagtcgtagcactgtatcggaaccccactgcactgtagagcaccgtcgaatacacccaaaaaatttgatatcgcagatggaattttaattttatgaaaaactgtaatcgcattatataggcgaatggattgaataaaca

SEQ ID NO: 308789 - DNA, 2053 bp, Cannabis indica
tggaggctgactattgtggcttatcttctctaacatgacaagggatatgttgggggcaggatctcttagtttaaggtcttcatttgaaagttggtgatgacagcaacatcatgtgtggctcgaaccctttgattccactaaattctgaattttttctactatgatacattgattgtgatactaacaaagtctctgattagatcagaatggataaagagtgggatttatttaatttgcaatctaatttttcacctattaatattgagtacatcctatacattcctttcccattcatcatgctaaggatgaatggatttggtaccacaatgaaggatgatactcggtgcaattaggttattggtttgcatgttctttggccgaagaagcagaatctacatattcttcatcaatggaaacttggtgtaaatctttttggggtctagaactcctacaaaaagtaaaaaaatttccttggagagaaatctagaatgcactacaagtagcatctatgctttttcaaaagaaaactctcacttttgttgcttgtactttgtgctcaaatgcttgggaatatattggacatgccatgtttagttgtaagcatatcaaggaaatttggagatacacttattttgcattcaatctttaagatgctactatgatgaaagttggtgatttttttgttttatttgtccaaatcttacaccaaatctaagattgaaacaatttttggcactttgtggtttatttggtcggatgaaaacaattttattcatgggaaaaaggctcaaaaggcaccagaagtctatgcaaaagctattgcatatctgaagaattatcagcaacttgaacctcagctaccacctgtcgtaactcgctgggtttctggtgttccagatcacattccatggaagcctcctccacaaaattaccttaaaataaatatagatgctgctactgattcatcaaagaagaagattggttcgggagtcattatctgtgattcaaatggagcgattcaggttgctctatcaagaccaattgttggctattttcggccacaagaaatggaagccaaagttacgtttcatggtttgcattgggctagaatttaaatctgactttgaattttgtggagatttactctttaatccttgctaactccatcaatggttccactcatcatcgatcctcatttaaagatcttgttgtggacactcaaaatcaattatcctatctctctacaatttgtgtgtcccatgtgtgtcgtgcttcgtatcaagcagctcatgatttagctaaacaagctttagttttagacaatgattgtatttgcatagaagaaatatcttatagccttttctctgttgttgtaaatgacgctctttaatttataataaccgaaccttttcaaaaaaaaaaaaacaacgtatgtacttttctttacaaaaataatgttaattcataccaattttttaaaaaataacgtgtgaatatgttagtaccttatacgcaccctaaaaagcatttcaaaatcttgaatatatgtatatttacatttctcataaagtttagtcttatactatttttgcccccaaactattactactattttattgtgccccctaaaatttttaggttatcttaaatccccctcaactattacagtggctaatagatatttaaggtggcatattgggcactaaaatcatctctaatgggagaaatatttatagttgcaaaatacacacatcatgttgaaatattttttttttcattttctctcttatccacataagatttatcacattttcttaaaaaaaaaatactccaatagttgacaactttaaaagatgtccaccaaggccccacgtcacattaaattaataactttttaggttaaaaataactttctaataaaaaaaaaaaaaaaaaacaaaaaagagaaaaaaagtcatgtggccattgtttatattgagcaacacttcactataaaattgatcttaaaattagaccacattacatatgtggcaagaccactccaatgggcaac

SEQ ID NO: 308790 - DNA, 1714 bp, Cannabis indica
gaatttcttaaaattttgcaagatatattaaataactataatatacacgattatgaaaaaaataaactaaaaagttcttttggattctgaaaaagataggtgtatcgatgcacccattttaagagagtgcttctacattttatctttttgattttctcacatttttacattttaatttaattttatttttttttgttgggtacatttttaattttatcagatatataataaaatatactataattattaaaataaataaataaaataaaataaaatacaacatagttaaatcattagtattattgtcatgcttataatttgtagatataagtataatatgttataagcttaaatctatcaaattggaaaaaaaaaaatacctaatctataaatcaattacaattactacacaaatatagtaaataatataggataagtctaacgtacaccctcttagtattttggtaaaccttttatctttttcgacatacaaaaaaaaatttagtcgattttttttatgattatgtacattatagtgatttaagactacttgtaaattttcaaaacattacaattagtttacaatatcgaaaataagatttacatattttgttgcatgcacgattattttttcttataagcgtggtaagtagttgtttaaatctaattttcgacacggtaaactatttcaaattttttaaaaatttacaagtaatgctaatagttacaacgtacgcaatgccgaaacagataaaagatctacccaaacgatcttttaaggggtttactatagaaatttttaaatatatataatataatatagtagaatcgtataaattattcattaatttgtcttatttgtgattaattttttgccaacttgtagaaaaataaaaccaaaagagaacattagacaaataaaaaacacaaattttatgtagtttaggtgttaaagggtgttgtgcaagcacaactatggtagacaactttttctttcggtaacattttagcataggaaccaaaaatttaactttttacagtgagagtgagaccctatttaaaggcaagactcactcctaggccaaattaataaaagaacacaattaattaaatatagccttttaataggataatttttatgagaataatgagattaatctttaacaatcaacccaattagagtgttaggtgagcctcatatgatttgtcttctattgatatgatgcatgaataaactgctactttttgtataaaaccttaatcataaaataaataaaaatttaacaaaatgcgaaattgatactaacaagttttattaaaatgagcattgtttgtacattttatagacaatgtcttatgattggttagtgatatttttaaaatttattgtcaagttatatgagactcgatacttaattataccaataacagcatgacactgagaaaaatattaataacagtgtgacaccaaataatatcttttggcatttcttaaaataatatagcaatatttaggtatatattattatataggttgttagaattttagagttaaaattaaatattattaaagatattttgtaaattatatatgttgaccgagatttttggcaactaatataataataatatttaggaaagctgttagaagttaatgcgcgagatttttacttggttggggcattaatgagccttagtccacgagtctgtatat

SEQ ID NO: 308791 - DNA, 787 bp, Cannabis indica
ttattattaagtttaacagtggcaaaaatgaaacctaactaaaacgtgtaagtatatgacacaatcatattcccacatcaaaggggtcgtctctaaatttttcatcatatgtatcatagaaaatatattagccacaaacccaaacccaaacccagttctacaggtgttagaatctaaagggcggcttttggtgattacaatataaaaatatatataaatataaaataatgtatggaagaaggaggagttcaaatgtggagaaattattgaccaaacaaatgtaaaataaaccctaaatcgaccgtcacatcgtcatgatttggattcgatacatcgaagaatttgagttacttttttaccacgtcgtcaattatggccaatacaaaaacatttctttcttatcatggagtagattattggatcaaattattgtactttttagaatttgagtcatcattatttgattttcttttggccgggaatcttctcaattgaatcgtattgctacaaattatattcagattcaatatagtaaaaatgaatcctatataataacaaatattatataatatacatggtgacaagtaaatttggctacggatcatttaaatttcatatatacacgtcttagaattttcctagtttttgatttcttcttctttaaattaattgtgttacgtggcagcttaattaattaataactatgtttaataaattgaaaaattgtaagagttttagtaacaatacttttgatttttaattttttaattataaaaatataagtaaa

SEQ ID NO: 308792 - DNA, 988 bp, Cannabis indica
atattgttgctttttttttttttgttaaaactgataaaatccctaaattatattgtttatttgagggctttgaaaccctattttgttcatccacaagaagaagaactttctgctttttttttgggtcgtcttcatcctttttgaaatttttcttctctctcattcaagcacaatctattgcgatcactcatcacgtcagttcaccgttactaaaaatgaacataacaagacaaaatacctcaaatctaacattctcaaaaatttaaggagaattttttacgtcaaaaatagctcaaagggcaagacttggtatgtgtcaaagttcggaaggggggaggaaaattctaaattaacctaacacaaatcaaaatttaacatagtattctaaaaatatgatatacaccacaatttgataaaataagatgtatatacaatataatttatataaattactattctaagaccacaatgtagctcacacgtgcgctactaactagtatatatatatatacaatttttattttaaaatatatataaaaattaatatttatactatgtacaaagtttgtggtttttataattgctcaacattttgattgaattagtaattaataaaaattaattatgattatatactttatagaaataaatttgtgattgtacgattatttttaaaaaaaattacggtattttataatatattttttacttaaatcaagtgaaaaaattattataaattgtgatttgaagcaaattaaaatcatacataacattttactaatttataagggataatttatgtaactatcctttataaatttgagtaccacatcatgaaatagtggtttcgatggcttgaggaattatttcttaaatgtctatgtttcccttttcccaaacctttcttacatttatttttacacttcaaaataattttttttttaattatttttacggtaattctacatataaactcctattgcaacta

SEQ ID NO: 308793 - DNA, 4591 bp, Cannabis indica
ttctatccttttctcaccatatatttacaacacccacaccacaaaattaattttaatggaataaaaagaaagaaaaaaaataaagggggaagaaaatactttaaaaagttacccttaatatcaagaaggttaaactatataaaactatacatacttttgagcaaaatctcatagaatattgtacttgtgttatataatatgaattaccttgttactaatttggtctaaatgtagagttaaaaagggaaaattaaaaaattatgggactctactttgggggaaattgagctctactttggcaatattctcttctttgtactaatttgattagttcaacattgtcccattgtttaaagtacaagatgctcgaccaaagccatgctattgcttgttttgtttcagtgtctttgtctttatgatgcacttggaggtgctttcataaccactttatatgaccatctacattccttgtcctccactcctatttttccaattcatataaatataggctaattaggaatttttccctccgaactttttgacatgcactaaattatgccccctgaacttttaaggttgttagaaattccctatgaactattgagattgttagatttaagaacttttgtctaagtttagtaaaaaaattctaacatggatgaaagttcagggggcatgatttaatacatattaaagtttgaggggcataatttagtagatatcaaaatttggagagtatggtttagtacataaacaatcattgaaatagtaaaattgaatgaaattagacaaaagtccttaaatctaacaatcttaatagttcaaggggaatttttaacggtaaaaaaagttcagggagcatgatttagtacatgtcaaagttcggagggaaaaaatcataattagccataaatatattggtattttttaagtaggagtattatttttgtccctaatattaatattttttattatttgctagagaaattatatctcaattgtttttatacgatgttgtatattgtatttataacagtagcattgctagatatctcacttgtttttcgaaaaatttagaataaattacagtgttatattaatattttttattctttgctagagaaattatatctcaattatttttatacgatgttgtatattgtatttataacagtagcattgctagatatctcacttgttttacagtgttgaaaataaaattcaaaataatcagatacacgtaacacgtgtatgagaaaaaagtgaaatttaccaaattaacaatctgaaatattaaaatttataaaataaccttacttaatttactctatgcgaccattatggtcgcacagtgtaaacctatggtcgttttgcaaccataatgtcatttatgaccgcacagtgtaagttttggtcgtttctgcgtgcatacaaagttattttgctaataaaatttttcataaaaactaattttacaaaatgctctaaaaaatacatgcaattgaatgcttaaatcttatttttggcattttaaattatttaaaatttctcaagaacaagttgaatgtaccttctatacataatttgaactgttttttagaagaaaaccccccaaaaccctatcttaaagagcaacaaatctaaaaaacgaaggaaaatggagatatcatttaaaattcatggcagacatcaaccatgattaaattttgaatacaatctgaatatctaggccaccaaactagcgaacttagcaagattgtgggccacaacattaactatcctagaacaatgagcaagactcacattattaaagagagagaaattactatgaatgtcacaaagaactaaacctaatgacgattccaaagcaacattattgttaatcttgttaaccatattaagacaatcaatctcaaattgaatattttccaaaccaaacaattgacattgaactcctgcatgtcgaagagcaagtgcttcaacattaaaatgtccaatcatgtgtcaaatagctaaggcaaaaataactccacgagtattacgaataacccatacccatgccacaaaaacctcttgtcacatctaaagttgcatcaatattgaccttaaaaaagtctactaaaggggggacccatcgaggcacaataagaggagaggaagaagacacaagcagacttattgccctcatagaaataatttcttttgatttcaaaagaggcttttgataatcacacaaaaaatcacggacccaattgaccgccaactcaggagacatcaaagaattattatgcacctttttatttctcctataccaaattctccacataatgacaagagctaattccacttggagattggcaacaagtccataaaaatgtaaataaaactaataaaatcagcacaagtaaccgaagggtctcaaagattaaactcacaaagtttttggcacagtgaaagagaggaacaaccccacaaaacatgatgagtggtttcctcctaggcatcacacagaggacaaagaccatcaattaagataccattcttattcaaatttaacttggaaaggtgccaaattttcatccaccatctcgaaaaaccatgtgaagaagaaggtctatcacgctctaataatcgagtaacaaaccagtaaccactcttgacagaatagaagccaaaggaatcatgaatccaaatcaatttatcactagatggagcagaatgccaaggaatagaaagaatggcaaaagcttcatcaggagaaaaaagacccatgaatcagatttgcatcccaagaaccaaattagactgaaataaatcaaccgtgctaccagtcccaagtaaattcggtgacaatacagagaatccaacaaccaatggtatctagttgtcttcgtaaatagaaatatccctactatttccaactctcccaattgccctcacatcgaataatttctttccccacaaaatgttcttccaaacaaaaaagcatcttttagaagacttaatagtcttaaaatgtctatttatgtaaggaccgtcagacactatctatttctacattagtataatattgtccgctttgggcctaagccttcacagatttgtttttgggcaccttctcaaaaggcttcattctaatagagatagtgtccatccttatatacccaagatctttcccatttttagccattgtaggactttggttgtacacccaataatttctatgatataaaccttttagaaccaaagctgccaaagaggagggatcacaataaagtctccaaggttgtttatccaataaatcttggttgaacatatgtaaatcccgaaatcccattccaccatcatctttgtgccaacataatttctcccatttgcaccaatgcatcttcatcttcacatcatcaccccaccaaaatcttgcacacatagatgaacattcttaacaacacctttgggaagcttgaaaatggacatagtgtaagtatgaatagattgaatgatagattttataagaatctctcctacccaccatagagaaggatttggccttccaaccatttaatttttttttctaaatgcagtcccgaattaataagcatagttgatttagtggcccatgcaaaacaagaaaaacctgaataatttttatggcactaaactccaataaccccgagagatgttgtcataccagtcttgttcacttcagaatcattgggactaaaacagacagctgagttttcaaaattcacactctgacctgaggcagcaacatgccaagaaagtaggagtttgaatctatcacaggccaagactaaagaattcaagaaaaaaatactgttatcaacaaataacagatgaaaaataatcggccctagttgaccacacagtattccacacaatagattattatcacaatcccagttcactaaagtcgttaaaccttcagcgcataaaaggaataaggagacatgagatcactctgacgaagtcccctttcaggatgaatagtaccataaataccaccattcaaaagaatagaatattctacagaagaaaactccatcaccttaccaatccaaatatcatgaaagtctaacttcgacataatgttagtaaaaaaacaactctatatgatcataagttttaaacaaatcaagtttaatagtgcaataaccaacatcaccattttttttgagtatatatgttaatacactcaaagccaataagagcattgtcagtaataaatctactaagtaagaaagtactttcaactgaaatcacatttgataaaactccccattctattagtcattgctttagtaataattttatatagcacattccaaagactaatatgtcgataataaaaaaatctagtaggaaagtcaagggggagattgttaattccatttttggcatatttaattgacaaaaatattttattatttaatgtatatttcggctggagtgtttaatatggtttccctatttgtgtatatctaaacttggaaggaaagttgtctagctttcctatttatggaaattgaggtaaatatggtaagttttgattacacattgattcttttct

SEQ ID NO: 308794 - DNA, 2609 bp, Cannabis indica
aactagcgctgcaaccttaattgcaacaaaaaatcgtataaaaatccttattgcaactagcgctgcaaccattttagaaactcaaactgtaaatttttttaaaaaaaaagttaacaaaatagtatatggggtaatttagctttttatcttgtcaaatttgtttctctttttagaaattttttctttttagttttctatattaaaattattacatagaaaaattgatattagttattttggggtaacaaagtaaacaatatttatatttttattttgtcaattttattcaaaaaaaaaaaaaaaaaaaaagtgaaccatgttcattattttttaaaaagtaaaaaggtaaaacataattaaatatgacaagttagacatggaaaaagtctttgatagagtggagtggagctttgtttaagccatactcagatgtgttggttttgtaaacgtatatccaatagaaagagaggccgtataggctgggcagccgtcaagctagacatggaaaaagcctttgacagagtggagtgaagctttgttaaagccatattgagatgtgttggttttccaactcgtcttgtcactctcatcattcgatgtatttctacggtcacttttagactttggatcaatggtaaactctctgaaagcttcccctcctctagaggcattagacagggtgatcctttatctccctaccttttttgatggtagctgaaggtctctcagctgctatccgtgtctacgaggaccaaaggaagtttactggttttgccatttgtagaagcgctcctgttgtttcccaccttctcttcgcagatgacagtcttctctttaccactgttaatgatgattcctgcagtgccattcaagacattctttcaatccacaatcgtgccactgaccaaaatggtaaactttgccaaatcctctatccttttctcacccaataccaatcctttggacaaaacaaacttctgctcgagctgagactcggtgtttcactatcttgtccaaaatgtctcctccaaaatgagtgtttagaattctaaatatttttctagagccggaaaagaaaaccttataaaagcagtggtcaaagcagtcccgtcttatgccatgtcctccttcaaacttcccatccgcagtactaagcaactgcaaagtctcattgcaaacttttggtggggttcgtcaaatcataagaaaaaaatacattggaaaaattggaacagtctttttgtctcaaaatttactgggggtcttgggtttcgttctatcacattgcaaaatcaagcgttactggccaaacaagcctggagagtctggaccaacccttcctcccttctttcatccttactcaaagccaaatactttaaacggaatgattttctctcttcccgtgttggtcataatccatctagtacctggaaaagtttactttggggaagagaactccttcttaaaggccttacctggagagttggaaagggtactgctattcctatcacagacacctgatgggctcctggacttcatagccatgcttttacgacaattgaccatcttagggacaaaactattcttttttcattgacactaatcatacttggaattacaataaactcaagcttcaccttcctccataccaagttgagtctattctccaagttcccattgacccatctagagatgacagtcttctttggggccatcataattcaagtttatttactgtcaactcggcctaccaccttgctcactctcttacccaaactcactctccttccacttcgactcagactagcttatcctcatggtggaagcggttatggtcctcaaatgtttccccaaaaataaaacactttgtttcgaaagccttccatcacctactcccttgtgcttataatctctttaaaagaaaaagtattcctactcctttttgttttggttgcgaaacgtaggagaaaacagtctcccatgccctattagactgtcgcacagctaaggatttgtgggaaaagacttcgttcaacaagttttacagataaaataaaaagtgtgacattagggagttttttcttcggggatatgatttattaataaagcaggattttaatatttttgtgtgtgtgatttggctaatatggacaaaaagaaacgaaatactttttcataaaaagccaaattgtcattatgatcttgaaacctatgctaacatttatttgcaggaatactcaatggcccaacattcacaatgtcctaattcttctacagttgagagatcaaatcctcaagtttcttttgtggctgagagggaccctcccaaaattcctccccagctagctataggtgagtacaacgtaaatgtggaggcagcccttgattctaaaaaccatcgaactggtttgggtgctgtcatccgggattggaatggagatctggtggcaactttctcttcgcctcgaatgggtactcactcggccatccttgctgaagcacaagctcttcttgctggtctcacttggtgcaagctaatgttggaaatttattttaccaggatcttagatctactcacaagtatgtttgttaacaccctaaatatgaac

SEQ ID NO: 308795 - DNA, 1496 bp, Cannabis indica
aagaaagtaaaaaattaattaaacaataggaaaatgatgtatacgaaagggagggagtagaaaggaaaaaaggaaaaagaaaaaaagaaagtgcttttatcaattctgtcatggattaggtgctttaactaaatatcattaattgccaaatttggaaatttagttgcaaaatgaatgaaaagagaaagagaagaagaagaagaagacataaaagctgctgctcttttcttaacaaaaataatgacaagtatttatattttggggtaattgtaatttaaatatattataatcactaactaaaaatattagtgattgacttgagagtaatgatgtaaatatgagctagattttttaatactttaggaattgatacaattccggaaagtagaagcacgactagataagaaaaaatataaatttgagtgcgacatggtctgatgctataaattagtacaatatgacacgaaaaatatgtgattaaacatgatacagcacgagaagcataaaaaacacgacacataagtaaaaaaatctaacatgaaagatatgacacgcaacaagtcaaaaaagcacaacacaaaacattaaaaaccctttattttctatttatatatagctcttagtttaaaaaaacatttaaaaccctataatttaataattatactaataaataacactgaatttttataattaaaattattaaaaaatttaaaattaaaactatatattaatttacttatagagtgtgataaaatttgagattttataaataaatattcaaatcctaatataattttaatttatatgattgcctataaaatattattgaaaaattaaataaatataattgaaattataaaatatataatataaagtagtaattaactaattaataataaaatataaaaaaaaaagtaaagcacgaaatcgagtttagatgtgaaaatgagctgatctttttaaagaaaataagttggcacgagaaaaggactgcatgaaaatactggacctattttttaaaattgatggcacgatacgatatgacccataatttaaaaagtacagaaaaatatgaataaaccaacacgacaaacatgaatttacaattatttatattattactcatattttttattggaagaacaagtgtggtggattttacttctcttatttggttttttttttcaatattaatagctttttatgataaaaaaatcatttaatcctttttttccatcaaatttttatgtcaacatatattaatagctcttttttttcatcaaattgaatgaatttgactaaattattgataatttaatagtcatttaccaagggctctataaagtctattaatttgaatttaaatcttattcaaacaatcaataaagaacttagttgtctttaagcttcatttcattaacaatatatatgtgtaagtactatcattttttattactaaaatattaatgtatatatatattttaattgaaattttt

SEQ ID NO: 308796 - DNA, 1193 bp, Cannabis indica
atcaatagagaatatataaaacagaaaataagataaatttatattatgaatattatattacatttattttttttaacaaattataatattgcactatataattaatcatatatttagtgaataattttttgatagttttacgcactgctatatatttatcaatttataataaatatttagtgaataaatataaatatcattttaattagcggtttctataataacatgaatcatcatatatatataagtttaaaaaccgcgcgaagcgcggttccgttctctagtctttatatatgtgccaaacgaagtcctttttttttttggtgagaaataaaaatgaacaaacagaaaaagcaatttaatttgcaccccagatgtattttcaatttcaatcatctaaaagaagaagaaaaatatgagtaaaaaaaaaaagttctttttcttttttaatgtcatatacactaagtctaattaagatgataaacacaaaagtaataataacaactaataatttgaagaaacagaattggatctcttcaaagaagcagaggaattcaagaactcaatgcaatcttctaatgcctcaactctatgagaatccataggatcagatacagaacgacatcttgttagattattagatgatgataaagatgatgatgatgatgctgatactttacctgaagatcttctcttattggacactaaacgaattgctttagcaaccttagccctaaggttacgcaaaaatgaacccattggagagtaatattgtttggaattataatccttgtttggctgcagcctaaaactactccaaatcccaccccccgaggccgaaacccttctccggcttgatcttcccggcgatgatgatgatgctcggtatgagacacttcgtttgagaaaatcactcattggcatcgagttcagttcttctggactgaaattcacccttctatcttttcttgacatatttttctgatgatgatgagacttaattgatgacttgtgagacaaatgtttgtaatgagagagaaggaaattgtgtgaatataaataagtgaagacagtttggaaatatatagggtcaatatatatgtgtgtatgtgtattaattatgatggtttaattaatatattgtaataaggaaataattaaagatctaggaaaagtagagagagagagagaga

SEQ ID NO: 308797 - DNA, 2491 bp, Cannabis indica
tttatttaggtcataaaatccaacatagaaaagcgtggaggacatgttagaagactatagcatggcgtcatgcagacacaatttttcaaaaccccacctcctaaaagatagtcaatgacaatgattgcttgactgaggtggagaagcgactttaacagtcagaggaacgaggtcgtaggaaagatgaattattaaagcaactcctccaactagtccaaggccaaattggtgttgttggcaccttagatgcatctagttcagttgttgggagagcatccaacaaacaaacttttgttactgttacatctggtctaggagcaacacctactaccagggcctttgctcaacaagctgccagggattttactccactagccaccgtgcgtgatgacactgcattttctccaacacttcaacctgttgctctactagccacaacagatgcaagttttccaccaggacgtgttcgaagaagaaggccaagagtattggatcagcatggatgaggtggaggatgtgtgcaagctgaagatgattgaaaatattgtaatatctctttggtgcaggtataatagttaagaactaagtcaatatctaagcaaaaattatatttacaactatttattaataatctatttttatttagctatttgtaagaacgaacacttaatctttgtgagttgaggaatacatacacatttagtaatactaattcagtatcaactgtacctggtaaactcgaacaatgttcaaagagtctatgttagcaattgattggtgtgtaacctgaacaagggtttatatgtccgtggagtttaaggtaagtaggttttatattgataaatgtaacaaaacaatagatcgattagtgagttgactaaattaatatattttattatgtgtagtgagcactagagcacaattatgatctgtgctagtactcaaagtggtgcatatctcgactcaacgaatgaccttatctcgaacaatattatgaattgtgtcaaaagtatttgttgcaaattaattcactaattaacttatttttggtttagtgttgtggacttgtaaggatttgaaaagatatacaaaataaaggtctagtaaaaattaaccagtacatgtgtcgacattagccggatggagtacaatatgattattacgttatgaagattatttagagcttcatgacggatgataatcctttgtaaacatgcataactcttatgatatttagtttttattttaattatactcacaatgtaataattaatatctttttatcttttgttctacagtttaagttagatgctccctatagtaacgaggagataaatgtagtatgggatgagtagcccaatttgtggagcctttgataattgattgagtacaaggttaatattttttattatgatacataggatataatttttatgattgttgctattaactcttttggtattatgtaattagtttgtagttagtttttatgatacatagaatataagttttataatcatttccattaatacctttggtattatgtaattagttgatagttacttttatagtccctttactagaatttattactaattataaaagttatatatacgttttataatcgttacttttaacattgtttatgttatgtatttagttatagttattgatcatatatagttttactgttatacgagacgattctaaaatctaaaaatacatgtaggaaaaattacatagaatttataattttcctttacctacacatatgttttattttataaccgacacaaaaagtaagaaaaaagtatttaaaaaaagttatgcattatttcagaacccacgactcaagtcttttgcggcagttttgaaatgacacaactctttttgcaccacttctaaactgacgcaaaatgttataaagaaacttttatattttgtgtcaattttaaaatgatgcatatagctttccccataattttatataagacgtaaataatacactatttgcatgtatggcttatacgtcaattttatagaccgatacaaaatatttatatgtcacttagtaatcgacgaaaatacccctttataatagtgtatgtatgtatgagctagtgtgataggtaaactagtaacgaacaaatcaaagaactctaataatacaattagcttaaagcttaatcatcttaggatttagataaattgatctatgatcaactaagtgttattgaacttgaaaagatatatcagtaagtttatgatatcttttccatcataaatatcggtccagtttgttgtaaaccctatacataaaattatagtttactttcttgattccttagaaaagacattcaactttgccaagtgtaagtaaactctatctttgattaacatattagtgtaaatccaatgtactgataagtcatgtaacttaaataattttaagtatataatcacaattattttctactatgatgacatcact

SEQ ID NO: 308798 - DNA, 2316 bp, Cannabis indica
catcaaagcatcctgcccaatcagcatcggagtaggcagtgatgtccattctgttagctggtttgaagactaaaccagaatcaatggagccagccaagtacctgagaactcttttgcaggctccccaatgttcagaggtgggagcttgcatatattggctgagtttgttgacacaaaaggagatgtcaggtctggacattgtaaggtattgatgggcacctatgatgcttcgatagtgagtaggagtttccaatagagtccctgattttgcagataactttgtagtggaacacattggtgttgattgtggtttggagtcaagtagttgagttctagccaataaatctctagtgtacttctgttttgtcaagtaaatggctgaagtggttcgacgaacctcaaaacccaagaagtatgtgactgaaccaagagcctttagagaaaaactgtgatttaattgagcaataagattgtgaacaacagtagtgtcagtaccagtaattaaaatatcatcaacatatattaagatcagaagtaggttgccattgttactggtgaagaagaggctgttatccgattggctattcttgaatccccattgaaccagtgtatttttcagagtgtcaaaccaagctcttggggcttgtttgagaccatatatggctttgtgaagcttacacacatgatttggaaaatctttgtccacaaatccttgtggttgagccatgtaaacatcttcttgaagttgaccatttaggaaggcattattaatgtcaacttgttgaatgtcccaaccattagagatagctaaagtgaacataattcggattgtgcaaggtttgatgacagggctatatgtctcaaagaagtcaataccagctgtttgttggaagtctttggcaacaagccttgctttgagtctttcaacactaccatctgcattgaatttaattatgtagacccatttgttttgaattataatcatatcagctgttcttggaacaagggtccaagttttctttctccttaaagcaatcatttcagatcccatggcagcattccacttgggattggcaagagcctcttttaaagaagttggttcatattcagtgtgtgtgtttacaagaaagcttcttggtttgtgaatgcctaacttggatctagttaccataggatgaaggtttgtggtgtgagtgggaacagacactgtagcagtggggttattggtagcagtaagtgtgttttgagaaacttagggagggttactggtagcagtagggtactgtgtttgggttggctgatttgtgggtgttggtggttgattgttggaagaagagacactaggggaatgtgagatggtgtcagtttgttgtgtaataataggtatgggacaaggaattggaaatggttgctagtttctggtatgagcaggggtatctcgattgggaggatttggaggaaatagatcattataggaaaattcttgttcattgaaagttacacttctagctacatatattctacctgaggggtgtaaacacctatatcctctaaaattaggactgtatcctatgaagatacatttagaggatcaaaaggcatatggggtgagaaggggaaaacaagaacaaccaaacacctttaataagttgtaattaggtttgtgatgaaacaatctttcataaggtgtttgatagtttaggattggtgttggaagcctatttattagataggctgcagaagtaaatgcttcccaccaaaaagttaagggcatggtagcttgggacagcaaggttaggccagtatccacaacatgtctatgctttctctcaattcgaccttgctgttggtgagtgtgagggcaagatttctttaagtaatgcctagatttttaaagagtttgtacaagggttcaaattcttgcccaagatcacattagacagcttttattttagtttaaaattgcctttcaacaaaggaattaaattgatagaataaggagtttgcttctgattttgatttcattggaaaaagccaagtgaattgatgcgtgtcgtaagccacaacaaatttattatttttttaattccaatacttccaattattttagtataatcgtaagtaagggtcgatcccacgaggactatgtttattcaactattcacaaattagtttgaattaggaaaaagaggggttttgaagattagaataaaaataaaaattaaagaaaagaacaaatttaaagtaaagaatacgatatgagaaactagttaaaggttattcgccaccctcaacaatcattcctaattcctatta

SEQ ID NO: 308799 - DNA, 2845 bp, Cannabis indica
ggcataaaacccaacatctagttgttccagaagaaagaagagcaagaaaaaaaaaagaaaatgaaagaaaaaaatatgttttctaagtttattttttatttttaaattattttaaaataatttttattacatttagatagttaaaccactaaaagtttgttgcgtgtacatcagggtacactgtgacatatcgactgtggccttcaatagagcattttggataaaagattaaacaacataacagaagtgaggcttcgagagttttaccatcaaaattagtttgtggggttatatagttctagtagatttgctaccaatataaaaaaagtatctaaatgttttgattaaccaactttagatattattgtcgcagaataaagtaattaaaagttacatttgatttaaatattgggtattttgttgagccaatctatttcggcccacttttccttgctaaataaggagggcccaaagtccaacaacaaaattacacagcctaattgtgtaagtcgtggaaagttaactcacacaaggtttcttcgatcttgatgaaagcacgaatatatttctatttacatcatcaatcttctagaacaagaaacatgtgatactaacgtcatccatccacgcacccacgtcacttagggcataagcagaaagttcagggttcataattcaaattattgatgagtcactatatttagcgagcttagtgaccttactaccttcaacatcgctctaatataaaaagtagaaaggaaaggggttggttaatcaaaattggattctctgtctaaaataaaaatctagtttttcagtgctttctctttctaagctaagaacctcctttgacttaagcatcagagagttttttgtaggaaaaccccctaggagctcccgttgttgacacagtttttcatcaacggatctaagaagatcataaatgaccaagatgaacacaagtgaatgtggatcaaaagcaaattgatttatagaaaagaaaattaatgatgatgaacaataaattttatagtggttcaccccctttcagcagtaataagctagtccacttgtagttttattgatctcaatgttcaaaaatagttctccagagttatgtcctccaagaattcagtccttaagtgagtttttagagttaaataaagtaagtcagaaagacagcctccctttacaattaacttcataacctttatataggtttacatatagggcttaaggtttcttaacctgacatatcttttttgctaactatagttaagttaagttgactttgaaatacgaaataataataataaaataatattccaaagcaaatatctcaaaaaaatgataattattgtagatatttttagactagctatgatggcacatgcctaacacgaaagtgcctcttcacgcagactcagtctgtataagttacttggacttcaaaggtataccctgcatggagcactatgtgtcattggtcacgtgtcctcacgactctagtcatgatgatgataattgaaacatctcgaaaatttaattttaataattaggacatattttataaaatataaaataataagtgtgttatgagtataataggtaggattatgatcttacttgacctcgaaaagtggccaaccaacagcggggtcatattaatctgatatttttcacgtgttacacaattagcatctgtaagtaaagaacacaaggatttttatagagatttgaccctcttagttagcaagtaacaacatactctccttttagttgtattgatatggagagataacactatttagatcactatcggtgggatctgatatagctctcttaaggttacaaagtaggattcaaagatggcaaatgtcaagtgttgagagatgctataatgggtgtgtgaatgggagagagagagagagagagagagtgtgtgtgtgatatcagacttagagcttgacagattaaatgagaattaatgacttggaggcttaggattagacttagcttttctagggttgagttaaggctcgttatacaggagagctaaactctaatttacaaataaattaagtacacttttacatactaaattgattaaataaaagactaaatttccccttaaacataggtatttttcatcttctttattgggctattaaggccgaatttacagtccaactggtagtccacatgtaaggtcgtgcactagaatcttgccaggtctaatcatgactagccaagcacctgcaggaagcaggctggatagccttgtgcttggttggccatagggtcagccagggatggccggccagcccccttgaggtggctggtctgtcactttgtctccccatttaagcgtcattgatatttttcacataagaatgccacgacaggtgggcaaaatttgggatgacattttccccctaagttcttgtgcaaacatctgtatgaatagggacttactagctaagttggaactgatgtagcctttattgcataatttatgctgtacttttactctttgaaatgtctactctttaccgtctgatctcatttgttgtagtaaactaacagcttttacatgtctctttgttgagtgtgtgtggcaagtgaaggagtggtcccacggaaactatttaattcttttgggtggaaactctcttcactttttcacttttcactctctcactggaaagtaacttttgaataagctcctccatctctctagaggaccgaacctacatagcatcattctcttgcgattttcacgctattttgacaatccaagcttcccatcttcttcatcaataatttcttattatgggtaagcttt

SEQ ID NO: 308800 - DNA, 2091 bp, Cannabis indica
atttaattcttcatttttcaacataaacaagcacaattaaatgaaagaacacacctaacaataccaatttttacaagacttaaaagttagcttactaaatagaaaatgaaactaaaactaactaaagttaagcaaacaaacacattttcactactctttctcaccatacttttagtttaaaattaaaagcataaaaaataactctataccatagagttatcaactttgtttccatacctgtcaaatatgaatggaaaccattcttgtgtggtcattgtaaggtatgggtcatgagaccaatgattgcaggaagaaagaaagtaaaaagtagaaatggttcgtgaagactgattaaaggaaaacagaggtcgaccttgacaagaataagaagaaaattgatgaagttgggttccaacaagttaccaaggggtacaaaacaacaatgactatttctcaagatagaatgataactgacaatacctttcaagccttgacatagataattgaaggaagtagcacactgctttctgtagtagtggaaaaaataagaggggagggagtgtcccctcttcctaatggataatattttatcttggaacgtccgaggaatctacaaatatgagaagcaaaatgcagtcgagcttatgattgcaaaacaaaagattggtttggttggtctccttgagactagagttaaggaccataatattggtgccttatttgttaagatattttctggtgggtgttttactagtaacatagcatggcataaaggtggtcgtattatggttgcttggaatccattgatgttcgttactgatattttgcattattccagccaaatgattcatatgaaagtagtaacaagcgataacaggaagcaattttatgtgacttttgtatatggttttaacaatgaagaagaaagaaagattctctagaaggatttctgtatgctgaatggaaaggatccttggattgtgtttagggatttgaatgatatcctttcaaaggaagaacgaataggtgctagagtaaagtttaattcctcaacagattttcccaatcgttttgcagcctgtcaattggaggatataaaatatggtggaaatttcttcacattgtctaataaacaacaaggagaagacagaatatactcaaaaattgacagaatacttgcaatcaagcctggtttgatgtgtttctagatgttgaagtcttgttcttgaatgaaggaacttttgatcacttcctggtttgctaacggtctatcctcaactacctagtgggaaaaaaaccatttaaatattttaggatgtgtaacatgcatcctgaatattctgatttggtttctaaatattggaagcagaattttaaaggaccgcttatgcatcaagttgtttctaagcttaaaggtctcaaaaggatctcaaaagagattaatcaaaaggtttctctaatattcatgcttcaaaggaggaagcaaagcaagccctcactgaaagccaaaacctactgcgagatgacccttttattgtttctttatagctactataaaaagagcacagggagaagtatgttgatatacataaggcctattgctcttttttacagcagaaagccaaccttaatttggtaaaaaagggagattcaaatacctcattatttctcaaatacctcattatttcatacaacttttgtcaaagcagagtccataacagaatttattcaatcctcaatgcagatggagaaagagtatttggagatcaagttgcttctacttttctaaactattatcaaagtttacttggtagtagactagaaaacagaatgcatgtgaatattgatataatgctccaaggacctcttgtcaccaagcaacaagcagacgttcagactatactttagataaagttaaaaaagtctttttttgatatacctggtgatcagtgcacattttacactcagtcttagttaatttttagatagattagtatttatttttgtatagatttgatgtgttttctccaagtgtgtaggtttgtgctgaaaagacattttgtgatgcactgagatctttgagcctatttt

SEQ ID NO: 308801 - DNA, 1283 bp, Cannabis indica
ttattttactctatttattttaattttaccattatttctatattctttaagatatactcacttttataaatgatatctctattatacccctcaagttaatataaattatgtgctagacttaaatgaaggatgagaatatattggataacaatttcataatagtaggtacgttttaatgaaatataacataagagtattttcgattaatggataaaaaaaagggagttattcatcaacttatcattttcttcttcctcttcttctctgctcaacccaatagtatttgtaaccttacacccttcttaatcgattgacgactatcctaaccccgaccaacggcgagccccgaacccaaaaccccaaagaaccccgacacctcaaaaaccctagtattacccaatttgaaatccaagaattttcaaaacttttttttgacaaagattctcactttctaactcaaaactctcaaatccaaactgaatttcccaaattgggtttcctttaatggtgatctacaaccactattagggttctttttttaattcaaaatttgtttttatttttactaagaaaacaaaaatggacaaatcaatgatttcaaggtattggagtcacatatgttcccaaatagtcaatccaatcatggaaatgattgagatcaaatgcccttttgccaaagcagtttcatcgaaggaatggacaagggttcaaataatccctcactatctgaatttcaaaatcccaaactcggatctgattgagctccttctctctctgggctctaatcttacgaggaatgatgggtaatcctcgtcgtcgaagaatgaaaagaggagaagcaaagacggttgttctggtgttggttttcgacgagagaggagagacttcagagaaaggttgggtttgcgcgattaagagaaaacacgtgcgagggactggtgcgagcgtctttatgattcatgggggcttggtgcgagcggctccatgctccatggagatctggttttggttgatttggattctaggttgtgatggtgatagttaagagtgttcatccaatccaaaccacactattttgcttaaagtacatctgatccgcactaagtgtggattttatattctcgatccaatccaatctgcacaataactcaaatctatttcaatctaatctacaaaagtggggattggatcgggtactttggattggttacttttaatattaagttatttaatatttattaaaaaaaattacataactaacaacaaaaacaaaacaaattatt

SEQ ID NO: 308802 - DNA, 1203 bp, Cannabis indica
aaagggttttatttagggcacaaaacccaacagcactataccgccaactctggctaccacttagcacgagaattaagagagttaggaaaccagcaccttccaaccctgactctgatgtcggctggtgaaagatcctttagaaccttaatctccttccaaaattaagcactttacccacaaactttgccataatactcttcctatagcaaaaaacttgcactttaggaaaattaaccccactaccttatgcccttgatgcaaactagattatgaaacttcttagcatgctttgtcgaatgcaagggtgtcaaaaaagcttggatagctacgccattcatatctctaattaaagcctcaaaaggaaaaaaaataatttttgatacactaattaataataagtcctaattagcaaaggatgattttgtaagtgtttctatgtatactacggaaaatctagaatagtaggaactcttttgtagtttagacatttgcaggaggacgacttctataacttatcaggaacctacagcctacctccaatcgtataagcaagcacaaggcatgcaacctgttcgtgcccaagatttcactacaatcatcacttggacccccctagaccagtttaagttcaatgtggatggagcagtatcagcaaaagaagagacaataggtgtaggggccctggtccgtaacttgacaagtcaatcatagctgcatttgccaaaagtaatcctggcatgatacaaccaagaaatgtagaagcttgggcattattgcaagccctactctagtgtcaagacaatcaaatattaatccaccaggtggagactggctgtctgaacctcatccgcgacatcaaatctccaaaaagtatcttatctgattatgaggctcttattgatgctcttaaagaagtgttaacttccttcctcattgtttcctgttcgcatgtcaatcaacaaaggaatacagttgcgcacaatcttgcccaaatgtctattgcgttagttgctattgggttttgtgccctaaataaaacccattacaatctgattagttatcaatttagaattttgaagtgatttatgtttacatgtattttacatgtttatggtttaatatacatatttaatatatgcacaaaatcagttaagtccagaacatatattcattcacaattacagtattgtcaatacagtggaa

SEQ ID NO: 308803 - DNA, 1125 bp, Cannabis indica
gctaattgccttttctaatccacaatactagagcggtcattacaaaacacaactcccacaaatcaaaatcattacctacgtagttgctgcgaattttatgctatgtaagtatacacaatcacaatttataataaaattttagtaagactaagtatcttcctaccaattactaatgcaataataattattcttcttcatattaatctagcaagtaaattgaaaaatacattttataatcaagttaagaactacaaaaccaaaaaaataaataccatatcaaaaaatatctaagtttttcgttttctctcttccatggcaaagaagaagagagtgagatgaaaactaacacttcgaatgccagatctagagcctagtcatgggacgcaaggggaaaaagaagaggttaataatgactttttttcaatggtgagaatgaatcttgaaatagaaataatgaattctgcagcaaaaaagtcacagtcagactcatgaattggcaattgaaggttcgtgctctcagacaagaaaaagttgggctagggaggttgaatttgagatggaatgcgacaaagatcaggagcaagttcaggacacagccaagacccattgggaatcattctcgaaggagtacctagcctatcgagatcctaaattgagtttcttagagccattggtaaaagatggcatcaaaatcgcccaggttgatatagaggaagtgaaagagcaagctggtaagtggagcacgggggttatttgtatggtccttggagaaaatcctctaattgttatatttgaaggcttcatcaagtgaatctggggtcaccttgggattgttcaagtggcaagaatgactatgggtctggttatcatcaagtttagtgacgaagctactcaagaccatgttttggaggttggagtgattcaatttgaccaaaaacatgtgatagtgagaccatggacgactgatttgaacactgtcaagcttgttcggtcaattcctttttggatccgtcttcacgatttagaactccaatattagagcaacaaaagtcttagtgccttagttagtacttgtttacccaaattttaacgacgatgtcgtgtcaagagtagcaacacgtggca

SEQ ID NO: 308804 - DNA, 2066 bp, Cannabis indica
tttttttttttgagtaaaaataataaaatttaataattaataaattcgttgaacctaaaatatattaattaagttattaaatggacaatattcatgttgtatctgtcctgtgatcttgttatgaccttttattattattattatgaataatcttctagaattatttattaataataaaattaaatagtggatggaattgatattcttttgactactaattataattaactttatattaatttcttttcaattaatttagtatgttaaatggattgtggaaattctaaagctttaattttctaatctttttatgtatagtgattaattattaataattttatgtatgaattatatattgaccaatttatatcgatgcaaagcatattgtcacaattttttttttcctttcaatgttcacatttgttcactcaaaatctttacacaagatgtgtttgaatatatattatcaatatgttttaatacaaagagaatattaaaattaataagaacgtgcacatatatatatatatgttcagtgatgaggcaaaatcaactattaaatttaattttgtcgacatactatacatatatcgtacgttatatggttagtttagacaaaaccgaaagtctttgactttatgatgtcactcttatatactgataagactttattaaaaaggttgataatgatatagattgcaatattttttaaggtggattaggtaaagggaatctctctctatcattccaaataataaccttctacctgtacaaaattattatttttgttcatcgaagtggaaaaatctagaacaaaagaaaacttttgcatgtaaattatttaatttatatatatagaaaaacaaaaattaatgatatttaatgggttggatccgaagcaaggttaaattatttggacatattatatataaatttatgtttacatgtatatatatatttactctttattatgtcggcgtgtgtgtagtatataagttatattagtcatatatgtattcctactctttttctttcttatacgtacttctgttttagtgtcatattagtgattttcaatattatttttattggccaatattaaaaaaaattaagaaaaaaaatatatagccacaacaaaatagaaattaatagaaagaaaaaaagaaagaaaactccaatatattaggtatgatatttatccgaaaatgtatgtgaatttattcaaataaagaaaatgtatgtgaattactaataagaatgttatgtttatttacgatttatatgtcattttgtcacaatgaattagatcgaatcacgtgacatgaaaacctcaaattcaatatctatcgatcaatttattatttaattttatcatcacgtgtcaaatgtgtgacaaatcagcccaatacagctaagtactatatagatatttctatcattttccaaagtataatattgatggctcacctcatcttccattaataactttccctttttttgtaaaataaacaagagaatttgtatgttttgactttaaatgtatacattcgacaatagctagtccaatcgagttggtggaagaaaccaaccatgactatgagctaataagttattatggccatatatagttgccgtgtcttatatataaatatatatatatatatatgatataatgtgtaatctctttaaatatataaccttgtaattgattagttttagtatatagaacctcatatttaattggaccaataataatattgtcacgtaaaaatatactacactcttttatagtatttctcatatatatataaatacttcttaatgggtattactcatgaatggtttacaaataaatttaactataaatattaattttaaaaatatcaaacaatcgaattttgatctaataatgaatatataatgaaatcacacatttgaatttctatacttaatttaactacttaattaaaagaaaatatataaaaaaatatctatttttatactatatcaaaaatatgttcatacaaaaatatttaactcaaactcaactttttcttttcttattt

SEQ ID NO: 308805 - DNA, 1398 bp, Cannabis indica
caaatagtcgagagagtttaacataaaaattagagtagttttcaattccccaacggacatctaacccgttaatcgaattgatgactactttagaatcgctctctataatgatatatttccagccttcctcttttgccacttccaaagccaagcaacaagcaaccgcctcgccacatagagcatcagagaagtccaatctattagtctgaattatacccaccactcccagatggttccttgccacgacagctacacacatgctattcagactgactttaacatcacaattaagcttaatccaaccaagagagggaggattccagacagccacatcagacgggggaaaagctggtaatagtgaagctctgtaatctgcataagagttgtaaatatagtcagcacactgagacatattggacaatcgtttattatgtaccttgtcgttcctcgtcctccagatggtgtcaaccacaattgaagcatagagaaaaacttcatctgtattaatacccattttgtcaagcccccagatgaattttacccagtcccagaggcgatatccagagtcagaagtaggaattaatccccacggggaagctctccaaaggtgagaagcccaattgcatgaaagaaataagtgttctagtgtttcctcactactcccacataaagggcatgttacatcctcaatgtgaaactgcttggccagaatagctcgaattgggatagcctttgaaagaatgctccaccacattattttgtggcgctccaaaattttactattccacatcttgttccagagagcaggagccacgtcaatatgcagcattctttcacacacttggattaaataagcagatttataagagaatcgaccattactctccttcgtccaaatccacctatccgctccctaagtcgatggtttatagagagatgttatgactttatgggcattctttttttgaaataaaagtgcatgtatgaaattaaacttcatagtcattacatgtagttcggaatggaggaaataaacaagcaaccataccgattgtaagtaaatgcccacattgctacattatggacaacaaaattacaaattttactaacaaaagaaaatttacaactaacaaagtaccgagagatctattacaaaaagtaaagtagttccagtcttccaatgggaatccattccattgaactaatcgataattacccttgaatcactctctataataataaagtttcaacctttctctttagctacttctaaagccaaatagtacgctattgcttctccgcacagagcatcagaaaactccatccttgcctctgaactttaacatacacataacaaaaataaaaactaaaaatataactaagtatacgtacaatgca

SEQ ID NO: 308806 - DNA, 1894 bp, Cannabis indica
aactttactgcaagaagatacatctttgattttttcgcaatggctatcactacggtatcttgctcaaaagcccatcatttattattttattatgttcaaatatttgataggaaccatagtagcatattttgttattttaggaagataaaaattgattgctgaaagatggagaaaggtactttggaaattcttaaagcaattacctctttggcgccaaaaatatacattatccatgtaaaataacttcatatgttcatcttatagagtcagatctaatttagaaaattaactgagttgactggataggaaagattatatgccattaagctattgagctgtgttttgctgcactttatcattattattattattattataattattgttcagacactcctgcaatttccaatatattttttttttatgaatctataccatctgtcttctgatcagtaaagaatgaaatctataaagttaacatttggtaataagccttctcgaccatctttattgcaggctccatcaatgcgacaacttcacctacacgttatcagccaagatttcaactcaaaacatctgaagaagaagcaacactggaattcattcaccactgctttcttccgtgattctgtggatgtaatggaggaagtcagcagccacggaaaagcaaaactagaagatgatgaaaagctgttgtctatggagttacgctgccaccgttgtagaagtgcccaccccaacatcccccgcttaaagtcacacatcactaactgcaacgcaccatttcctgccaacctttttcagaaaggtcgtctagtgagcgctccaaacaacaccatcatcggtccataaaagaaggaaccgtatccaagttttattctaggaaagtttctttttcaatggcattgaacactgtcaatatctattttggtgcaattgttataatgttctataatatggtctgttaatattttgatgggggaggattgcccttcttaaaggccatgttgctttggtatatgctttataatggatgcttagaacaatctttttaagccataattagttgaattttgattcttgtcccttaaaagagtggatagaaagctgagaaatgtgatttgagagaaataaagcataaaaagtgacggggtttaagggcacttgttttatgtcaataacttgtaaattttaatgtatttgattctctttcggatttatcaaactaaatcagtggtacaaaataatacaaactatggtgttgtcaggcaaatataacctctgaacgtgatagtacaatgaagtgaaatgcacttatcaccctaagaggaggcatgctactatgtattttgatattgggttttataaagtgaccatggttatttagggtgatttcggcctggagctcgtttggtaaaccgtattgtactttattgtataatattgtgttagattgtactatattgtattagtattatttaatacaatactatgtttcatattgacttgtattaatagatatttgtttaaagttacacaatatttaccataaactcgacccaatctcgactcccgaccaaccttgaacccctaaaccggttcgggtcaagtcaggtccgaatctcgctctgagttagagttcgtgtccaggttcgagtcagggtttaggtctcggtttggatttgggtcgaggtttatgtctgaggtttgatccggacctgatcattatacgacctaccaaacaagtcaatatgctttaaaattgtacgtgtttaataaaatttataaaattaatagtcagacaaaatataatttgattaaggtctaatttttttccggactaatcttgtggtagttactgaaaaaataataaagatgttaaagtaaatatttt

SEQ ID NO: 308807 - DNA, 538 bp, Cannabis indica
aaaatattaccaaacggtaccatataattagtgtcttaatttttgaaaattatcgctaatgaaagggactacaattgttaatgctctttctttagtataactatatatatagagctatggtatccatatatatatagtgcaaattttcatgggcaaattaaagggccaatcctaaaagagtgctctatacattggactctgccacgtacactggaactaataaagactgcaatcagtcacatgagaataatatatataatattccctaaactgcttcaatcaacagtaacaaataaacgacaaaaataataatgtataaattataatcctatttatagattagcatccatatataatgacatttaacaacagagtttatataataatgatatatagccacaggatataataggaaattagaacccaacatatgaaacataatgcgtctcatctgaaaattggaaaaaagaagaactaaaactattaaagatttagcaattcaactttttgccttattattcaaatcttgatggttctg

SEQ ID NO: 308808 - DNA, 2445 bp, Cannabis indica
ggatactccaaaaaattgaaaaagaaatataatgctacagatgttgcgaaatggggttttgaagttggttaaacaaaggcggttcggccccaattatttgatgtatttttctcatgcaagttctgatatggtcgatcttcatctctctgtgctttttcaaagccttcaaatcagaacatcaatatcttcgaattcaggttatatatactatatttaattatattaattatttgagaatatataaatataaataatgaaatatatatgtatatttttgtgataggatgatactctcgagaacgatgtatcatcggtagatattgccacaacgaaaaatttggaagatcttgtcaaagttggagaagaattattgaaaaagccaatgtgtagagttaatttggagacttgccactacgaaatttgtagccacgagactaatgagcaggctcttgtaaggtatgctatggttgttgtaccttttgaattagttttatgtcaaaaagttaaacctgtatttatagcactaaacacactacacttctatgcaaaatcatataatttttttacaatatgttatggtctaattattgacgatatataggcagaatactacacatgtaaataatcaaaattggccaatatatatgacatattaatattaattaaaaatattaaaagtatgatcgttgatcgatgatgattaattagtacgaaattatatttaataattttgattgttattaattatatataatttaattatttgatgagttgcttacaatgaataataataattatacaaattatatataattaatttgctgcaggtttgctaaaagactgtgggatgagaagcaatttcgcagtgcaagctaggtctcctaattaataataatgtgttataatcattaagttttaatgtgtattttgtgtgtgtaaaataactgtatatatatatattaatcattatatagattaataatataatatatatactaaaggaaatgatcaaaatatatatgttatattatatttatgctatatttgaccggagacggagctatggtttgggtatggttgttagagaaagcaacgacatgctgattgaaggatgtaccatcttagctcacgcccaagtggaacctgtctttgtcgaagccattggcattcgggaagcccttagttggataaagaaatcaagctttcattcaacagtgttaagtggaagctgactgtttatgtgtaatacaagctttacagagtcctttatctatggttgctttatttgggatggttattaatgagtgtaaaaacttgtttgcaagatgaatattttggtttattttgttaaatgatctgataatatagtggctcataacttcacgaaaattgctatattatatcctgattgtttatttagtatagagtctctttctactgatttgcttttggtaactgaagtttgcatctaataaagttgatatttgcatttaaaaataaataaataaataaatatgccatacatatatttttactcaatccgcaaacacatgatatcaaaactttatgatcttttccattttatgttatatatatgcatggatatttgttaccaatattaatatattcactttttttaccaaataaatttataatcattggaaataattaaagctaatgatattaatttattgacaacacatcccataaaaaataagaaaaccactaaatagagaaattaaaggagtaatcacaatgattaaatcaactcaaaatttataaatagaagcattttcattatatagcaaaggtattagaacaggaataaaactagaggccataggataagagacacgtgtacataaaacagaatattacaaatttttattaacagaattagaaagtcaatataaaaataaaatatttcttagggttgcttcattcattcatcgttgcatttcatgtcaacaatatcttttccctttagtgagtatcatcaaattcaatttttttgacacacaaccctcaagcgaaatggagatggaactacactaagcttgctaatcagaaattgaaaccgtgttggtgagagcccttttgtcaaacaatttgcgatttgatcatgtgaaggaacatatcttatttctaatttcttctgtagagccttgtccattacaaagtgaatgtcaagctcaatatattttgtgcgagcatagtagacgggattagatgcaagcacacttgtactcatgttatcacactatatgacagagttgccattagcttgaatttcattttagacagtaagctttccagccaagttaatttagcaactaattgagctaaggctcgatactctgatttgtgtgtgtaacgtccccgcttcaagcctccattgggcccttccacccacggaatgaatggctcttatacacgagtacgtca

SEQ ID NO: 308809 - DNA, 1643 bp, Cannabis indica
gttttcttgtctcaattgttagtaatatgcatttaagtccaactctatccatttttcatttttatgatccttgcttgttcaaaacatagcaaaattaaatagcccaaagtgcgatcttaacactactaatacgagtatcctgtatccccaacaaactctaaaatagggtttttttagctataatagagagtgaaatctgaaaatagcactatataaaccctgaaatctatattcaacatccataataaagaggcatgaagtaactagctaaatctcgagggctcctcaaatttttaaatagttttttaataacttaatttttttaatgaataaactcaaattgtattccttcaaaacattatttacaaactatttcagcaccaaattgggtctgaacatatactacttgaaagttatagtttcttcgatagctacgtaattgaacttaaatgcatattactaacaattgagacaagaaaactaaattaatgaacaccaaatttacaagcttcctctgcattgaaaacgcattccaaccgagtagtgcatgggtttccaaaaactgggtaaagtaacatccactataaaattaattcaattacaaacaccaattctgattttacaaatcaaactatataatctgaaatgacttttacacgatgttacataattcttcaacacaatcaaaataagagatctaagcacacttagatccaagaacgcaagctctccttgcttccaaccagctgaagaaccttcagcagttcagtctgttgaactctcctcagacaatgcagattcgaaatccttcttcaacctcttgaattttcactgaattttcatctcgcatataacccaaaaaacacaagagatatatttttccctagtagagcaagaatcaagaacgattctatcaaagatgagagagttagttagaaaaagtaacaactgaatattatatatcccgttgaaagagaatcgtttggctaactaactaacatagctaaatccagctagcactgactcaaacaagaaataaacaaatgaacaaaaagttgtcatggcacaatataaaagtcaccaagacagaacagatgaaattgatgacaacttagatgaccaatgatatagaccaagacagtaaaatgaacaaccaggaattcacataattttccatacaaaaactatgacacttacaatccttcccttggtaaattttgatcaacaaccatgcacaaaagacagagagacacacaatatcacaaacacagcaaaagactaacacaaaagcaacaagataaagatttgcaaaaagaaacacaagtaaccagtcaaaagtctaaaaccaaaatatgaacactgtgtacagtctttaaacaaaaaattaaatgcttaatatctccccctcgatgatcataatcactcgttgctggaataggtaacaagagaaacaacagagccaagtatcttggtaacaccaccaacaggagcagaagattgagcagcattggatgactccccctggacactaactattgtggagtcattctgatcacagacactaacttactccccctggaaagcagcagatgtagatctagtaagaccatgagcaaaatcttgctccccctggacatcagaag

SEQ ID NO: 308810 - DNA, 1391 bp, Cannabis indica
aatttcttattcagttgtgatgcgagcagtacaattttgttattttattagaccactttgaaatatgttttgaactattttgctatccacattccacatgcattattagggctaagcctaaacatagtaggggctaggactatacacttattaccccaactataaaatctaaaggcaatttttaaaaataacattcgataacgattatgtgtacctcaacagatgtccacttgaaatctataaggacgtccttgaaaggagccctaaggttacaacagagaaatatccacgcatcaaaaacaaaatattgactcttgtattacattttttgttggtgacacaatacgagatgtgaaacgttaaaaggcaccactagtacatccagtatgaaattgtagggatcacaagtatgtgtgtacgccaatttctgacatcaatgacaattctgaggagcgtattattaagtttgtacacccaaaatccctcatgcaacggtatgttatcaacctttttcaactcttgaaaaactactcgaggattaaggactcttccgtaccttatactttaagataggcccataagtcttgtatttacattcacccatgtgtaatcctatataaagcatctgattagtggataatttagccttgttaatgcaatgtgatactaatttacaaacattaatccctagttgtaaaattatttgtaagaattcctactttgactaggatttgcttgctactatgagaaatgtttctatttattttgtaaagcaatcagcgaattcagtacctcatgcgtttgcccaaacttttagtttatatccttactgtgttttcagcttgggggatatcccaactgagttgctaccttgtttggtagctgaagttcaagtttagataagatgaattacattcaaaaaaaaaaaagttgagcatcattaatggaagttaccacaagaagtagtgtttgttataaggtgcaagtgagatgagagggagaaaatagttttgtatttctatagttgacatttactaaaacttgtcatgccaacccaataatatatataattttttaaaatacaaatagaaattttataaaaatattgaattttgggcaaaaatttacaatttaattgtcatatggattttttttatatataaaaatactttttttttataaaacaaacgtacaataacaaaacaaaccaaaacaattaaaacaacagtggaataactaaaaaaacaactgcgtgaaaatttaatacagtacacagtataaaatttacataatatttttgaaaaaaacacattattttttaaaaaaatttagaaatttcaagaggaaattacacttagtatgtgattttaaaagttcttatgataaatatg

SEQ ID NO: 308811 - DNA, 1911 bp, Cannabis indica
acttaatgaacttagaaaacaaggtgaagcctaattcggtcacttttttggctgttttatcgggttgcagccatggggggatggaagataaagggcttgaaatctttaatgagatgacagaaggaaaatatggaactaaacccgagatggtgcattatggttgcgttgttgatttgctcggtcgttctggccgagtagacgaggcttttgacttcatcaataaaatgcctttcaaggcaacagctgctatatggggttctcttttaggtgcttgtagagttcattccaatgttgacattggtgaattcgcaggcaaacggcttctagaaatcgagcctgaaaatgcagggaattatgtcattctttctaatttatatgcttctgttgggagatgggaagatgtaagaaccataagggagtttatgaaagaaaaggttgtggtaaaggaaccgggaagaagttggattgaaatcgatcaaattcttcatacgtttcatgcaagtgaccgttcccatccaagacgagaagaggttagaacaaagctaaaggaattatttgtgaagtttaggaagttggttatgttccagacttaagctgtgtcttatttgatgtggatgaggagcaaaaggagaagattctcctaaaccatagtgaaaaacttgcactggcttttggtttgattacaacttcagaaggatcgtctattcgtgttattaaaaatcttcgaatttgtgttgattgccataatttcgcgaagattttctcgaaagtttatggaagagaagtgtctttaagggataaaactcgattccatcgaattgttgatggaatctgctcatgtggagactactggtgagatttggttgaattttttcacctgatttgtaaatatgaagaactgatctaacatatatggcatgaaaaggaactgatatggacaaaaaagccaagtcatttgattaatcctaacatgttcatggatcacaaagtgaaaaatttgatagtgaaaaacatgggaacataaaagatggtactttgatgttgatttacttgataactctacaattttacaaaataatgtaacatgttatacatagaatagtttagttattgaggttttagttaatatttttgtgtttagattagttttttgtttgaacaagttaatttgcatatgcatgtttttatagtgatgtcttcaaagaaaagaatttctgttcatacatatttgacattttattgaagatgtttttgttaattttgtattgttttggcattacaaattcgtttataacaaatcaagggccttttttttgtactattgaaaatcatatagacatatactattactttatattactttttaaattaatttagttaaacttagtaatgaacttgtttacattttcttttgatagaaaacttagtaatgaacttatattagatgttcccaaaggaacgttaatgaacttccataatgaatgtaccacaataataatctctttttccatcaaaaaaataataatatattttttaattttaaattattttataattcatttttaagcaataattatcgttgttattagatactagtgatgtctagcagtagcactaacataatagagtattttttttaattattattaaattaaaatagggaaatttgaatatctatgcattaattgagggataatttttttctctaattgatacatatgaaaattgaaaatatgtgacaattttatctaaaacccgatactacccctctcataactcaaccccatctctctctcttccccatctctctcttcgtctatctctttctctctcaaccaaccgaaccacatctcactgccgcccaaaaccacaacccccaatcccctcacgccgcccaaagcgccggcccct

SEQ ID NO: 308812 - DNA, 1762 bp, Cannabis indica
ttttttttatgtagcctcgagctcagccttatgagctttctcttgctcttcagccttctacttcaacctagagatctccgactggaagttgttccattagttagccaagacttagcattgttcgttagatttgtgaagctcggtgctaagctggttaacattcgggagacccttttgttgagccacgaaggataagagagatgtctgcaaagaacgagatcaaaagaggatatatataaaaaagaaagggggtatatatgagaagatatgcaaatttttataaggatgactaacagaatgtaagagatcaacgcttctctccgttaaactttggaaatttcccatgctgatcaattcccaagttatattgttgaaaggacttatagtggcgccaacaattggtagcatactgtgagcataattgtgagccctaaacacttgcaaagcagacgagggaaagggggctccaagaataccatctcaagttgagatacagagaattcaacctgatgaacagactgtaaggcttatttaccagagctcgcagtagtaggtgtcgaggaactgtctagggtcttctctaactcgattacaagttgagtcgaggcacattttttgttagcagacttatttatcctctttaaaggttctaggtttgacccagatgtagttttcaacaaagttgtacgcttcttgcttctcttggtagaaccagaggacctgcataagagatctcaaaaatccatatttatgagacaaaagatgagacgtcaacacttgtataaataaacaacaaaaatatggtgagtcaatctcccacttaagagtaatatcataaccatcagacgaggaagaatcactataataattactaaattccttagaaccagtaatcgtgtaaaggttaaagggattgagtagagacatgtcccaacctgaaaaaccagccctatcaaagttatttccatattgcctagcgatcccaaagtaagaactattacagctcagctggacgtgatgttcagggtaccaaccatcaaacctatgggtgatgtggtctacatagttccaaatatagaagttatattgactatctctaaattgaactaatgttgttcgctcagtcctaagaacgattgggtaccatccacaagcaccaaaattattacctcgagaggcttcatcttcagcttcccaaggggtcacatcccttaagtaatggatgcgagccacatagtctcaattctcctcatttgcgagcacaagaacttgctaccagtctgagaatttggggatcttgaagtcatttgtacactaatatgccaagaagggcgtaggccttcaacttattatcatgccacagaaactcagccgcttgcagaccataaggaaggccacgaagaatcttgtgacttttctcaatctctggagtagagatgtactcacgacaatttttaagcatgccttcaaaattatgatatttttaaaggggaattgctgatggttgaaaccgtggcttatactataggtgacagttttaaattgtggcttatagtataggtcatggtttaaaatcgtcacctatagtgttattctcaatgatttttaagcgtaaaaattacaatttttttgaaaagataattatcgacagttaaaaatcatggcctatactataggccatagttttaaaccattgcctatagtgttataggccacaatttttaatcgtcaacaattagttcaaatctgaaaattttcaaat

SEQ ID NO: 308813 - DNA, 993 bp, Cannabis indica
aactttttttttttttaattttcaaatttggattgttaggttctttagtggttatgaaaaagaccctatatttatttatataaattaaaaatgttaagtgatagtttattgaaagtttaattttgatcaaatattattaatgaaaaaatataatcataattaattctctttattattgaaaaagaagaaagtgaaagttaattaattaaaatgatcatgatgactctcacttgaaggagggatataaactttataattaatactatgagtttttctatatatatatataatgaatttagttttataatcaaatctaattttaaatggaactattactgtatgttttgtgtacaaaattaattaaaatagaattataactgtgatttttttatttgtttctatactcccacatagaaatgatagtgttattttatgggtttgatagattttaaacatctacttaattttatacatccatatacacatattttttcaaagtaaataaaaaattaaatgtttagagggttattttattttaaatcgaaacattaatagtaacactgaacttatagaaagtttaccgattaaactttttacatgttatattagtctattataaatatttttttagtgctagagtaaaaactacagatataattataaaagaaattaaagccaatgttaaatatcgagtcatagcgacaatgcctaaaaacataatcaagttattttggtatgtgtaaatagaaattgaagtaatgcattacaagataaaaaaaaacattttttttaatgttattaacattaaaataatattatttaaatgttatatttaataatattttaaaatgtaatcttatagtttgtaatttttacataacaacacattttatatcattgttattatattgtactaatattttgttaatgttatttttgtgtgttttattttaatactttttaaatgaaaatttcatattttataaggtctat

SEQ ID NO: 308814 - DNA, 1479 bp, Cannabis indica
  modified_base (1348)..(1348): a, c, t, g, unknown or other
ggcttgttgcagacataacacctcctcttaatctttgaatttgccttccctttgcttgaactatctgtgccttgttctccttcttttggagttttccacggactagtaaaccatccccagtattctctcctaaaatctcagatttcctcttaacatctgtcgacattaaagcattaacaacttcttctgatgtcaaagaactcttaccatatatcatggtgtctacaaaatgcacatactggtctgaaggcaacgaattcaaaacaatgatggcttggtcttcatcatcgatcttgattcttatgttctccaaatcaagaatgatcttgtttaaatcatccaaataatctttaacgtttttccctgatatcattcaaaatgagtacaacttttatttcaagaacaatcagtttgcaagagatttaaccatgtacaggttttctagcttgagtcacacacttgctgctgttgtttcttcagacacttccttgagaactcgatcaccaaggctgagaatgatcgcactatgttctttctcaagaacctcttttttctctttctcgaacagagttgtaggaagtttagcttctcctaacagagcatattgcaaatcttgctgaaccaacaatgctcgcatcttgattctccataacctgaaattgttcttaccatgcagtaaacttttccaaatcaaactttgtgtttcccatcaactaagaacttcttctctgaaacttgattcaaacgatcttcaggaatcctccttagctttgataccacttgttggaaatgtcagctttgatccacatcaatactagaattctaaatacataaccaagaacacaatgcacacactcagtcacatataaacttagggtgacaaagagagagaattgaaatgtagagttttattgattatagttacaagacttgttggaattacatgaatggaaactatttttaagtttccaaataagcatatgtcactaattgacttaactgtaaaaatagttaagtcttaactaactaacagaacacttgcactgagtacaagtaggtgtgtgtatgtgtatattacaagggcaaacaaatacaacaattatattgtggacattgtctcacatggaataaatggtagagtattaagctatatataagaagatgggatcacttatcatcaattggttttaagatggaaccttaatatggtatcagagccatatcttatgcgaggatgtgatcctgcacgatttgtacctatacagatagtgactatgtctactctaatacgggttcaagattggtgggaaaaaaaattgacaccatcttgagggggatagtgtggatntatccagataaatgttaggtattttttagtattatttttagattaagttttagtatattttttaaatttgagttttttaaatcgtgtttagtagcattttttacgctttgttatcttttattttttgtcat

SEQ ID NO: 308815 - DNA, 1810 bp, Cannabis indica
taagatgaatgagctattcctcctattgccaaatgattttgagatggaacctcattcattttataccaaattctcactagtgagctcggggactgagattctatatttatataagtgggaccttctatcaacatctctatcacagttaattgtcagaatattttgtccatcaattaagaaataaattaattagtaaattataatctgaccatatttagaatatttactcttatcacattttaatttgtgataatatacagtcggcgaacacttaatgaaataaagcaaaatcaatttaaataattttgtaccaatattagaaatattttaatattattaaacaaaaacattctaatatatatacataatataaatatgtcacaattaatattcataaaaatttcttatcgatattttcttgtgttttttttttttctggttaacttagatttaactatagcaaattaaatttttaaaggaaaaaaaaaataaaaaaatctatatagcaaacttaagtgggttcataatgagttgtaatcaaagatggatgattctaaagtttttctcaattaataggcaaaaagtaaaactaaaaacaagataaagaaggaaaattagaaaaggaccattgaagaaggtatcataaccctaaagaaaaagcaaagccaacaaaattccacagtggaaaaatcaagaataatgaaaaaaggctttactataaagcaaaggttcaaaagcttggaagaatctataatctatttacacaaaaacaaagtgaagtttccttattgtacatgtgttcttcctttcattatctttatacataataagttctaaagataaaaaaaaacaacaatataagcttaggtacaaaaacaaaggaatctttagtcacatcattacttgtaacaaatttactgacctaattggtaatggtaattataaccatcccacccctttattcttactactattatttttttgggaaaattaattttatgttccacttatataataagtatgtattatagttaaatatcgcttgtataatgtacctagctatatgtatatttgtatattgtttgcaaaaaattaacaagaaggcaaatttattatggttaattacatgcatatatatcactaagattatattgaggtgatgattaagacccccaaatgattctacaccaaccttatgatttccttaagaggcttgtactataagggatgattgtatatattctatacattataaattaagtgacactacaaaaaaacatccactttgacaattttttggtcacaatataatttttttatgattcaatgtgacaaaaaaattactcataactaaaacataatatttaaatataagttttcattaatttaattttagtcacaataaatattgcgaccaaaaatacatttagtcacaacaaactacatttagccacggtcattttagtcaaaacataagattttttattttatattttatttttagttttaagttttgttataattaatgacaattgttttatgcaattgtgtgtctaagaaaaatataaaataaaaatccttcttgaagaattatggtactattaagtatatatacatctttttgaagataggtctaataagtattacgacaaaagtaaataaattagataataatctcacatatatatatagcaatagaatttttatttaagaatacacttgaaaccaagtaaattatattttaaatgagaaattataaataaatagagttacactagaaaaaaaaatcaaaataccaaaaaatatcaat

SEQ ID NO: 308816 - DNA, 1197 bp, Cannabis indica
gtgtagtttcatacctacacagtttcaaaattatcacacttgatcttctccaagtaatgtgggattgcacaactctcagtctttcctatacggatcacatgactctatctgtcagaatattaattattacgactataaattttaatacaataaaaattgtatcatttaatacataacaaattgggacccaaatctcgaccccgacctcagaccctggacccaaacccgagagtcagccccggatccaacccgaatttggccctagactgagaccctagactcgacccgagccccaaacccagagtgaacggtctgagttcggactatggccagagatgggatctaggtctagggacacagtcggggttggggttgagtttatgataaagacaacataattttatacaaataccaaacatagtattgtattaaatactaataaaatacaatataatataatctaacacaatataatacaatgcaatgcaataaatataacacaatgcaatacaatacaatacaatataacatagtgtaccaaaggagtccataaaagtatattttgtaaatatattaatgttgagcttcaatttcaaatattcacttacatgtatacaatatatacaaatagattattcaccctttttgaattggcttgttataataattaattagttgtatgtcacttaattaatttgttacaaactatcactttttctagatcttcttcactctacttcattcaaatatattataataaatattctagaaccaaaagaaaaaaagaagaagaaaaaggaactcaaaaaaacaaaaaagatatatagctatagcaacttgaaaatatataacattactaaaataaattattcatttgaggaaagtgtactatatataatattgaaatatttattatataaatatataaataaggttcatgcatttaacttgtcaaataaaccacacgaggcctaaatattctttatgtaatttataagtaataataaaaaataattaatcaaagatacatgcatatatataaaacaaataattatcaataataacagattagtggatctaataatgatcaatttttatgattaattcataattattccatcatcagagaacgtcataaattagatgtcatcaaaatatttgatgatgatactgaaattgtaggtcatcactataaat

SEQ ID NO: 308817 - DNA, 1409 bp, Cannabis indica
aaaaaacttttttattgtacttattattatagttttgattttttttttttttgtatacacatctaactattttgatgagaatgaatatttgcatgaagtgacaaaagattattcggcagtagaaatatttgtgtaagtgttagttacaataaaaaaaataaattaaaaaaaatatatatcttgattttattaaaaaaaaaatacatatacatataaaaaaaaatatatgtatttttcttcttattttagcatattttaaaaaaatatgtctttgatttgtttttttcttcttttgacatatttacaaaaaaatacatataaataaaaaaatatgtatttttttaatttaataacgtatattaatataaatatatttaaaattaatataaaactaaataaataaataaaataccatcatggaagagtgaagactttatgtttcaagaaaattaaaagttttgggaactaatttgtcaaacataatgtttgaggatcaatttgccaaaatttatatagtttggggactaatttgtcccaaaaataaaatttaggaactagcttgccataatttaaggacctaaaatacaaataagccaattattttatctttataagcttgagttggggatgttaagaagatgtttttgatttgttttttttattattatttttaaaattttgtaaattaaggtgatgaaatgagtaattctgtctcctttatttgcccttaatttttttggctgttaatttgtccatatcatatattagtgaaatcattcttgtttagttggagttgtattgatttggctgtttgttggcttgtgaatattgaataatattaataaatcatgatattattcatttcatgcaattgtatatatgcagtggctgtgtgtagtgagctcagcaacttaattaaggaacaagtagtcatgatgacaaaacatcaaaattaaaatggaaggtgagcttattttgacaccattaaatggatctgaattaataacttgatgcatgtgtatatatattaatttaacaatgattccttccttattcctatattaagcatcagacatcatatgcatgccactccacttattacacatatatagataaaaacgtctaaacgcctctcttcaataacctacacatgtatatagcctctcatctcatctcatctcatggagtagtgatgcctgcatacataccaaaatcatgagaataaatacttcaattcccagcaaaatctaaataatatagatacaaaagttcatcaatttattatttgatcaccattaatgaattgtattattatatatgtaatttgaggagtattaattacaatttctcattataattttttagtcaatttttatgtttgaaatcacatgtcaaaatatatatttttt

SEQ ID NO: 308818 - DNA, 1359 bp, Cannabis indica
gacttaaataattatatacaaatgcacaatatatttagttttaaaaacttcaatagattctatgcattaccctaaaaaaaaaacttagtaactaatacaattcctttggttagcaaaagataggattaaatatgtattttttatttttatattgtacttttcttattttgttgtttatttttgttatttgtatattatttttttatgttatttggatgttatttttttattatttttatgtagttttttttattattttagtgttatttttataaacaccgtaaaaatgtaaaaaaaaaaattaacgtaaatatgtaaaaagtttgctaaaaataataatttatgtaaatttctcaaaaaaaaaaaaaaaattggttaagtaataatattaataataataatcttataaaaagtgagataatattataaaataagatttaatttaaacacccctttttgtcctatactaaaaggaaaaaatagtttattgagtgtttggtgtggtgctcatccacaacataaaagagagattgggcatatatcgttaccatttttaattttttttaaggagtttgaactaaagataacaaccgatttaggtttggatatatgagattaattatggactaataacttcatgaatactttatagacttcaaagttgaaaaagttagggttaaattaactagttaaataatattatatccaaaagagattacatgttatatatttcttagaaaacaaacaaaacaaaactataatatcaccaattaatctctttcaatgaatttgagccaaaatgcttttttctaaaattgttgacaaatgatctttggtgtcaacaagtgtcaccgtatttgtgacttttaattactctatcttagcaaatatattatgacctcacacataacataagtagtagcaaattttatgacaattctttctaaaccatatatttttttcagaaaaaaataaaagttctactgcccataaaacaaactctagtgttagttggttttgaatataattattttagattttatggaaattttcacgggtgttttctaaaagatatatttataggatcatcaaaataaaatacaatatttttgtactaaaacaaattaggatgttcgtaactgttatgacctaattaaacttaatttgtttatattattagtggagaatttttttatattttaaattttatacacctattttttttttcgtggcaatacattcttaattttatttttatttagaaattgagacgttagaaattttaccagtgtataaaaatatggaataattacataagatacaattttttgtaaaaatatttacatttttacgtttaaa

SEQ ID NO: 308819 - DNA, 1241 bp, Cannabis indica
ataatttttatgaatatcgctacacgccaatttgttgaatccatttatgacagtattggaggaaatataaaaattgaacctatttttttacttgtggttattatacatgatccttatcatacgagtcatttttaaagattatattttgagatgatgtgtggtgattcggttgaagtttcaagacatgcaaacaatgttagaaagattttgttcatgtacaaagagtatggtcgattataatgatggtatgcataattatctaatactcaccttggggaagagagtagggacaatgatgatgaaaataattatacttggttcgatcaacaatgtaaaaaaaagttaaagaaattgaatactcagagtacaaaatataagttgataagtattcaatagaagcatgtgagaaatctaaaaattatgattttgatattttgaaatagtgaaaatagaatccaatagatttaagattctttcagagatagcacaatgtatatttgctatttttgtatctactgttgcataagtatttgtactttattagggcactcatatatactcagaatttgattcgccaaataaaaaacaattaacattgatggagcaattggagaagtagaagcattagaaaatggtaatgcattatatttttactatattttatatgtgttttcaatattgaatacttaatattattatttttgtagaaatactaacttgagttggtgatatcaattgaatgacatttttattttggaccaatgaaggatttatgttctatgatatatgtagtttgtgcacttttatttattaaattagcatttattattataattttatgttaaatttctgttacaatttatgttgaacatatgttataatttagattggattgtaatattttgaactcattaatagtttcatttggatgaaaaattaagtttaatttttttaaagattggattggatggatcttatttgattcgataaattttagatgaatccgattcaatatatggatgcatccaataaatagaactaatctaatccaataacttatttgattgaattactcggagaaatctaacatccgatccaatgtataattgggattgaatcaaggtctaaaaacattaaatatctaattaatcccaaccagagcattaattactcgcacccttctttctcttcatctttccatcttccccatcatacctttttgtcttctcctcatttactcc

SEQ ID NO: 308820 - DNA, 1826 bp, Cannabis indica
agtgattctaatcactttgtcaaaaaaaaaaatagaaatgttaaaaagatactaatggtgcctaatattatttatggtgtcatatcgttactactgtaattatgtatcgagtcccgcataatttaatttaataactattattaaaaatcgttaactatttataagacgtcacatataaatagttgcatcattgatgtctagtaatattaaatgtaagctcaatctggattgtctactatttctcttttaatacttaaactgtgtctaataaaaagtttagatagtgtgctaaatttaattcaaaatatagacaaatgttatatttattataatatttttcattatgctctaatgcataatatcattttaagaacaaatttagaagaaaaaaaaatatcattctaaattaaatatttaattgctctgtgaattcggtggctcatagtctcaccaaaattgttttatcttcagatttggcaaatgtgtagtggctagggctacccaactttgtttaagtctccagactattgattggttgtctgcctttaatgaaagttcttattcaattcagaaaataaaattaaatatttaaaaaataattactaacaatattgtcattcaaaaatgcattgatgtctattattaaattaatgacaaaattgtaattaaataaaatatatttattctgtgctaaattaacataatgttgtattagaattgtacgtcggtcagtttagtcgatttatgttatattttatttaacccagtgtaaaatttgggttacaaaaatataagtgaaattcgtctaattaagaaaaaaaattagtagtttaatgaaattagtcggtttggacagattaacaactaatttttcttttacactcaattattatattttagttaatggctaattagcaattttttcccgaactttgacatgtactaaattatgccccctgaacttttttggccgttaaaaagtccccctgaactattgagattgttaaatttaaggactttatctaattttagtaaaaaattactaacatggatgaaagttcagggggcatgatatagtacataacaaaatttgaggggcatgatttggtagatatcaaagcttgaggagcatgatttagcacataaacaatcactcaaaaagtaaaattgaatgaaattagataaaagtccttaaatttaacaatcttaatagttcaagagggatttttaacggccaaaaaaattcaggaggcataatttagtaaatgttaaagttcgggaggaaaaactactaattagccttagttaattgtaataataggacaaatatatagattgaattcaaaattcaaatcaactaccataaaagaaacatagattgtttttttttttttttttttttttgtagtaaaaagaaacatagttgtatgaattttatattttttaaatatgtatgtaaattatatgataggtaaatatatataataatacatttatacatatatataaaactctcttaatcgggttagtcgggttagttcagattgattgcgcgagttggtattattgtcaacccgctcaatataaagattggatgagttatattttcgtcggattattctgtttgcactatttgttgggttatgtcagtttagtttaggcgctttaacaaattttatgtacagcccatatgttgtttatttggtcaaattcgacataacttttgacatctgtcaaatttaatacaatttttttttttgaaataattacataaggcaccattttttgtaaaatattacatttttacgttcaaagaatattttttt

SEQ ID NO: 308821 - DNA, 1673 bp, Cannabis indica
aaacttaaaattaaaattaaaattaaaaacctggggtgtctgcatttcccaaagttttttcctctccaacgttttagttacaaaagatgcattgtttgcctgcaccataattattaaacaactttcaaaataaacaaggtgaaaatattaggggattttacatttaatatggaactcatgcaattaatgcctataaaacaagataggtagacataaatggttatttcaaaggcaggagctagatcttgctcctgaatgaaacacgtttataataatatcaaaactgaaatcggcctaaatccaatagttaaaacaactaatcatataaaggaaataaacatgggtttaacatgcattcactacctctttgattgtagctttgacaggaacaccaagtacagctgctccatgcaaccaaccatcttcaatgacctaatatgcaaaccagtaaacttattcagcctcttagagcagaataattcacggaatgtattcaaagttcaaactttgaagtaatgttttgagataatttgcattatgtataattataattataatttcttatgcttatagttggcttattaaatggacagtaagtcttctcaattaactttgaaacgtgcccccaacatgcctgcatatccacagatgcaactgagaatgtctcagatatagtgtcatagcatgcttgcatttccacgaatgcaaccaagaactttccagaatactctgagtgattctttagtgaatatgacgtgacatgtttcttacgcatcatttctcatatttgatttgggttgtcatcacataaaataagatttttctatgcaacgcaaattttacaagtaatggtcaaacaattccctgaatcaatcaggaaaatatgcaaatactattagcatgtacttgacaaggaaggaagaaagaaagtgatggtgcaggatttgatactgaagattcataacgttcttgtacattaaaaattaccagaataaacttaaaactaatccaatgagttataaagtgcataaaatatgttctcacacctttttaacttcttctgttgttaccaaaggtctagcagaatcgtgaatgcacacaagcttagagtttggatcaattgcctgtaaaaagaatatgcagcactactattaaaaggccatttaatgtagaataccccaagcataaaaccaacataaccaactgcaagagattaaataatatagccactagtacacgtcttaagatgcaattcagaactatatgttaaactggtaaaaatgaatataatatccagataagggaaacaaacataaagtagttatcggtgtatcttatgctaaagtgacatccaaatagaaagaaagcagggcaaagaaacactaatctgacaaatggaccaccgaaaatatatttggaaagaatgccaaatttaaaataggaatatggaaatcaaaaaattatgcacctgaagtccactataaactgaatcctgtctttcctttccaggcagagcgaatttaagtccaacatggatcttgactttggaatctgaaacattacaagttgctaagtggctttagctccaatttacataaaaagaaaatactttttacttttaaggaaaatgcatgtcacgaatatgaagccaattacagagagagagagagaga

SEQ ID NO: 308822 - DNA, 1166 bp, Cannabis indica
attaatagatatatagatataatagcgctacaatttattttatgaaggtcttatctggtacaatatatatctttgaggggatcccaatatcatagatagatatattatatatataatcaccagtacatagccttaatcctgcatgtacaaaacaaaaaacatattaattagtgcaattaatataatcaacagttgatacacctacatatatatatagtacatgtattaattaatgaatacgtacgtagaacagtcgaagtctcgagtgatagggggcaaactgaaatcaatgttacattctttggggacactagaaattcttgaagggtcaacgttaggcaaaccaccaacggcttgcttaatgcaactacaagcagtttgcctgtcttttgtggtcttagctgacgcagccagctgtttggccccattgcagcatgcgtctgagggcttcggctccctcccagtcacgtactggacgcatggggtcagctgctgcaccacttggttgcattgtggctggctagacccttcctgctggctccaacccacctgtatcaacattagtagtgacactgctacagctactactttcactctctttgtactcattttggtatagtaaaaaggaagaaattaatattaatataaggagattatatattgtactgttaataattaataataatgtgtttgttttgaatgatgatatgaaatggggtgttgagttgctgattatataggctctctcggatgatgggttggctgggcatgacaatttcgtgatgagtttttctactcggggactcgggaggttaattttcacacgcattagatcttttcctttgttattgttcagctgttttataggagaaaatatatcattcggtggtttttattacgtgtgggagaaaataggtttttgtcacaatatttgtgatgagctttttttgggcaggaaaataagaagtggatgagtctgatctcatgaagaacaagtgagcatgtgttttaggatcattaccgcagaggaaacaatcttgcacattgaattcctatcagccgttttcaatctgttccaggacaccaactaagacacaattttcattccattcttttatttggttgcattttaaaatattagaatggcattccaatggaatgctctt

SEQ ID NO: 308823 - DNA, 762 bp, Cannabis indica
tatatatatatatacatatatccactaaaattgtcattaaattttagaaagttaaactgaatcgtaaactcatttaagaacacactcaaactcagaaaccaataatcataaaccaaaacacgacgccaatgtcatacttacaattcaattcagtaattaaaagaacacattcataaatacataatcaaactaaacataaataaattacacacatgtattatattatattatattatatatatatatataataagcacctctgtttctttgaaaaggaaaaggtgttgagtctacaaactccaccagtaactttcggagacagaatccatggctgctgcaagctcagtatcagacacgaagacatttctctctccctcacactctcaggaagactagaccagagcctataaatatataatcatttacagaggacatacataaaaataaatattatataaaagaaaatcgaaagaagaaaaagggaaaatcgaaaaggccccagctgtcattttccttagctccacgagtctgcaacactcctatgtctccggtttcgcaaaataaaagatgaattaacgaggttcatattaaaaccaattagtaatgggaagagtagatcattgatcttatatatcacaattaattttcacacattaataacgtggaataattctaatagagtaaaaataaaaattaagtgcatgtttgacattataactaaaaattgtttttatttttaaaaatagaaaattgttttttgaa

SEQ ID NO: 308824 - DNA, 1062 bp, Cannabis indica
tttttttctttcgaccaaagcatgcctgaggagagtgcggttgaatcgttgtagcttcttcttgtttttcctcttcttggctattattattattattattattattattattattattaatgcgttttccattttcaacagctagaacctcttgtggagaaggaaaccatttagtcctggaagaagaagaagaagactccattaatttttggctagctattaatgatatatttgataagataataatgatggcattgcaccttgcatcttctccaatatttatagcacactaaacgatctttaaaatgtataatttaattttttcatttttttattttggtattaaaagtcaataaaaatggcagcaaaatcggataagtttagttaattaatatatataataggactaataataaaagtatacaatatggctttaaacatatataccaaatctcatgaatctattttgttgaagagttatagaaacttctacaatttctgtttgtgtacatattttcaacgtacaacggcggttcatcaagtgatgaggtgttgcatgaaaatgctttattaatttatgtgttgtgctacatacgtacgtgtgaggaacttaattagaaattaattttagtgtaattaatagatatatatagttgaattaattggacacaaaatctacacgcatgcatcttccatctcatgaccaccggaccagtcttttagtgtgctatgcatattgccgtgagccttattatataaccaagtccaaattttatgcctttttgaattggtaattaaattctttgccttctacattaagtcttataatttattcttaaaaaaaaaagaaagaaaagatcaacgcatatcttgatgttaagaaagagagattataattctatatataattaaatgtaaaatgtaattggagttgaaaatgtctttgataattaatgttatatatatatatgggtgcactcttaatggatattacttatgaatgagtaaaattagaaaattttgagttttatgcttaatttttctatttaattaaaaaaatct

SEQ ID NO: 308825 - DNA, 749 bp, Cannabis indica
tttctttgtctattctttagcatttagatattatttttcactatcttcgcaaaaaagaaatcaaaagttaagttcacaaccactgattgcttatttaacaaaatcattaatgcattgtatgaaaaaattttggcaaaaaaaaaaggatcattctttgatgattgttcaacatgtcattgctgtttatataagaggtaaaaagcttttgtgtggcgttctttggcatttgtgcaatcatgtgttatttattatccatatagaatctgaatcacactggattcttgctcatttaaatattgaggaaaaagcgtttgtacatgtacaactctttgtcgattgttatgaaagcttgtcagccattttcggtgttgttaccgtattttttttccttatttgatgagtttaagaaggataacaaacttgtttctttgcagccttttaatgtggttaaggttgatgaacaatcactaaagtaaattatttaaagttttttagtgtaattttgttatttattaggtgttttcctttatgtaattattttgttgttgtttttatgttgttttttcagtgattgcggttgctttaaggtatcgtttgttgaatacttcattaacaagaaacctattccttccatatttgatgttaagaaacaccgtaataggctggttgtgttgttcactactacaaaaattactttttgcttcagttgtaaaatgacacaaaaacattttgtgtcggttgtctaaact

SEQ ID NO: 308826 - DNA, 2175 bp, Cannabis indica
aattcctcgtgaactatcaaataaacactgaactttttgtctaattttagtaaaaaaattctaacatggatgaaagttcaagggtataatttagtacatatcaaagtttgaggggcataatttaataaatatcaaagtttgggagcatggtttagtacttaaacaatcactgaaacagtaaaattgaatgaaattagacaaaagtctttaaatctaacaatctcaatagttcagggagaatttttaacggctaaaaaaattcaaagggcatgatttagtacatgtcaaagttcgggggaatcctaattagccatagatttttataaaaaaaccgtatctaaaaaaaaccttcaaaataaataggattattttacaatacacctcttaaaaatgatgtattgatgcaccatcaatctgttttagcatatagaagaattttttagttcaatttttttttcagatattctataaaattttaagaaattctgataatttacaatatagaaaataatattcgaacagtgtattacaatatatatattcacgcgtgttcgggagttcagataatttgaaacctgtttttaacactatttgataaaatcatgcctcctgaaaaaaatcctaaaatctaacaatctctatagttgttcgggaagaaaaaatcctaattagccaaaataaattttgtatttgttcgttgaacaactagaaaattagaaagcaaccttctgtattattggaaaataaaaagaaaaaaatccgtacaaatgtaaaataatataaattcatatttttgtaaaacttttgttaattttgagtaattatgaaaatatccctgtatttaagttaaaatttatgatatccttgttgaataacaaaaaaataataaataataaggaatgtgagtggatgacaaccatagcaagtggggcaacatacgaaaagagtaagtatatcgcaaaagggcttgagaataaaaattgcatgattcaaagtggaatgaagtgcccgaattgtgtgtttataagcttattatagtattcataaagtgaacttttaggtagaatcacatcacatatcaaatatcttgttttttttctaattaattatatatttgaaagggtgtgttaagttgatttttctaaaggcataaaaaatcataaatatctaaaaaaacaaattataaaaaatacagttatatagcattttaaatatttttatgatttttaaattttatttataaaaaatatagactttttatattttcatattatttttatgctgtactcttgttattgtatttatgggctaaaacaaattacattttaaaaagattaaatatcttccttttaattaaataattatataacaaaatataaaaaatctcccacaaaatattataattttttatctaaagtaagtataaatattttttataacaattaagctcccataaaacaaaaatcttgggtccgttattgattgttttttttttttgagataaagccaattcattaataaccaaaagttataatacaaaaggcttaattgaggagggtaattccttccaccatgtacatttagtatccaccgagagagcatatttggctaacaaataagccgcattattagcagatctataagtgtgagagatctgagcctctgggaagttgaaaactaaaagagaaatattattcaacaaacaatggaaatctgaaatatgcctttgagtagcttgcaagcctttgaccaccaataaggaatccgtctctatgtaatggacaggtagttgagagtcctttagccattgcaaactatagattagagccaaggcttccatgatttctggcttcaaacaacctttaaaaggcatagccatgtcagctatgatatcacccgtgtcattacgaaggattgcgccaaaaccagaagtattttccactgcatttactgctgcatcagtgttcaacttcagccttccagacggaggattcatccacggcagttcctgctgctgagatcgagtagtagcagttgttgcatagtcagcaggggatgtgttgagtcgagctgattggaactcctcaagataatccatggcaaaaaaataaagtcatttcaggtggctttgttttagaaccatgtctttccttatttctttcattccaaatgctc

SEQ ID NO: 308827 - DNA, 1030 bp, Cannabis indica
aatactaagaggcacttcaaagtgtcaagtaccacaagatgtgacatactattacaccacaagatgtgacatactattattggtgcaatttaatatcaagtcacacatattttattttgataaataacatatagaaaattactaaccaccgaccacataagaatagtagtagacacaatgaaagagcgaggccaaaatttagcatgaggcaatatatgtaaaattattttattttattttttaaattattttttacatataatttaaaaaatttaaaataaatggtaaactattgagttatatataataatataagatataaaatccacattggaatagaggaacacacctactaataataataatttacaataatattccaataataaactgtggttataacaaatcttccattgaattataatgaaatgacgaaaatgtccttcttagtgattgtattgctaatggtgacgtagcacgtcacccgccaaatttcagataaaatctgataacacgtggcgacatgcaagagtgcgtgtttcttcacgcgcggcaactgaaataaaacgcttactcgctctagccacttgttcgttgcggttttagtctgtttggctttttaatttttgttttatttttatttttaatattgaagaatattagtggaaaacaactcacataaatgtaaacaattttagtagaaacataaaatgggtgggggcaacataaatagtatttatgaaatatacattgtatttgtatggcaaaagtatgaaccattagtaatggagtggtttgattattctaattaaccaataaataactttgttaatacctattattgttccttttttaaccactttttgaattaaacgacatctaaagaatacctgtgtttattgtgtctgtgtgtaaataaattagaaacacaacccatataagaaggattatatacatatattttaataataataataataatactaaagggaaatttgattttctatacttagaaaatcaaaaaaaattt

SEQ ID NO: 308828 - DNA, 851 bp, Cannabis indica
tttttttttttttttgttaatcactcaacaaatttaattcctcataactttgttaaaatggctcatgcatatagcaagagtgtgatgagaataattgaatttgtgtaagttttttatttgtgtttggcagatgtctaatgaagtgtttcattttattgagataaataaaaagattagtccgtgcaatatactactattttgatatttgaaattatctagaatttgggaagatcttccatacgttgaaactaacaattttaccaaatatatataaatggtttaaaaatatatatatgtaaaaaaatatagataacgattaaaaataaatttacaagtcataaataataacttgttactcgaaacataataaaccacacatgacacattaataatttattattgaaaagtaaataaagcatatcattaatggctctttctacgggttcctttattagacaggtaaaattaacttcttctttttttcgtaacttttttgagtgcttttgaaagcctatttcctgctaagaaaatgaagcctatgttagacttttatttgggcttacattaaattttattggttttattaaaacttgggttgattggatagttctttgctgtattagcccatgttgttggtgatcaattgttaatgggcttagcatctgtgagtaaagtctaggtgaagcagaagtgtgggcttttctagttgactgaagcctttgatgagcaggcccagcccaactagggttttgtagctaagtcccctccctaactctataaatacatattatctcatcacaattgtataccttttgataatcagagaaaataaactgcttctgatttagaga

SEQ ID NO: 308829 - DNA, 2416 bp, Cannabis indica
taaataaataaagaacaaaacaatagagatgtttagttaccgtagcttcaattttcgtttgtcaaaatgggacatgtagggcaaaaaaatagagttaccttatgttacaagactttgggttgtgctatgctacagtttataaacaaaatgtgagcacatcattggaaaactaactagtatttgattacatgatggcgtaaccaaagatcgtacatcaccatatgaaatgcatcgtatttgattggaggtgagttccattggaagtgcttttgaatctgatttaaacatgccatgtaaaaatatgctctttgaacatataaacattttgtaaacgaaattaagtaatgaagttgaagatgagagaggctctcttacctgaattaagttcctatgaagagcaagaaactcttcatcaggtatgtccttaagaatttgtttaagctggtagacatcactctccttaagtaccacagaaaattttcgccaatcaaggatatcgttgaatggaagatcataatagtttgataatatcactggaaaagacatcagattataatacgttagcatagaactcttcaaaagatggaccacaaaatgttttcaaataatgacaccagattcttatcaattgtttttaagtacaaacccctgtaagccactgctttcccaaacctaattgactaaatcggttctttcatttaatgaacagaaacaagagtagtgttattgtttgagcatgcaaaattcaataagataaaagaacgaaaagtcatgggctggcccaaaatttcatattagatgtttataggttaagcaagctgaaaaagtattaatgggccatcatgtgctggacagcttactgatttcaaaaataaaaagaccaaattcttaccaggaatgcatccataatggatggaatcggtaattcgagcactgttcacctgggaacctccagggcatatgcagtacttagtgatgtaaaatctcttttggtacaccagattcccagtagctctgttaattcggttatttaatacataaagctctgtgtcattttcccaaacttgtgccaatataactcgaattttggagttccgatgaccagcccaaaaaccaaggacagtcctgaaaaacatcatttgattagccagtaattaatacacagtaatacaaaatcaaattaacctaactgcccagcactaactaattggcaaccactactagatagcgagaaactaatgtctatacacatacctgttctccacatcatttcctccagcaggcagagcaaaaggctgtaatatttgaggcagagcaacatctttgtgtggaatgaacccaacatcatagctcggagagcatacaactcgaattgaattctttacaagaagtgaaagtccttctgttgccctaacaccaacatcatgacaagtgacaaaaaagtgatctgctcccaaggttctattccagtaaggatatttggaaattaagccctccacataattccggacaattatggtcatattctcataagttgttccctgcaaatatttataagcacatggttaaccagataaaaaaatgataaattagagtaacacactcttgggtcgtgatcatgctcatttagaagcaagccagttcaggatctcatgtaaggtgcgaaaaacttcagacaataagaaattaaacaaaactgacaggaaaatgggaaaaaagattaattagcaaaaagaggattccacaatgtggagtaaatttactgaagaagatggaaaaagagtgaatcgaaacagaaaaaaaaaatccagcaatgcctacagacaacttgtaccataagaatacacagaaggttaagcaaaatgatttaaatccagaaacattaagtaatgttaattgcatgtcgattccaaagtttctgtcctgaagaaaaggagttccctgataagcataaaaaatatatatttattatttataattacttcggaccttttaagatcaagcacagagaattcaaaactcagggtcaaaaaaataaggttaaatacaaataaaattagcacaacaagtgtgatatcctgtattaatcaaggattgtaataaaactaacaaaatcatctttacctcccccaaatgcattccataaggtaattaagatgctaaataagtaaataacctttccccctcacataattttaataagttatccaaaatatatccttccaaagcaacagttacatgaactcacacttgctaatatacaaactcaaccttctatagagaatacatatcacaatgctatatcaatccatgcaaacgcagagagttctttttgtcattgaatctattatttcgaaattagatcattccatatctatgattaataatcctcaaagcacagtaatgtttaattaac

SEQ ID NO: 308830 - DNA, 1573 bp, Cannabis indica
  modified_base (109)..(109): a, c, t, g, unknown or other
gtcaacacatcattgattgtaaatgtatattctttgtatcactcatgtctataaatgaaaggttctcactcagaaatacagagctgagttttggccaaattcattttcncttgaaatctatcttggtatcagagccgtgtggccaacgccaatgtcgaccggtcaatctcagactccaccgccacctactccgaccaacaaccaacctcctcgcacaaataatcctcctgcacaacccgttagcagtttttcctcttcctatggcaatagttcctctctcaactatactcagcctttcaataccctaaatcagcccttctctctcaaattagaccgaaacaactatacattatggaaaacaatggtgtcgacaatcattcgaggtcacagactcgatggctttattaatggaagtcgtccctgtcctcctgaacttgttcaagctgctgcaacaccagaaggagaaccagaaggtgaaaggatgttgaatcctgactatgagcagtggatagtgagtgaccagctgctcatgggctggatctatagttcgatgaccgaatctattgctaccgaagtcatgggatgtggttcctcatcagctctgtggagtgcccttgaaaacctctatggagcacactcgagggctaagttggacgacaccagaactttgatccaaaccacaaaaaaaggtaacacatctatggctgaatatcttagacaaaaaaagatgtggtctgatagtttggcactggctggtgacccatatcctgagagtcatcttatttccaatgttacatctggtttgggtattgaatacttaccaatagtcattcaaatagaaagaactagaatgtcttggcaggagttgcaggatacattgctgagttttgataataaactcgaaaggcttcaagctccagggcacacaaaggcaactgatcatacagcaggaggttcatcttctggaccctctgccaatcttgctgctaaaccaaacactcactctcagggaagaggaagagggcatttcactcctcatcaaggcagaggttcgaacaacaattctggccgtggaggtggttctagaggtcgaggtagaggcaggacaaacaattcgaaaccaacctgccaagtgtgtggcaggtatggtcgctcagctgcctattgttataataggtacgatgagtcttacatgggacaggatcccaatacacagcagcctcaacaaacagggaatcacacagcgtttgttgcatcacctgaagtggtcgatagtgatgtctggtatgcagattcgggtgccagcaatcatgttacagctgctgcaggaaacttaaaccagaaaacagattacaatggtaaggaaaaattaaccataggtgatggtaatcaaattaacatcacctctgttgggtctggttttctccaaactgaatctgattcttccttggtactaaccgagttattacatgtaccaaaaattgctaaaaacttgattagtgtgtctaaattgactgctgataataatgtgattgttgaatttcactcaaattgttgttatgtgaaagacaaa

SEQ ID NO: 308831 - DNA, 1786 bp, Cannabis indica
cataatgtatgtatatgctagtgaaaatattttttttattgattatacaaatattttaaaaataacttcatttttaataattagttaatatacaagcaaaattaatattgatgtggaataaccaaaaacaaaaagtacaaacttttgtgttggtaaatgcttttttttaggttagtaaaaaaaacaatcctttaatattggaaaaggaatttactttaatttgagaaatgtattccaaaatataaaaaatgaaaactgtaattattatgagagagagagagagcaatcatggaagcaagttatttgtttaattaattttgtaccctactaattggaccctaccatggtcttgcttttatgtacattaattattactaaccatataatatatatatatatttatttattcaaaataatgacatgatgaatatccatgctgctttttgtgaatttctcaattattaattatatattttcattaaaaaaaatatcaccatctctatttaatttataaatttatttacaataatataaaattaaccttctacatgtgatggttataagtggataaattaattgaagaaaaaaacaacaactattaaattataattacaaacaagtgttagctagagtatttgagtgtttattctttttaatagaaaaatactcattttttttattaaattagatctagaagcctttaaaattaatattttatttatgtttcttttgtgtgtgtgtatataagcacatatataataaaaattatcaaatattattaaacatcatttgcggttgtacttatctacaagcctaataagttagctaaactatatataaatatttgtatctataagtccaatcaattattacactataatatatatatatatatatcattataaattatatattatagacataatgaccaaagttcattttgatgcttacattttatataaatagggttagggttttgtcatgtcaataatatatttcattcattattagattgatgagtaatgtattaatagaaagttaattattaataattataattattaaaagcctaaatacatcaattaaataaaagtctttagtacatatataatgagctatatattttataaccaaaaaagtatataataataaataaacatagccaaataaatatggatatatatatgtttgttggaaaattttgcagtttggagaccatgcattgttttcagggagcatctatttatttttgttttggtactttaaaaaactataattcaaattattttatttaactgtatatattatagttatagtaaatattttattaatttttgaattattttaaataagttatcatgccaaatattaaacttacacgcgcacatgtgtaatttttttttacacttgtgcaattgactatattttaaattatgttttgtatcgaaaaatattcataaaatctcaataattaataaaatacttatataattataatattatatttattatataagaatattgaattataatatttaagttaattaagatttttgtccttgaaattgaactttaacgtgtactaaattatacagcttgaattttttaggccgttaaaaatcttcttgatttattgagattgttaaattcaaggatttttgttcaattttactaacggaaacctaacaaaagtttggaaggtataatttagtcctgaaattctgtattttaatattcccagtttaattatttaattaaatgcggaataataaaactggtactgaaa

SEQ ID NO: 308832 - DNA, 1088 bp, Cannabis indica
ataagatttatcctagtttcggtgttagagatcaaagtgatccctagccatactccagttgagaggcatcatcattaatccactttaatcaggttgaactttgtacaatctctaatgacagagttaagagctttgtactcgaatatgaagaacactttcaggtcttcctaaatccccaagtacaccctcaattcttagtcacaaagaactcgatcctcacaaactctttctaactctctctctcaaatttatgtacaagttacaaatgaatgaaatgggactatatctatttataaccatagctcaaacactaggtaggggaaaatagttataacaaaatggagtcaaaacaactgaacccaaccgacttgacttgttagttaagttggttattttgttggaggattagctactacattaatgttaatatggcaatatttagtattatgtggcagtttagttttggttgtctggctagggagtcatggtttggttgtggaagctaagtgtggtagcacaccaggaaagcttgagccacatattgttgaggtgcttagaatcaatgaggttttaagttagattaaggttcatgattgggtggatgttgttattgaatgtgatagttttataatgatcaatgatttggtgaaaaataatagcatgacttctccttatggatgtgtactttcagattgtaaatttgtaaggccattgttgttgttagtattagtgtctattttttttttcttttcattttgttaaataatctgttaataaacttacccatgctttggtgcattctttgatccataattaatctaatgaagtgatgattcttattaaaaaaaaaaataattaaaaaggttttaaaattttaatttttttgaagagaaaaattacgagtggggccaatgctttaaagcacgtgttaaggatccaaccatttctcagccgttcgtttttcatcatgtatccatgttatgttgtttgtttatttatatttattttttagaggagaactaagtataattttttagttaatttttatgctcgaagttatatattggaatattttttttttatttttt

SEQ ID NO: 308833 - DNA, 798 bp, Cannabis indica
aattttttttaggtttttatatttttaacatgacatccttaatgatttaaatctgggtatactataaatgagagagattagtgagaatgagcatgttattgtaaaagagagtatttcgacggtttaaaatcgtcaaataccctcttttaaaatttagagcatataattttgtgattataataaatcattgggaatactccactacactatagttaagagttttaaatagtcacataactttattagcaactattctaaaaaaatcaatttgaaaaccgacgaaaacaaatttttttgtgtggttgtttggtccaaaagaaagtatatatgataaattaattaagctaagtgaataaataataaaaaaaattaagtgaggcaataatattattatttaataaaatttctcttgtacagatagagtgattaaaaaaagtttaaaaattagaaattttatttcttgattagaaaaaatctattaaaatgaatatttatcaaaattttattattacattaattttagagatgaatatatttcttcacacttgaaaattgaaagtaataatattaattaactaattttattcctatatttattaaaagcatgtataattttagattcatttcttcttctctactaatagatataaacttaaaacattattcaaatatttatgacatgcatgtatatatatctattctatataaagtgtgcctatataaccgaattcttggtttatgagaaattcatgggtgacttattatttatattaaaaataaaatggtttattattaaaa

SEQ ID NO: 308834 - DNA, 1594 bp, Cannabis indica
atgaaaagtgtaatcactttttgtccgtacaacaaaatcagccattttttattttatagggaatcgttcgtgcacactgcacataaccataaaggtaacaaaataactgcattaactacaactaaatactattagaagcatatttaatttactgatttattattattatttaaaatttattttaattgtaatgaaaaaaaaatgtatatatatgcagaacacctgcaaatttacccataattgtaaatgtataactaattttggattagttatcaagtgaaaaaaaacacacgatcacattgaattgtatataatatatagtaataaaaactaatcataaatttgcatgtgtaatttttgtggatgatttggggtggaacacattacctttgaataaataataataatatctgactatataaaataataataatatcttaccataagaactggtttttttttctctctttaaatagtgattgaattccacttggtttgttgctggaagaagatagaaaaagtgccaaaccctttatttggtcatcaaggattaaaaacattacttgtttcttgtaaccgtaagtacttttatttttgtataatttcttcaattttaattttgaaaagtattttttgtacaaagaaaagaaaagtaatttatagataacgcatgtgtccattgtttgtttaataatcccttcccgtcccaccaaaaagaaaaactggatcaattttcatttatttatttatttatttatttttataaaaattaatatatatatatatatatagttagttagttaaatatatttttcttttttttcttttttagtaagatcacaacttcctataaatcataagaaaaatgtgtaataaattttaataattttttttagataaaagttattatattaaaataagtgttataatacaatagacattagtggaggtagaagtttctccaaccataaacaatcagtatccaccgaaagagcatactcagttagagaatgagcaacagtatttgcaaatctctttacaagagaaatccgcactccaggaaaattatacactaatagtaaaatattagccaacaagcaatgaaaattcgagaatgaagcatgatgagactgcaatcctttaatgactacaagagaatctgattctatgtagtcaacaggaagttgtaggcctttcattcattgtaggccatgcatcagggccaatgcttctataacttctgccttaaaacaacttgggaaaggtcttaacattgcagcgatggtatcacctctactattttgtaatatagcaccaaaaccagaagtttgcgttgctatgttaacagcagcatcagtgtttaacttcagcctacccgatcaaggtgggttcaaccacttgggtgttggttgaattgattgagaatgggcttgtggatgtgtgagtttagagtcgacatgcttacatgttgaatggaactcatccaggtatgttatagtcttgaataacagcaactcagttggatgtggttttgtaccatgacgttccttgtttcttttcgtccaaacactccataaaatgcaagcaaattgtt

SEQ ID NO: 308835 - DNA, 1346 bp, Cannabis indica
aaatgagtaggaggaatagagatagatggataggagagtacaacagttctcagcagatactgctagttggagaaggtgacttttccttctctgcttgtttagctaaagcatttcgctacgccgataatatggtcgctacttctttggattctctaggtaatttatatattatatttttaaaattatatattaattacatgacttaatattactttttaatctataaattaacgtagatgtgttactgggaaagcattggcattgtcaatcgcatctggatgagttggagaagagagattgtttggttttgcatgaagtagatgttcatgacatggaccgacatcctacccttaaagacatggaatttgatgtcattgtctttaactttcctcatgctggtcatgtctcttggctatgtgaaagggatgacattcttattcagtaagttaataatttcctacactaactttatgtgtaaatacatattaatgtttatttgtatatatatatgatttactttataggaggcacaagaatttggttggaggtttctttagaagtgctagtaaaatgataaagaaaggtggggagatccacattactcaccggggggacgaaccttacaaccaatgggaggtggagaagctagcccaaaatgaagggttgattctcaagcaaaaagtgtcgtttttgaaagagctttatcttggctaccacaacaagagaggcagtactatccagggcaacaaaaagttccctctagaatgctctttcacttccaagttctctcttcctcatcatgatattattcatcaccacccaaaaacgacagctattgttgttgatgaaaagatatctatatcagatgatcaaaatgacatcataacattaatatctgaggaccatgtgcacactcaaatgatcagtattgctaataacaataatttttctgatggaaatatcacagatgatactataattgatggagaaataatagcaccaactaatcgtcttagtactcttactatctcagaacatgaccatgaaaaccaggcatcaatgatcggtagtactgatgatgagcatgatgtcgtttctcctgttggtgatcatctattgatgatattaatgatcatctccatgaaattaagaatattacagatgagatcatgtcgttgaagaggtgagtatggtgaaagggttaaccattcttcagagaatgtatatgttggattaaatctccacttacactgatattaagacccaatacaacttaatacaaaggacagaaaaggaaatacatgcaaaatccctaagttgaccttcggtctctaaaaccctaacag

SEQ ID NO: 308836 - DNA, 1526 bp, Cannabis indica
tttttgtaaatagcccttaattggactttttattgaaaagaaaaactattatttagtgagtttttaatcaaatattaatcaataccattttcaaattttgtaaaaattattgagtgaactctttatttgttaaatgataaattagaccttatattttttaaaatattactaaatataccataaattgattttttgtcataattaaacttagtaataacttgatgtagtcgtgttatgacaaaactgattatgttttttacatttctttgtgtcaagaattatcttgttatattaaaaaaaaaatatattaaaattaagctcaggatcttatttataccatttagaaaattcaaaatttattttattatttaacaaaacatatggtccaacaataattcttacaaaatatagtccaaaatagtattaaccaccctccttattaatataggcttaatcataacttattatctataatataaacagagtcagctctaagaacagaatcagggttagagctctcatataataaggctcacaattttcaaaagtatttttgttttttaaaaacattatttttatacaaaaatttgaaaaataacaaaaaaaaaaattattaggcctcaactatatcagaaccatgataaaatttgttttgattgaaaacacattgttgtaataaattgttatacacatacttcgagcaaataggtctagttgcaccacacgtgtacaacaaagagaataaattaactcgattaatttaaaagtcaagatataactagcttcattttagtatgaagctcatacatgttcttctcagaataaagtaacatttgcaatattaaacgcaagacactaaacatgttcctaacatataactaaagatgctaagtttgtcaaggcatttaagaatattcattaacgttgagaggcttaatttgcttaagcttgctcatgttcatcaataaaatcagtttgctatttgaggaatacttacctgaggcatgcatccaaaggttgacaaatttttcagggaccttacatcaaacaatcaagtgtttcggcaaccgtatgttacagaatattaagagtacgttaaataggacggttattttattttgaaaacaattacatgttattttctacctaaaaatatatgaatttggggaatatccacgtttcataactgttgtacagattagatcaaaaataattaatatcttacttctataaatagcagtgatcacattataaaagggatgaccaattttctaacttagaagaaattctatcaaattgtatatgtaaccaaagaacataaaaaataaaataaactcatgaaacatatagattttagggggtttttcaataatatacttaaaattgattttatttataaaaatacctttaagaaaattatttgcacaaataccgttgtgccacgtcagcatacataccgaaatttaaaataattaccgaaaatgaaaaaaaaactgaaaaatcgcgtttccagaaattttcgcttt

SEQ ID NO: 308837 - DNA, 1343 bp, Cannabis indica
tttcacatgggttctcgatctatcacttcaagttttctagaagaaaatagatttctcgaatgataggtctggcaaggatctctcctagaaattttaggagaggccttcctcgatacccatttcatcatttggattttgggtgtctaattgctgggttttttttccttttcctctcatttttctagtgatggaattgaatcaagagttccatttttacatggtaaaactcgaggatgacaccacagttgctcttgttgaggaaacaaccactgagggaactcaggcggaagtctctgtaagggaacttcactcggatgtcgcccctgaggccattctagaagagaaagcgaaaaccattctaaaagatgctctattcaggacatctaagaaatccaagaggaaagggaaggccaaggtccctcctcccactcaagaactcaaagactccatctaggagatgtaccaaaaagaaaatttcttctgttaatacaggatgctcaaatcgtacgccactgaagccaaactgctcaacattcttggattgatggggcgtaggatggctacgctggacgaatctgcgtccgtgagcacggatgggttcaatggctggagctggtcccatatttcgagcagggcacatctccctttgagaacttactctacagatttcatttgtaacaccctaactatataggcatgttaacgtgattttgaatgtactgtctagttcgttgctaatcaacgagattaatgaaaagcgtgattaattaaaaaattttcttattcaattaaatacataaagtaatacatttataaaatctcgggatcccgttacaaattacatttacaaaagtttattatccatatacaaaagttgtcacctagcgactattcagcaaaagccttgatgtcccaaagatcgtacgctccaggcctaaccgccccgacatgtacaatcttcacctgctcactctaacgattcctcagctttagccttgcccttacctacacatggaaatagcactgtgagtcgacagactcagtaagaaaagcataaacaatatcatagcaataacctggattatgatcagacgcccatacccccaatcataactctattcccgtgtcccacacggtgctgagtctagaacgttcgtatgacagtactattgaccataatatcagcctatactcggtatgctagtcattctctaaccgtaccgatgtgatactgtcaagtagtatggtactatcgaccataatatcagcctatactcggtacgctagtcatattctagccgtaccgatgtgatactgtcggatagtacaaaagccaacataca

SEQ ID NO: 308838 - DNA, 854 bp, Cannabis indica
aatgaaatcctatgatcttttctctggtttttcttcagccacaacagtgttctagttctttaacttagctgcatgttattgcatggttaaagttaattaatttgagtactatagagaacttttagtaaaacagggaaagaaaaaagttgtctgactttaattgctttaaaaaatttagctcagttgtctaacattactaagttttgcttactggtataatatcttctgctactcttttatctagggataatatagctatttagctataggttttctcttttataaagtgggtgtgtttgaatgtttgttggtaaaaatctttggtgcttgaagtttccagctttacaaaacaaggaatttatgtcagattgtatgttttttctttctttctttctttctttctccttttattatctttatgcttttctgtgtgttccttttgattaaaactgacttgagagacaaattacaacaggtaccttgtcccagctgacctaaccgtgggacaatttgtttatgtgatccgcaaaaggattaaactaagtgcagaaaaggcaatctttatttttgtggacaatgttctcccacctacaggtatatatttgtttttgtccttgagatttttgaagatacagtctatctctttttcagtttgagatgatggtccatgatgccatggaaaactggcgcttcttttggcttttgcaggtgcaattatgtctgccatatatgaagaaaagaaggatgaagatggatttctttatgtcacttacagtggtgagaacacttttggtttctaaatcttaagacaccctctgattcacctctgtttatcttcattattatcttatcac

SEQ ID NO: 308839 - DNA, 1646 bp, Cannabis indica
atctgtttttctggcttagatcttaggatatttgctttgattcatgtatttatattgttgtagagtcggttgatcaaaggcttaggagttagttacaatttcagttgtaactaactactaagtcttgatccactagaggcgaagccaccctaggactgtgtctgtttgcttgtttctatttttactttgctgatgtggatatctgtaagtatacaagactggttataagtggaatttattcaacatcgtctaatttaatatcacatattacttatctaattttaataataattttagaaaattaataaccatttatagaatatataattttgattatcttaattgcacatgataattgagagttaatatatatggcttaaacaaagtacaaatatatcgttattacaatgtcttgtataatgcaataattaaaagaagagttatgaaacgtcgcataagatgttgccacatgatgatgatgatgatcaagaaaatgaaagaagagaaatagtgcatattattattatgttaacatcagatatgataacaatatgtctactttttatttatgtgcatgtgtatataatatgcatatatatatatatgaataatatgtatgtatatatataaatttatatagagctggcaataatagtaatggtgtgtatataatatggtccccttcctagaaaagtcccatatacatatatatatatatatacatatatatattacatgactgtgactactttagtggcaaaagaagccctacttactgtgtgtgtgaagggttgctgttgttgttgcttgttagggttttattattaggctgaacagattattgtgggatttcttgaagaggggtccacttttttgaaccatatatacaagaacaaggaattaattaatgaaagagtataattaacaccatgattttttctttaaatatgtcagtcagaccaagttgataatctatatatacatggtctatatgtatatatatacattgtatgtatcagaagaaaagaaaaaaagtattattttgctaattaattaatgactcaaaaaagagagatggcgacttgtcttgggatggtaaagaaaggtaataaggagttataatgaaagaagtgatcagaggcagttgggttgggaataattgcaaaacgagtcaagcatgcacgaatgaggcagactgttgttttagcagaaaacaccccaaatttatcattaacttcctatttctgataacactcacgctaaatatactgacaaatttatatatttagtacccaaaaaatccccattataccaacttctatctaaactcatcaacatatctttatcaaaaagagaaaaatagactatagtcctgcaaaaaaggggcagaagctttttttctttctttcttttttggtggttaatttagaatataatattggaggttgagttgtcatatcaaaacaatacagggaaacaatatatatatttatatatatatatatatatataaactgagagagatgtcatttctttccttattttacctatgacaaaggtttcattatattctttgtttttatttatatcaagagaaatcctattattaaaattgtggtactatagtatatatgaatttatatgta

SEQ ID NO: 308840 - DNA, 3258 bp, Cannabis indica
cgggacgtggcctaaacctctaaaagatgtcgtggtgtgccttggatatgagtctcaacacgagatgaccagggtagtcattcgtgggctagtttgcatatgcacatgcgactaatgcaccatgctggaaagagacagagttctaatgtatgctagtttggtggcttgtctcaagggcatgctaacatgcatggaggcatggtgccttaaggattggaccatgaatgtatgtgagtccttggtcaatgagggaaacgatttagacagtatcgaatggggcatgattagaagcattagcatgtccgcttagtgtaagcatcttgtcacacatgctaccttggtcataagtgactaggtgagcatcggtgttgggatttgccttatcatagtgagaacctatggacagtgcgagtatcttggctagagagcttcgatgcatggatgcactcatggatacttgcaaccatcactcgacaggagttgttcgagagacggaagtgtgcacgaggcacacgctcgcacgaaaaatgagtccattgttactcggatggttagaaggctgaccttggcttagagaactcaaggtgccacacgagtgtttcgctacttggaaaggtgagcccatgacaccctgccctaaggttgacatcccaacgctgaggtttacatatgacgtcaacgtggatgctgggtgagtgaaaaaatatcccagcaatgtattttttgatgcctcagtgatattttgacagcacttagtccatttccttgttctagtgaagctagtcaccagttttcagagatgttgttgttttacgaaaatgggagactagaaactttccattttcgagtaatttaccatgttggaaatgagaaaatgcaaagttgtgaatttaacttctctgactttatggctctcaacctttatgaaaaaccaggcaaacggtcaagacggaatcagaatcggataagcaggacccaatgctccaggccatatgtcaacctgggccctgggtgctaatttcaaagcttttgggatgtcattttgatactttcaaggttttagaacttgagggcgaggtctcctacctcgcttttgaccattctggaaagaatacttggaacagaattaacatttggatgatcaaagctagcacaccaggttgattgtcaacctggacgttgggcccaacaccaatttaacatgggcactgggctcaactttcatgccctatggttgtggtttcgccctcaagttctcttgtatcttcattatttctgatgacaaaataaatgcccaaaatactttttcgggaaactagttggaaatggtctaggttgacaatatatcaacctgggtgctgggcctagtgccaagtgtcaacatgggcattgggtcccaaatttggcctcatggaagttacgtttggtccccaaaaatagtgaatcttaatatttgctgaaaatggagaatatgcccaaaagagttctcagaaaagatcattggaattggcagaggttgacattgcttctaacacacatgaagcgttgtttcttctccaaaagtacatattttcccatgttatataaagacaaagaagatgaacgagtcaaatttacatctgatacttggaagtggccagatggacaaattatcaacttgggcgttgggtgcctaggcacaaaaataaactttctctgaatctgattttcgtgcctcaaatatgtctgtggtatatctagttcatgtcccaatacaaattttgacccatttgcactaagatggtcctaaaaattgaaatcctagttaggacatcaacgtgggcgctgagtgaaaccctaagtgccaaggttgacttttggggccagattcatgtaatttcagctcttgggacctgaatttagttgtttcatgtcttcacagtagataatactgaaagatagtgagttagaaacgagtttttgaagtttgaacttccattctagagtttccaatgtcaacctgggtgcagggctaacgacccctcccaggtcgacttgctatgattcgggactactcaattctgagatattatctttcttgccacgtgtcaaatattaaggttcacgccatcaaaactaattttagtgtaaacaatttgtatggagttaatctccatttcgtattgatcaaagcttaaatttttcttgtacagattattgttgatgaataaaagttaaattctcatctcttaaatttgttccatttgaatgtgtcaattattgtgtatcatattattcttaatttcgagtcttgattaagttttgttctcaacgctatggttaactcacagtaattcaaatatttaattagtaaataaaccttgaaaaataaagatgaaagtatttggacaaaagtatagacaaaatttaaatttggtgaaggcacttttcaattgtgagagaatagattattaactacttgttaaaaactagccaaacttgctctaactttgatttttatatatacatttttatatatgaatgtaattatgaagatgaattaatgtgtatataaaaaggacctttgtcgttttaaatttgcatgaaagttggccattatatgtttaccggtcacccaccattctagtatgttagaaagcagtcaattgagacagctaattgtttcaattttaacgtaaatatagaaattttcataatgcctaaatctatatatatatatatacacacccacaaatattgacaaaatttaccatatttcattaattaaatgctatcatttgtgtttctatagtattcaatgccattacatatgatattataatcgtgaaaaagtgacattgtgattctgttgacaatttaaattctatacttttgttccttcatacaaatcggcaccattttttttttaaaaaaagaattatcgattaaaatatgcagtaaaagctctgttttttttcttaaacaactcccttctccttttcgaaaaagaatccaaatgatttagggcagtttattacagctgtgctatggggaaaaataattataattgtgttgtaggaaaaaataattatagcagaacggtagaaaaaagttgaacttaatatttggtaaattataaattttaatgtactacgagtggttaagattctagtataataataataataatatttaatctatttcattaaaatcacaaatatatatataaaatatatgttatataaaatttttattttctatgtatttttaattattttt

SEQ ID NO: 308841 - DNA, 1320 bp, Cannabis indica
caatgtaatcctggctccgccactgccaaggttgtttcagaagtaaaatggaagcaactctttcatagcatcaattgggctaatcaattgcaattactgatttcacaaatcgaaattgatgctctaagagtttcctctgctctatcttctacactctctgtcttattttgtttttagacttaattttaaatctacattgtcttttttatcttttttccctaaaattattatcactcatgttcgtaagcatactaatcaagccgctcacggtctagcaaaatatactttagagttagatgaagatgttggttggatggaggaaatccactttttattttctctattgttgtaaatgacaatttttttgtaggttccactatgcataatggaaaattaagagacaagaatgaagaagaatctcttccaaataataaaactttttatttatcctcaaggcaaagatgctttaagaaaattagatgataaaacttttaaaatctatagttgactatgaattcattttgatttcttcatcgcaccaaaagaatatctataaattacaaaaatagaaataaattattaacaaaattttaggaaaatataaaaattacacacatgataaattaacttataaaaataaataataatgtcaacttatctcatcaaaatttctgagtctttaataataataataatagagcattgttattggataccaggtgcctagcacccttagacatattactttgcgattggctagcgatattctctaaaaattattatattaaattatataggatctaatatttaattagatcaatagcgataataacacatagaaatgtattacgcaccactggtgccttttagctttgctcataataataataataataataataataataataataataataatatgttttaacaaaaataatatattgagatttcttaattagggttacccagtctttagtattttggagggcaattcgtacatcctccaactcttgtatagagctctgttcgttttttttttcaatctgaaatagcaaggtgatacatttagggactcagtgtatttttatttatatacactgcaagatcctttcttttttctatacaaccaaacagagtagttaggtttctcgatagttctctgataatctcagggttattgtattgtattgcaagattaagctttattgaatgtgccaagaggtatattttagacgactgtacatacgtttagtttactgctctggcttttttattattattattttgaagatcactatgagttattcaaaaaaaaaa

SEQ ID NO: 308842 - DNA, 1507 bp, Cannabis indica
tccattgctatgaaggaaaaagcaaaccttttgaaacaactgatggacgcaagtatggaatttatttcgttcacactatcctgctctttggcgtaggaagaatcctagccctaacataaacagaagcctactgtcccaaatgtcaaataccaaaaaatcagataaggggttagtgaacttacttgtcgaatcagaaggggtgactggcgcatcaagaaaacctgcttgaaatctccaaagccagttgatgcagcggtcacagttaacctgaatgtcaaacgcttcgcctaatgtagaacttttccagtccaattgaagcggtgtgatgtctaggagaagctctgcgtggatgatgagtgatcgttggatcaggctctttaacacttcttgcatgtcaaagatggctggagaagaaaaagaggttatagagaaaatatggaccctcgagcaaataaagtaaaaagaatgccaccacaggtgatttatattttaaaaagaaaacaagcctatcaaagctcgacggttcagattctcacaatagatccaatggctagggaaatgagaagtcccgtacggtcagcttagggcccacaaaaatgtaaaggtccctttctacgcttcatttagccgctagttgcactcaaccttttttgttaaacgcaccttgccacgcgcaaacaggggtagacaagacttcttaaaattctatgtgataactacgcaaaagaaggtaaatgtcatatgtagcctcagtagaatacagcttatgtgggggtgtatctgggacctaaatctttagcacttgttaacagttaacactgggagcagtagcaagctcctgtgatccaaagaatctcgaaagcttcgggggtaaatattatcaaagttttcattaacaagacacatggcatgatcagagggaagaatacaaccacgacaaaagttatttgaggtaaccaagaaaagaaacgtctcccagacctagaaggtaatgagagacgatgacctccgggagtgacgtcttttagtaaaggacctgaagcgcgataaaggacttgtagacattggccacgtcagcatcctataaaaatcactccatgcacgattacacctttatttgagacaggaccagattttgtcccccatgccagatcatggtagcgcacgtatgcaccctaaaatatgcttctttttcccaatggcctagctagagagtattttacaaaggagagatcttcgcgcgatgcgtgtcttggatcatacaaaagtccttacaagcagctgtacacaacacgatgaagagggttcttaccagccaatggtcagatcgtcctttagcagtattgaccttggtggcgtatagagtatgaaatgttgggttttgtgccctaaataaaacacattacaatctgataagctatcaatatagaattttgaagtgatttatgtatgtatgttacatgtttatggtttactatacatatttgatatatgcagaaaatcagtt

SEQ ID NO: 308843 - DNA, 735 bp, Cannabis indica
gtttaattttttttcttctgttttttttttgaaacgctagttaataacttgaaaaataattttattttccataactaaaatctagaaaaaaataatgataaataatcgtaatgaaaaaataaaaaagaggataaaataaaataaaacaaagttagttttagtataaatgaactaaataatttccaccgcttttttaggaagattcctttctagtctctgtacaaagaaatcactttcccaaacaaattcataattttgtttcgttttttttttttcaaaaatagaaaaatgagaagatttaacagatatttgaactgattatatgaaattcgttacattttatatttaaattcgatatatttctctctcagtaggaaaaaccactcgtttttcttttcaccatggagattgcttcttctccaatcttttcttgctctaaagagcatcaaaggatttatcatgaatggtttctttacgcagattcaggtacattctacaattatttctctaattcgatgaccccagttcaattcaaatttaaacttttgttttttttcagatggtgatggccgcattactggcaatgatgctttaaagttcttcgctttgtcgaatttgtctcggcaagatctcaagcaggtttttcattttctttttcagaggacttttttgggttgttcgtgttttaaagtttttgacatttaatatgaatttggttcttcttcttcttcttct

SEQ ID NO: 308844 - DNA, 1451 bp, Cannabis indica
aagagtccaattatctgtatacaggattaattattaatgtataagttggaactttgaagttgaagttagaacgagttgagattggacatatttagtcagaattagctgtcacaaaagttctattgcatatcaattaggttgaatcttgaatgcacgtgggattcaatgctttattcagtcctatgtgtaataagagggcaatagtaacattgtttgaagatgttaaaaatttacaacatgctaatgtaatttacaacatgctaatgtatagcacttttaaaactacaataattatgatttgacacattattatttgatataaatcttttttagctacaataactttttattaaaaaaaaaataaaatagcatcaatgctacaatataacatctatgtaaatttctaaagtgatattcttttctctctaatagtatagtattttaatattttgccacataatatatccacctcaccaaacatcttatgattagagatgctctaatgagccatctgatctgcagaattgtctgagctacggaaagaatgagtttttttttagaaaaatatatataccacaatattatatacactaacatgacaatgtgtaaaatagcgtgtcgaaattagataaatgtgattgttttaaaatactatcacttcactatgtatcatattatttctcgggtaaattatgggttaacctagctacagatttttactttacttttatgctgtttctttcttgttacaaaatgagcaaacaccaacttaacttgagtgttggttataaaatttgctgttttgaatctatatataaatatattaagcatatagaccctggtatattctaattgagtatattaattaatacagtgatagccctaaacacaatattccaaaaatggaaatgtaaaaagcaaaccccatgtggaacatgagtggggagccatgcactggatctgctatcaataacacaatagatgttgagcaggaaggcaacaaccccagcatcaaatgcaactgtacttacaacaataacaccacttgccacattacccacttgtatgtcacttttatatatccctttcttcttatttatcatttttgttttaacattaaatcatcttccaattatattaaaaggtaaatagcggcataagtacctaaagttttatgtttgtaagcggcataaacccaatatttatttttagcggcataagtatccaatgtttgtaaaactgtaattttcttctaatttcgtcagtacagactctgttttgaatttattaaaagaacatttggaagtaactgatactacatatttctatctagacccaatgattaagaatttaagcaacctgtttaagataataacagagtctgtactgacaaaattaaaaaaaaaattacaattttacaaacattgtgtacttatgccgctaaaaataaa

SEQ ID NO: 308845 - DNA, 779 bp, Cannabis indica
aagatttctcaagaagcgtgcgagtgagcataaattatgctagaaacactcgtgttgatttgtaaggtcagtcatcaatccatgaatccgccaaaatgatatactcatgtataagagccatgaatccatgagtgtaaagacccaataaaaacttgaagcgataacattataaaaaatatatgtatatatataatatattttcagccacttaaaatttgatttcctttcaaccatatatatatagagagagagagagaaagagagagtatttcttcactcattgaagaagcattccaaatatagaaaagattgcaatcttagtggtcagtccaagatttttttactatcatcaataatttagtgagatgtgttttgtctactttttatccgtatagggtgaaataagaagtatgggcctcccttcccaaaaatatatgtattaaaacaaaaaaattcaccaacaagacctaatcaaagaagataaaatatgagttccttataattgattaataatttttagaattattgaatgtcgaaagagtaaagaaaagcgcgtttattgtaaaatgaataatgtttcgaaatttatcctaattaactatctagggctacttgaactctctcattaaactactaagttttagcttaggaattgatagaatgatggaaataaacaaaaggaaattgataatttggtaagggtgttcgcggtgcgggtggtactatttttgaccatttttttaaactaacccgcacatgcggtttttccaatttctcaa

SEQ ID NO: 308846 - DNA, 1007 bp, Cannabis indica
taataataataataattcagattatatctaatctaccagattgtgaagctgtagttgcagaaacttctttgtggtaattagcaccatctccaccatcatcaacaactctaccatttgcatgttctaccacaaaagatgattttgaagtagtctcactttcacctatggctgttcctgtattattagttcccatttcccgccaccatggttgactgtaaacacttgtctgaaacacattacttccactgagttgtggcctcctttcttcatgttcagctttcccaggcatcattcacaaactttctacacctattcaaaactaagaaacaaaaaaaaaaacttagtttccatttatgtaaatttaactaaaagttaggatcatcatcatcatcatcatcatccaactaattcacaagaaaatcattagcttcaaaaaataacaaattgatttaaacttaaaaaagtaatttttggttacataaagaagaagaaaaaaatgcatgcaaacactaaaattccaaaaagaggaaaattttaacaacttagtcaaccaataaatttgacatgcaattctcaatctatatataaatacaaatatatatatatatatgtataggtcaaatttccaagtgaagttttagtatattatcccactaaaatttgtgatctttacaagtaacaaataaaattaaaaattcaatattttttctgtaaatagggatttgagtatgcttatcattacaaacccaaaattcaatctttttcagttatattgattcaacaccaaaagaaatcaaagcccagaaattcagaatcaaaattctccatgaaaacagaaagcaaagacttcaaaaaaggagttaacagaaaaaggaaagttaccagaggaaactggagggaaaaaaaaccctttcaatggattaacaaggtgtgaacagaaaccctaaccaagttttgggctttcagagcttccaattgagtcccattttctctctctctctctctct

SEQ ID NO: 308847 - DNA, 788 bp, Cannabis indica
gagaacctacgaatggttcttaagcaaaagagttggtgaacaagcttcattgaagtgcaatcttgtaattgggatttcattgccatgtttggtgtttgttgcaacaatcatatctaggcgactagaatctagttacttggcagtggcataggcgaacaagatttggtaggatgcccaaggtctagtgtgttgggttttaccaaaccctcttgaaacgactatcattgttgctcattaactacggggattataatttcttctttaataaagttaggctacctttacattaatattcggtctaatttaatattttgttcataatttaatgttgttagtaattacatttataaaagcatcatctgatccattagtttttgaattggatatttaattacactattttaatatatttacacatgtcattgaattgaatcaattattaattgaattttgaggttgacatctaataatttattaaaatttaacttttaacatataatccaattcattgtaattggatatccattcatttatatctatatacaaggcaagtattatactgagtcacgcatgattgtttaaattttttattatgacacagttgtttttgttaattccatttttgacatatttaattgacaaaaatattttattatttattgtatatttcggctggtatgtgttaatatggtttccttattttgtgtattcaaacttagaaagaaagttatctaactttcctatttttggaaaaaaggtaaaaatggtaaagtttggttacccgattt

SEQ ID NO: 308848 - DNA, 876 bp, Cannabis indica
actttgtcaaaaaaaaaaaaatgagaattttgaaagggaaaagttaaaaaaaataaaataaaataaatagaaaccatatataatgtaattacagtcagctacttattatttcttttttgtccataagaaagagaaaagacaaagtaacttcactaatgagataaaaaatacctatctatttttgggagaaaacaggaagaccaacaataaatacatagcaaatcacccaaatatgtcttttaacaaaaataacaataagttaagaacatcagaaataagttgacactatcttttccactttctaaagcaaagtaaagtgaactatatgtgaacttatatgatcatcatccaaataatataccaataataataaaggtacacaaaaagaagtagtcaattatggaccaatactacaccattattaatgaattattttcttctttttattcaaaaagattgtgtcttcctatattattagagagcgcactaatggggttttccaacttgttccccattcataaagactgcttctctaccctataatcaattggattatctatttctttcgtgcaaaacactataatatattgagggcatttttcattattatacaattaaatttactatattagcctttaaaagtactatattaggtgcaaacaaatttatttacataatctgattaacgatgaaaggaatatttgcaagaacttttataattatatatgcaatataattaaatagggctcaactcgatctttgttcgtgatcgcatccccaatacttgtttctccatcgttttgatcctccaacaaactatcacggtaaatatctctctctatggttttttttttttttttgtagactaaattcatt

SEQ ID NO: 308849 - DNA, 2243 bp, Cannabis indica
ccgttatactggtttggttcaaattcaaaaattataaaaattcggaccaaaccaatctgtgaacactcttaataagaactcattgcaactaatagagtaatttaaatctcaaccgaaaattgtataataacttaatagaaacccaaaatttataaaaaagaaaaaaattaaaaaaaaaataatacatagaataattatccaagtatatttataggaaggagataggagatgggcatgttcaaataatcttctttaaaaaagccaataaaaattaaatggtttttatttttaattacattgatataatatagatagagcacgtgtttaatgattatcatcctaaattgactcattttttaggttggtggcccggcctctcactttctctatctctttaattcttttaaaataattattattattattattattattattaaatggccttcgttgcgtcttcctagttgtaaccaagttatataagaaataactaaacagaacagataaatataattattactcgttctttattttctaacttaattaagtgtcaattaaataattatttggtcaagaatatcgactaacatagctaaattttataaataattatatttatccttttccactgagttataagagttttgtttgagtttggccagtcttattagctcactactactaattaattaaattaaattaatcaaattatattcttattatcaatcattattatgttttataattgctaccaaatgtcagcataagacgtaacaaagcaagacttattctatacttgtaattttttaattttaaaaaataattattttataattaaaataataaaagctaccaaatttcatcaaaatatatatgatttttttcccttttaaattaagtatagttgatgcctttgttaatatatatgtgatatagtatagacctataataaattagatgggttaggttatagtagaattttaatatatggataatatattcaaattcaaaatttaggggatttatttggaggaataaaaatttataccgtagactaactaaaaaataataatgtttgacaaaaaacaaaaaatctatacaaattattatagcttacgtaccttcaaacaaaaattttaataactttaataaatttatttaattttgttggacttaattattgttatttaaatatatttgtaaggaacttttctattattttcttgtacaatgaatttatcatatattttgagtgaaaaaaaggcccctcttagtcttttactgaaaatataattttaaactcatacttgtatacgtgtgatattatgagccttttattttagaaaaataattatttaaacctcatatattttgtatagtgtagttaaaaatttaagttttgcccccaaataattaaaatgatttcaaataatatatgtatataaaagctggcaattttatatttcgaccccattaaatttgactaaaagagaatatatatttgtatatatatatatattttatgaactaaaaaaacgaaaaatcttaattagtagctaaagttgttaactactctttaatcagaaaaaaaaaaagttgttaactactcataattttagtgatattttttctttgtaaaaaaaatataatttttgtgatttaacttatatatatgattgtgatagctaaattattttgctaatacaattttataaaaaaatataattaattactataaattatatttattagctaaaaattattcttaacattaattccaacaaagattaaagtaatttctttctgttaaggagaaaagtaataaaaacatagtaatatttacagtttttttttttctcccatttcctaagaacttatgtatatataaattaattatgcaatgcgtgcaaggtaaattaatatttttagtcgtaagtagtgattaatgtagaaatttttgtgaaagaggttattaattagttcagttgaccttctttaacttatgattaatataattataattggtcttaggttctacttttcttttgtagtcctcatttttatttgcacgtaaagtaatttataattaattgaatacttctttccaaattgatgataatatattcataatcaactggcaagcttgctttgtccattttagcatacttatatatatatatgtagatttcagtatactagatgagagttacgtggcgagccacgtaaatattagttttatataa

SEQ ID NO: 308850 - DNA, 1009 bp, Cannabis indica
tatgctgcaaattactttttttgttttcgccaaaatccaacttacaatatatgcttagcgaaattactaactaatttcaataggccattcttaggaaatattaagcaccacccaatagcaatattagttgcaaaaatattgaaagagtggctacctttccttttctttcctttagtcaataagttttggcttgattttaatggtactttgttggcgtgcgatattaaaacacatcaacattttgcttttatttagccttctatagcatgaaccagctactaatttgtcatttcattagaactattttcaaacccactatatataattatgccattctccagtgtagcttttattatattcgcttctgcgataaagaacctataaaagagcgcaaggaggacgaaaagaaaaggaagctacgtttcggtcgtgcagatgtactagctaggaatgtctcgatacgaataattttttctatttacatattcataatctatatggaattaattatggatatatagctattgtcgtacaatatttttaggccttttttcatgcaagccacggaaagaggagttttattttattagttgtacttaaacaacttttaaaagtatactctcttgagtttagaagttaaaacaacttttaagagtatactctctggagtcgttcactcggttatttggtgtttggtaacactttcttaattagttttctacttttaaaattagaaaagtaaaaatatttttcaaaagcattttctataaaattgttttcacttttcaattttttttaattagaaatcaaaattttaaaaacaaaaaaaaattactttcaatctttttttaaatgcaatcaatattttagactccgaccagactcggacccaaatcccctccccatggccctgacgctgaaccggacttctgaccaaaactcgaattcgactccggacctagacccgacttaaataaaatcaaaaaataaaaatgaaaatgaactttac

SEQ ID NO: 308851 - DNA, 2640 bp, Cannabis indica
ctctctctctctctctcacttgacacttgcctacttgattaatacattgtaatcataagagagctactacatattcaacaacacttgtgatctgaatagtattatctctggtatcaatacaacaaaaagtggagtaggtcattacccgctaactaagggggctgaacctctataagaacttgtgtctcatttacttttctatttttattgtgtaacacgtggaatttatgagtattgaatacgactctactgccggttggccaaatctgaggtcaacagtttggtgctttctttgagagcgaagtgtcaatttatctaatcaaatgacatggttaacacaaggagaagtcttgctacaatttctttctcattgagtcttccttaagaccctatgattggaaatcctgatgttcgtattctagtcacaactgaaatctctacgaacccaacatatgtggccgacccttccatctcgacaggcaccacaaacttggccgctacgattggttaggtggacacaaccaacccagttggtcttaatgggaaaccacacactgttggctacaatgcatttgcaaaaacgagatgcaaacttctgagatggatagttgatcaagagtacatcctttgatctcaccaggcaaaattagaccaccgtaacagacaagctaataatttgataaggtacttcaatgaaagaactactggaagaggtcaggatctcatcatagatcctcttcaaggaagactaatcaaaaaatcggggagggtctatcgacaaactatctaaccaagttcctctagaactagaacaaaccttctcgaactcaaaggatgatgagctttgccacgaagatctagtggcgagaacaggcagactttggcaaccattggcctgaggggtcagcttgggctctctggaataataacgccctaaattgtccagcctatagctggccaacaccttagaagtgtacctctagctggccaacaaggtgaattcccgtcctgggacgtctaggagcaagtcacctggaggccaatctttaatcggtgaggcctaagattaggtggaaacatccaagacaacaataacttaagaagtgagaccaatcacttcaaatacttggatccaccaaactccaaaaggtggtggaatctaccccctgtcaacacacaagctataccagctagttaagaaagaatgggagacaaggccctgtccaacaaagggcaagctagccatgaacaactgctaggcttagagctagccgaccttgaacatacactctcctagggtatggtcagccaaactttggccaatctagggttgtagctgaatcaagaatggccaatcaaccaggcccttgtagcaacagatccttctatgcaagcacagttagatcatatatgagacatgctcaagggcttggctggcccaaaaccatcaaaccttgacctagataggtcaaaagattcaccattctcgacatacatcaatgcctttcccttgtccaagtttaagatgccaacttggaagatgtacacagggaaagaagatcccctagtatacctaaagtactttgagatccaaatagatctccaacacatatttggagatgtgcgatgccgaatctttttggcaactctggctgaaataacccaacaattgtatttgaggctggcccgagaaagatttaattctgggggagaattctctcgagagttctatgttcagttttctacctcaagacaaataccttcacgactggaagatcttgtcgagaaaaagaaaagacaagacaaatttttgagagactacattcaaaggttcatggctgaggccaccaaggtcaaaggaatggcaaaaaaaggccgatagaccaccgtactcggaggcatcttgcaatttagtgaattttggaaagatattagaaggatctcaactagtaacatgaaggagttccttgagtcagtcgatggcttcatacagttggaaaaaactgcctagcaagcccaaataagagggcaagttaatgctggacagacacagggcatcatattgccccaagtgttgtcgacgtgccaaccagcgcaaatgatctttaccaattctccatcaatgggaaaattggatgcaagtgcaacaacgattgctctgaccaacataatggccaaaaagggaaattcaacaattcccttacgccctaaagtctaagggagaaggacgagaagtacacatgcttcactctcctactaaaactcccaatgtaatgcaagccaaccgaccattgcaatatgcatcaccaaaacctgaatcacctgcttaacctctgaagtgaaccaccgaggctcggccgatataaggccaccttttaacatagaatttccattaaaggccaagctctagccagcttcatggctaaacatagaatcatatctccccaaatttttcaaggtttaggagaaaagtaagagccatagaagaagcaagagcaagagtaagacaactcaacctagaaggtgcattgacaacttgcccaatgcaagcttgggcctcagaacacctaggggcaatggctacacgaggcaacaaaggttagtttcaaagcttctaacaatgaggctgaacatgaagct

SEQ ID NO: 308852 - DNA, 1139 bp, Cannabis indica
tggtaaaatacttccttcaaattgtttggaaacataaaaatacgcctttttcataggactaacaagactcactgaaagatcacaattaccttatttctgtcgcgccaaccaagtgcaaatggcaaaataccccttcttgtgttctcctgagtggttgcttgatttcccacagacctagaatggcagacagccgtgttaagccatcgaataaagaactaaagatttgaactagaaggatatggcatgtacattaaaaaatggaagctaagatcatttacacatttgggtagatttatctctttaaaaaaagttcagtattttaattgaaggtcttcgacagggactatagtaaacatcgcctccccaacccacatagatacttttatcaaaatcaacctcaagtccacaaccataagatgatttggcctagaaaagggtaagaaaagaaacaaaggggaataaaagatactaaatcaattttcatgtacagatgtaccgtggagaacaatgtgctttaacttggccagtttggtattgcagtgtagcctccaacaatgattctgccattacaacccttttctccatttcagcaagtgaagccacagccttttcatatttttcctgtataacagtattaccttgaaaaacaggtataacattgactatatatagtagtaacaataaaaattggttcataaagcaagaataaaacaatgaaacagagaaacacggcagccagtgatcatcttaaataaccaagatatcccagtacaaaacaaaacctgaagcacatgtactgcatatgtctgagcagctgcatcccgctctgcaattattcgagcatcttcggttaccttttgctcttgttccacccgcatcaagacctattatatgtacaacccaaaaaatttataggcaggaaaaaaacacagaacatttcctagaaactgaagcagataaaaccttgagcattgcagcttcttgttctttcttatcagagagggcttgatgtaggagggcaacttcttgctccaattgctcaacctgcaaaagtgtaagtgaagcacgcacatgagaaatgaaaaaaggatagaaactaatattgaccaataaaaaaaaaaaaaaaaacgaaaaacgta

SEQ ID NO: 308853 - DNA, 1648 bp, Cannabis indica
cggggggcggggggggaagttgctaattagccttttcaaaattatgaaaaaggacttgggggtaaatgttgcctagaatttctcccaaaatacgtggcagttcaggagcgagtcatgtgggagtggggcccacactatgggatgcaccatcttaatcactcccgtagcttaatggtacaaaggaataatgacagattggtcatctctgggaggggctgactggacaacgggtatttcttgtctctttcttttcgcgagtgaatttgaccaaagaaggatacgggaggactggcggagtgtaacacactgctcgaggctaaaattattgtatacacatttaaggcagtatgggaaagagtatacgataccttacgctgaacatacgtgtttaagggtttaaactcataattctttaatttcacgagaccacatatatcaattgacgattgcataaatgaactatcaaattaatcataaataataaataagtcaagtctcaacaaacacctatagacagcctaaacacatcatgtaaagtaggcaattatgccataaaattaaatttagaaaattgtgcaaagcatgtttatacaaacacaacaatggtggcctttttactaccattacgtgtctatcaataccccaattatgtatagaaatcgaaaaaaaattatgcaataaatactctcattaatacagtaactcgtggactaaaacttgttaatgcctcaaccacgtaaaaattctcttctttactactcattaatcacttcaaacaactctaattaacagttaccaaaaatctcgatcaaagtaattatcttataaattgtaaccaaaaaaaaagggaaaaggtaaaacataaaaaatgagttgatctatttttttttttaaaaaaaaaaagtaaccaaactgagtacaatattaggcctacagaccatgtcaaacctattattttacagcactattggtaaatggtaagtatataaatatatatatatatatatatatatatttatatatgtacaagtgctaaaaaaaatgtgtgggtaaatggaagaggcattgacgaagaataaagattgaaataatgagtaagttttgattatggattaagcacgtgcgtaaatgtgtccactgagaaaataattttttaactaatgccatgttgaattatatatagttagtcgcaacgtaaaagactcggtccttttttactgttttatatattaataaaatgttcctcattttgtattcaaagatgagaaacttcaatatcatattagcctttacattattgaataaaaatcattgtttttggaatctaacaataaattattaagtatttatattttttttttattattgttttacatattaaaataagagtttttagcagtttaatcttttcctatcgttttatctgtacttaatttccaagcttaaattttgacagtaaaattttttaaattactgaactgttagcaaatttaaagtgttattcgattaactgtcaacataaactgcatatgtgtacactcttgtacatttgacacgttaatactgatacacttaatattattatttcaaaattcattttaaatttataaaaaaaataatttaaaaaataaaaaataattataaattt

SEQ ID NO: 308854 - DNA, 1834 bp, Cannabis indica
aaataccagtcgatccttcttcgtgtggattttgcagcaaagatcctcttttccaggtgtagagctagggctaggaaggcctgatctggtttctcctaggttcgtaatgaagcctcttttatccagatatttatcttattttgtctatttaaggttaatcttttatgagctctctgcaatacctttctactctctgctatccttctttttctatattgcggtttttccctaccaacctttagccatgagtcttcactctcatccccatgaacaaagtattaacctcactgatgaagaagctttggtccatgaatttgaaaacatttcggttcgccctgatgcttcccctcaatctttctgccttgttgccaaaatattatcccctaaaactatcaaagctgactgggttgcccaggctatgaaggatgcttggatagttcactgccctttctccttctctgactaccactctggtatgtttcttgtgcgttttggctgtgaaggtgataggagacgtgttatggaaggacaaccgtggcattttgatcgtaaacttattctctttgcccttcctgatgaatttgatactgttgtcccttctcaagtcaattatgttcccctctgggttcaggttcacttaataccttttgggaaaaggtccactgaccttgctaaattcctgtctgagcaacttggggatctcattgaagtccatattgcctctctttatgataccatcttacccttcatgcgtatcaggattctcgtcgatgtcactaaacctttgcgtcgtggtatgaatatcaagtttagatctctttcttgcattaaatggctcaaatttatgtatgaagggatccaaaactactgttactactgtggcatgcttgaccacacttttaataggtgtgaaaagcttctgaaattctgtgatggttcccctattccaccatccttaagttatagggatgttttaagagcacctgctaaatccgtttacaaaaagagtatctttgatctttccaattccactccgtttgaagaattgtcttcacgaaactcagtctctaatcagagtcttcaggatgctatcaatcagtttctggttcctaatatggtgaatacctctttgtccttggatgttttaactgatggtactaggtctgatcactccacttctgggctttcaatgacgtcttcagcaccattattcgttggaattccaagccttccctgctctttgcctactgcccctattatgactacgtcggttatttctagtgttgacaaaggcaaagcagtcatggtttctgaatgtccccgcatcattttatctcccccacccatgaatctgtctaatgttaagagatctttcacaaggccaaacgttcatattgggaattctgttagggaaatgttgaaacgagctcgggctgttgcagatgatgaagatgtagctgtggttccctccattataatctctgaaagcaacacccgcccagaaaaatgagtcttttaagctggaatgctcgaggtttggggatttctcgagcattccgaaacctctcccttttggtgaaacaacatcgtcctcaagttctttttgtcatggagaccaagcttagggctggttctattgctcgttttaagactcaactttcttttgactttgcttttgaagttcctaggaagggtttgggaggggtctttttctcttttggaaagatgttgttaatattaatgttttgtcttattctaatagtcatatagactgttttgtaaaaatgactgataatataagttttcatctttcttgttattatggttcccctta

SEQ ID NO: 308855 - DNA, 1099 bp, Cannabis indica
tttcaacacttgaatgtataaattggtcaatttttttaaaaaaaaatatgacctattaaatagagaaaattacctttaggccaattcatcaaaaagtgacttactttggatgaaatagggtcaataatatttacctgaagaataattccatttggtcctatgatctcaagaatgattcgagttggtactagaggaaattttgtcacttgagagacaaatttgctagcacagaaatcatgagagcaagggccaaaggaagattcaggacaaacttactgtataatagcaggctgccccaggaacaatttgagttcatcaagagtatttggtgctcattaaatatgccaaagtatcggtttgttttttggcaagaaatcaatgctgaaccgttaattcgagacaaattcgtgcatcttcacattcatttggactgcaccttaggcccggtttgtggtgcagcaactgagtcaaaccaacaccttttttttttcaagtgctgcttctctcaaaggatcaatgatctgatctgtaagtggctgggatcaagggtttggccaaatgatttccaggggtggaagacttggttagtgctgaataaaaagagcaggaagcaaagagtgcatactgcaatcatggcagtcctggtgtacaacttgtggatcaacaggaacaattacatattcaacagttactcgagtacaacctctaaaattgtacaggttatacaaaaagttgtttattatagactattaattgttaaaaagagaagcctaaatagtcatgagaggattttatatagagaaaatatattgtaagtaatgtggtgtctcggctaagctttttgctttacttttggtgtaattgattgtgattaatgaagctattccttcttgataaaaaaaatataaaaatagagaacgttgtacaaaaaaataaagctaaaacttcaaacttgaatttgacaatgttcttataagattttgaaaaaagttaaaacataaatatttttacctctctttccgcttttcgaaacatcttgaatcgttcaatttcgagcaagatcgagagagttatggccaaaatattatcagttgttgca

SEQ ID NO: 308856 - DNA, 2246 bp, Cannabis indica
atgaacaaccatcagtggtttgatgaaagagcatctgagaagaagaaaacaaatggtattcatgaagttgatgtcagtactgctttaacagctcaggtagctacattcactaaacagttaaagcagacaattatagttgtcaatgctatacaaacttcagttggatgtgaaatttgtggagaccctcgcacttttgagaaagacgagaaaaacaagaaaatagaaaataataatatttttaatttttaatgataattttttatttttaaattaattataattaaaattatgatttggaccgataatatatcaacgtatttttaaaataaataaacggatcaacagacttactaactaaaaacgtgaccataaaccttaaattttttaagacttttacctcaattatccctattacatagatttaactaatactattaataatataaaattaaaaatctaaaaatagatatgtaattatagtttttaattattttatacacattaaaaaaaacattataccattaaaatacttttaaaaataaaaatacaaaatactgtgaaaaaaaatacaatataatattttcacttataaaaaaattaataatactcaaaaacactccaagattttgaactaatattgtagagctttaccccaaagggagcccttccagaaattctcgaaggccttagcaaaactaaggcctaagagggggtttggaaatagttttcaaccagcaatagacgcgcctcggttagaacctcactagctgcgtcattgccccaagcgcaaagatgcttttcaacgtcctctgctcatctgctttatattacaacccaacttaacataatattctctgatccatgtgggacaaaactctattactaattggatattcaattcaaccccatttttcattggctgctcaggatttactatactcggtgtaattaacaaatctcttaaccaatattaacaaattcctttacagctaaacgatagtgcttgtgctcttactgtattcgagatggttggcctatatttttgtggtgttggtttctagtgagcatggtgactttgtggaagctttctcaaccaaagtgcatgtgaatttaatacaaggaagtcaatttagtagacgctggaaggaagtcaaattattttctttcagttattaagaagtgtccgaattggtttatcattcatttccacttaggggatttggttaaaagtgtgttttaaattcctagaacttttaatcctgctgatcatgggttggcagcttggccctttgtggctactacaaactaaactttgttctttgtcttctttttggtatatattttaccggaggttaaaaaaataaaaaaacataataaaaactaaactaattttgccatctcaaaaaatcatttgataatcacatcaagtagccatgtatgttatttgaaccatgaaatttaaaggttagttttacatattaaataaataggagtaacaattggatcccaaagatataattaacatatatattcaaatatttatgtaaggtgttcccaacagtgaaatccacttgagctcctcttctctgatcaaatttatatttacaaggcaaaactttttgacgacagtaaacttaaaactcaagggaaacaattctgataagcttacaagagatcgttctggacaagtgacttcagcttcttcacttcatttaaaagggaagaatttctttcgcaagcttcagttaagacctcaaaccttttctccatgtctaatggtaaactaactttaacattagaattctgcagcatttctggtttggtatatcggataagattcaacataattacctgcaattatagaatagagcaagaagtcagatacccttttgagatgaaaataaaaggcaatttttcgtacaagcaaaatctgtgagaaaattccaaaagaccaggaacgctgctggtaaaaatcatgtggcaacgacaataagtattattaattatcatcccattgaagatatgaacagttttgacaactgagagtggacaccatttcagcataaaaaaaaagggattggtggcaggtaataatgctctagtttcagcaactgtgggtaatttcaaaaaggaattttaaagaattatataaaaacgaaaatcgcaaacctcgtggtgttgcttcagagagaagtctcgtagaagagacctcacaagcttgttccgcagcaataacttatcaccag

SEQ ID NO: 308857 - DNA, 2932 bp, Cannabis indica
ttccaaatttaaactaagtggtctttacacaccaaattccaacaggtgaaccagtttgctaggccttttcccactactgccatgtacgagagggctcttgcgttagcccaactgcctaacttcaagaaggatatcaggatcctaacctcttctcgtgctttagacgattttaggttcaactttgttattaccccttataccggagtatcagaaatcccgcgacctttgggaccccaaaggccggccttgacggccataacaaaaagcattgtgtctgggccttcaaagaaaaggacagttagggagtgcgactctcttggtgataatttctattcgtctttcttattgcatttctttattaattcgcatgctgttatactttactaattgtttttgtatgtttttgcatatataggcagcctgttgcgacaagtgacctaccaggttaaggggggttttccctcgaacacctctcttatggcccctcctggcaaagttagaaaaatagctctcgctcgattattgacattcatacccatggtgttggctcacctacctcatctcaattgcatctttcaaactccacatctggggcagccaatgataccattctcattggcttaacgtctacgggggctgacttacttgcagcgctacccttgagggttgttgtcagtgcttgtctacgggcttgtcggtggcccgtacctacactaaaggcctcatggatagtatggacaagactatgtcaaggcttgagtgtctcacccctgcccaaattattgcccttgggtgtcgagagatgataagggtaagttttctcatgcttgtaaaaattcttttcttttagccatcatctaacatagatgtcatgacgtgtgacaggccgcgacgattacttcctacagtcaatccaaagttcttgccctacaggaagagcatgacaagcagggagcatcttcactccagcttgagcttgacaccttccatcgagagcattctcagaaaattcttgacttagagacttctgttgagaaggtcgctgctgagaatgaacgtctcaagggtgagcttgctagcaaagaagatgcttacactaagcttgccaaggagcatgaagctaaagccaaggagtatggggttaaagccaaggagtgtgagagcttagctacgaagatgaaacaggctaaatacctctccaccgatgtcttcttcaacttttggctaaacaacaaggaaactgactttagttatatgggtaagaacatggagggcatgttatcatgttatcttattgtcgcaagcgtcgaggaggccgaaataagacagaaggcacatgcagcttgcattcgaggccgtattcttacctcaacgtttgggttgaagcatcagatacagtccccttgatggcttgcttgatggctctttttgtatgcacctttacttttacctatttttatgtcacaccagttacttttgtagagattttatgactatccgagcagttcttttaatcccgtgacttttatttttgagacattcgtgtgtttaatctttttgcttgactatatggcctttatcgttatatatggctttacatgttgtcttttgtttggtgtgtgccatgctatgtgtaagcataccgtaggcatttatttatattcaaccattcaccacacataagttgctcaaaaacgttgagtaatgcaccaacactttaaatttttttaaaaaaattatatctacttaagcggggttgcgtttttgcttactagtccatgtatgggtgtggttgccccccaaatgactaagtaggttcacctcttggtgacttatcttatgacctgggtgttacttttaagtcttggctgcccactcttacccatacacaattgaccattatgaggcttgcaatatgattcaataacaatcatacaagctacatcattatgtgaaaattacttgcaattttattgataaatgaaattggcaataatgccctattacatcgctaattagtagtatttgctttagactaaaacaaatctaaaagaaaaaactaaacactaataaaaattctaactttgcttacgggcatacccttagcatgagttgttgctgaggagcaaccattattgataatatttgtggaggtgctagccattccaatatcggggtactggtataaggttcatgttagagtcgtaacgaccgagcttgtatgtgccaggggtacaatttccgtgatctcgtatgggccttcccagtttggcctcagtactcccgttgttgggtctttagtattggctaagactctgcgtaatactaagtctcctaccttgaagcttctttccttgactttggaattgaaatatctggctactttttgttggtgtgctgctaaccgtatttgtgaagcctctctacgactctctaataggtctagggactcacccatcagttggtgattactgacttggtcgtatgtcgttcgtcggtgggagggtgggtctagcacaatcggtaccatagcataatacccataagctagggcgaagggggtatcaccagttgttgttctttccgtcatcctatacgaccacaagactttgggtaattattctggccagtttccttttgcatcttcgagtcttttcttcaaggtatccttcaaggtcttgttcactacctctacttgcccatttgacagggggtgtgagaccactgagaagctcttcactatgtcatgtttaatgcaaaaatttgtgaacaagacactaccaaattgggtaccattgtcgaataccaatttcaaaggtaatctaaagctatatataatgttcttgactacaaagtcaagtaccttcttggatgttattgttgggaatattttaccaggatctagatttaataacaagtatgttgattaaca

SEQ ID NO: 308858 - DNA, 1716 bp, Cannabis indica
tggatcaatttatgcacactcctagttagtaattagaacaagtgcatttagtatatgttatataatacctataatgagaggtgtaaataatactgtaccacacaatataaaaattgttttcatcattaactttcttagatgtataatataattcatgaaatcaccatacttctaattactagctagttcttatattaccgacattttatatgtttaaattaactcttatttgatatgtaccatacacacatgatttatatgtatatatatatgtatatgtgcataatcacgatggacaataatctctctttaaattcttaggcaaattgtcttatacatttattgaattattaggaattcagatatataattaaatgttgttttacaatattagttacatacttgtttttatttttatttgatcaatcaaataagaatgctagccatatatcactaaaggatgtgcatgtgcatttgaagatcttaatatataagctagctagtaaagaaagaataattaatgatgaggatgcaccgttgttgtacactttaatcaagctttacagtataacaatcctaatccattgaatcgtataatattaaaaaacacacaaattgaagaagatcaattcgaagtaaagacttccacgtaccacttgaaccaacaaaaaggagatcagatacatagaaatatgcatctaattagctaaccttagtactttattaatcgagtcaatattataacgatgacatatatatgtttcaaacatttagtggatgcatatatatgtatatatattttgaactaaattaaccagcaagatcataagtcacatggcttaagataattcttcaacggcttgtttgacacgtagaattcgattacagtgaattatataattttactagtctaatgttattggccatgttaaagaccgaataactaatctagttaatcctatatatgtgtgtgagattatttatgtgagataaataattcctactggcacaattactttttatatcatttattttgtatatcttttatatttaaaaatattttaaaagaaataatgaaaaatttatttatagatttattatctaaattatttattaaaattagtgaaaatatataatattgagagtgctctaacaaactctaattataagatgtatatatatatatatataatatactgaggtatggtgatgtattttaaagaagttgatgtatgtatgatgtaaaagtgaactgtaaaataaaaaaaataaattttagtaatatattttaaaagatagagtagagaaattattgagcgtactctaacaaactctagttattcaaaaatagaaacctagaataattttatcggatcatataatacactactttacatctaataaaaatcaaatagacatgacatatactttttttaataaaaagaaatttagattaaaaatgcaataattttttattttttttttaaaaaaaaatacattacggacgacatactagtgacgacattacatatatatgtatatttatatacatacatatacatatatatatatatatgcgtgtgtgtatatgtaagatgtatatgtacacagtgagtgtgagagatactaacaaaaaaatttacttttagtcacaacaaaatttgtagactaaaagtgaagaaattgtgattaataattataaatcatgattcctat

SEQ ID NO: 308859 - DNA, 1893 bp, Cannabis indica
aaaaataaataataattaattattaataaaccttttctatgaaactgtagcacagactttgaccaaccaacctgtatgttattttcttataataataagtaacaacatcaacattatacaaatatttaatgaagctagtaacacgtaagtaaaataatcacgtggtatgtctttaaaatacatatacatagtacaggttcgatatttgagattgaatcgtgacaatagacaattcaggttttttagatttttttttccttctttcattattatcctaaagctgaccacaaataatcgaaaaaaatatatattaaatttgttaataatattattattttgatttcgacattatttgtcttggctaatagcttggtgataagcttgtgtctccttataacgtttttttatttttttaataatctcatcctacgtttaagttttgttttctcaatatatttttttcgttagaaatatgtttatagcttatttttatttactttgagatttgaacatgttaaaataaatttccaaatgcactatccagatcaacactttacaataaatatagagaaacttaagtggccttcggcctctaacaacctacaaaaagaatcaaaagtttgttaaaattattacaactaacactcagctctctctcctaatctacaagttataaatacatgcaaatctactcaaaaaaagggagaacagatcagaaaaatggagaggaggagacttacagtgattagatccaaaccaaaagaaggacatacataagaaaagaagaaggagaagattagtacaatattcagagagagagaaataaacaatgtaaaatgacaaggattaccaatcgtacttgtgtaatttggaatccagctttgtaactctttgatcttgaagatccaatagtgaaaagagcttttctgaggtgatcagctcgaagaggatgtacccagaaattattggggaacctctataaaatcctggtgcactatttctcatttttttttctgcttttactattgtgtttatttgtttgtgtatgtttttggggtttaatctgatttgagaaggggttgattgttgtgtttctgggttgaatgcagtcttcgagtttcttgagaagaaactcgaagctctggtagggttttcaatctgaagttgtgtgtgtgaaatgaaatgattctagagtgttctagggtaattaaggttaagcaaaacgacttgtagtctaaggttgatgattgtcgtttactcttaactcaaagggagtcaaccggggttagactcagagtgaaaggtctattttaaccttggcatctttgactttttactgttgggtgtaggttaaagggtaaaaattcctacagtggtatcagagccaaacaaggcaagaaaactgcaacagaaaacaatcaagaaaggatcaagaaaattcagaacatcaaagaatcaagctacacatcacacatgtcacaaaatcaacattaggatttttctaaacccattatctctataacttcttgaaataactttatataattatgagttcaatgaaggtggatattgacagatctgatggttcatgtgattatcgaatttggaggaagaatatcagggctctattggctcagaataaattgctaagggttctaagtgaccctgtggaatggccagctgacacaaccaaggctcaacaggaagaattgcttaaaacagcaactggattgataattttcaacctatctgattctataattagctggttgataaagaagacacacctcctaaaatctggacaaagttaaaagaacaatttcaaaagaaatcattgatcaacaagatttacttgaaggaaaggatctttggatttaaaatgagtcaatctaa

SEQ ID NO: 308860 - DNA, 3434 bp, Cannabis indica
cgttagatgatgacagtgtcaattctatatcctcacataatataaagttctgttcatttttatttttcgttttgcaagaacgtgaaaatagtcaattattatcattaaaattgaaggacatgcgtatacaacgaatgtgctctaaaacatattcaagaacatgttcattttgcaaggatgaaaaagggttgcaaacgtgtcacatatactatacaacgaattgagtaataaataataaaaaaagaacatccattagttattcaaagtggaatgcgtgaaggattttaatatcacatataacagacttttagttttttttttccccaacttatattcttaaagaagtcaaatgattgtatatcttaattaaactaaaaattaaagtagaaaattaataattcttttcactttagaacataattttaaaacagtagggaaatgagtgaaagctagagagacaaaaataaagaacacaacatgaatatgatactgttgtgataattgaggaacatttccctaagctaactactttgccgaactgtttgttattgacagttataaccggtacacctatatagctacctatttagaatgagtgagctatttgagagagaaagaaaaagagatggagggttgtaatggcataatgtgtatccgatcactatagccacaagtgagaattaattgtaatattcatagctcaataaagattctaaagctagggtttgttctggcaagagagtaggcaggtgatgtaatcttcatcatcttgtttgaatctcgttaagtttttggtgttctattttatgttttatgcatttgtgtgaaattcagttcactatattcatgttggcattgcacctgttctaattcacattgcattgtctagtgtttcattgtttttgatggaggaataaatcataacacttggagtcaaagctcagacaagagtaattaagaaccgaatcaagacttcaagaaagatcgagatttgattagcaatagcttccacacgttttgaagtggacaagttcagtggtactaacgattttagtctgtggaggatcaaaatgaaagcattcattatacattaaggaatcttaagcaatcgatcgagaagagcttacaactcttggagaaaacaagaagaaactcaaatagattcagacaaaagcacacagtgccatatttctgagcttaggagatgaagtgctcagagaagtttcaagtgaggaaactacagtaggctatggaagaaattggcttcgatttatctgaaaaagtccttagccaataaattttatttgaagaagaaaatttacacattgagaatggatgaatcgaagaatctcagaaatcacttcgataaatttaacaagattatcttggatctcaacaacatagaagtcaagattgaagatgaggatcaaggtattatgttattgagttcattgccaaaatattatgaaaattttgtggatacaattctatatgtgaaggaatatttgaccatgacaaaagtcaaagctgcactgaattcaaaggaaatacaacaagaaatgatgagaagactgatggccatggagagtgtttctttgttcgtggtagatcaaatttcagagatgacaaaggtggctatcacatgacaaatcacaaaggaaatcagtacaagggttcaaaccacactcacaaaccaagatcaaaatcaaagatagacaaacaatgctattattgtaagaaggaaggacatgacagggatgaatgcaaggcattgaaagccaagattcaaagagacaaaggaaaggaaataggagatgctggtgtaccctctgatggctatgaatcagcagatgtcttagtggtttccagtcaagaatatgatgattcttggatacttgactcagggtgctcaatctatatgacaccaagaagggagttgttcagtagtttcaagaagattgatggtggtgtagttctactaggagacaacaaagcctgcaatgtttctggtattggaactgtgatgatcaagtgagaaccatccaagatgtcaggtatgtatttgaactgaaaagaaatttgctctcaattggggaacgtacagaaaaaggttttaccatcaagagtgacagttcactaaaggttctaaagggatctctagtggttatgaaaggtgagctgataaatggaatctattttccaaagggtaaaatcatcattggggaaaatgatatggtggttaagaaaccagatattgacagcacaaggttatggcatttgagacttggacaagtgagtgagagggaaagagggagttctcaaaggaaaattgggcggcaaacttgatttctgtgatgaatgtgtttatggaaaatattgcgaggtaaaattcacacaaggtaaacatataactcaaggaaagctagactacatacactctgatctatgggtgagctctagaacaaaaacactaggaggggccaactactttatgagtatagtagatgactatactaggaatgtttgagtttttctacttaaaattaagaatcacgcttttaacacatttgttagatggaaaaaccttatagaatccaaataggtagaaaataaagaagcttaggactgataatggattagagttctgttcaaatgaactcaccaagtatcaagatcaagggattgatagacacaaggctattgtgaaaaatctacaacaaaataggcttccagaaaggatgaataaaaccctaatggaagagtagtctagaaaagaaattctagggtgaggcactgaaaataacttgctacttcattaataggtatcactctactgtcttgaagtttaaaagttcacaagagtgttggagggtcacataccaataattgaacaccttagggtctttggatgcacaacttttgcacacataagacaaggtaaacttgaacaacgagcactagaatgcttatttcttggatacccagaacatgtaaaaaggtataagttatggtgtttagaagatagatacaagaagtgtatcatcagtagggatgtgatcttcaacgaacaagaaatggccattaaagtcgtaggcacatgtgacaattagaaaggtcaaattgaaaaagggattcacttgcaaataatggacaggggaaatcaagaaagtcttgctctagtggatacacagaattgtactcaagtagaagatgaaacaaaagaggaagaagaatatgcaacaactagcacacaatactaggggtgttcatcaaaccgcttaaaccattcaaactgcccgaactgcaaaaaaatgtggtttgaaattctttgcgatgcgattgcggtttgaatttttcctaaactgcgcagtgtggtgcaatttgcgtttttgaattgttaatatgtgatttaattgcaccgcaccgcacattat

SEQ ID NO: 308861 - DNA, 1246 bp, Cannabis indica
cggtcggttgtaattaaatcggtcggttctcattggattggatgatttatgcacacccctgtgtatgactattaaaaattatcgatgctaatataaagtgattttccaatatgcatatagtgcttccttaaattccttttatgaatgtgagaaaccatatttttttgaaaaaagaaattacacattatgtattaatgagatggttccttaagatgatgaataaaaaataatttgtgtattaattaaaaaatgtacatgattataagtgtaatttactgatatgtattttgagttatgttttaatttgttactttttttgttggtgctatgatttagttttaatgatgatattctttagaaatcagctgctataaaggatgctaatatagttggtgtaagggtttctaacatgtggttgatgtatgagattgagttgctataaaaattgctaagatggttgttgtatgagattgaattgttagaaggattgctaattaaacaattatatgagattgagttgctataaaaattgttatataagatttgcttactaacaagattgttgtcttgtatgttattgtgttactagcattgttagcatggttgttctctcatatactattagattgttagtatgttgtatgagattgaattggtaacgtgattgttgttaacatggtgatagtatgaaattggatttctaatatgattgttgtattgtaagggttgttaacaaggttaatgtagttactctatgagataaaattgctaataaaaaagttattgtaagggttactaatatagttgttatcttatatgatattgggttgctctaaataatgttgctaataataaaaatctctcttttagttacttttttcctattattaataaagtttgtagttaaatttactttaactataggtgccttcgtaattcacaaatttttcatttcttatatatattttcaataaaattatataatgaaaagcaaattatagattttttattttattaggccaatttatactttttatattgaaaaacaattatataataaaattaaatataacataagacttttttttggttaaaatttactttataatgtgccattcattagagatggaataatataacaagttttataagattttaaaagcccttacaccaactcataaacaaagtgatcatctttatcattaatcaaagaggtcacaagacaattaaggtttttttttttttt

SEQ ID NO: 308862 - DNA, 1659 bp, Cannabis indica
ggtatggggtgaatttaaaaagtaggtatgggggtgggggagcgatccccgcacccaccctgccccgtttacatccctatttaataggcataaattttggtcaattatgtcttggaataagtaagcaccatatttgctaaggaaaaggaaattatgagagggaaaagtacatgaaataaagtatcatttaattcgagatggatttacatataagggatgtaacaatcttaaaaacagattcaaaagttatttcttacaaaactatttataaaaaatttgttaaaaatttgttagaaaactccattaggataacgtgtgtgacacattactgaaagatatgcctcaatttgttttaaggaaagtgagagattgataagactagtgtccttaaagcaattggagtagacatatgcttcaaatgaaataaaaaattgaattgaatttttacatagatacaagagcaaaggcagtattaaatgatagggggcatttttaaaggagatttttatttgcatcttaaaaaattataagcacatttcaatatcaagatttactcttaatatttttttaattgtgtttactcgaaaactggcttgataacgtggaaatcattctcggagttgagagttttgagtcatagcggtcaaccctaggaaggatctttaaccttgtgcccaggtttacatcaagggctctagaatgagtatttggatcttgggaagttgtttccaaatcattatacttcaatgttctaagctagcaagtgaagaagacttcgagtcacaatcttggaaactaaaggatgtccatttggcatcctagaagccaatttgggcgcgtagagtttcacccagcgcctaagttgacatctagccttagggtttcagtttatggtcccattttagtgcaaatcactcaaactttgtacttagacacgaataacacctaccgcaagcatgttagaggtattagaatcaacatcaaaatatttccaatttggagcacttgagcacctaacgcctaagtcgacctagaattgtcccttgtgcccaaattgacatattgtcaacttggggcacttccaaccctatttttgaagatgttttttttgggaattttctctgtctacatccaaaatgcagataaaagtactttcagaaacaaacagagccatctagtggctaagaagctcacccagcgcccaggttgatattttgtcaacttgagccatttcaaaggactttttttttgggaagtctccttgaaattttctctgttttcatcagcaacgaagatataagtgtactcaatgagaaaaggagaccatttgggggccaaagagctgaccaacgcctgagtagacctaggcattgatcaccggcacccaggttgacattcaacctagtgcgcatggttttgttgctcaaatacgaattttgttcaagtcatttttcttatcttggtccaaaatgggtgaggagcccttgtttgtgaattctaataccatggaagtaccaaagcgacacccgggaaccctagaattatgcatctagtggctaggttgacacttggccctatgtgttgggttctacttatttgattccaattttttttggagcattcaactatttttttgaaactaatgagatttacgaattg

SEQ ID NO: 308863 - DNA, 1903 bp, Cannabis indica
acccagaatcgaacccagaacctccaacacacacacccacctatggccacttgagctagcctcaagtagtcatttgacgtggcaactcaatcagtatctttccgtgattccatatgagttcatggaccacaaaattagctccaaaacttatcataaaaaggccataaaaatagttgtgtataaagctaaaactgaatcaaataatagtataagaagttaatgctaattgactataatttatacattttattttcataaaaatatcttctctttatgtaataatacatataaatacagatcagccataataacaaatcaagataataaaatagtatttaaaatacattaaatatttaaaataaattaataatattttaacaattaaattactaaatacataaatagtttaataaaagattataataataataaataataaaaaatacatttattataaataattcaacatggtggtgactattatgaaaaacactagactcaattatatttacttaaaatggtgattatttttattctttaatatttcataatcgaattacaactaactcttttttatttggttattttttattaggttcatatataatttacaatctgtagtttcaaaaaccaactaatccgcaccaagtgaatctattgagtttggttaatgtggatcgtttataacttcatggtttggtcactattttagaattttaatttggtaactcaaatcaaaccaatctgtatgattctgttttgtatatttaatatatatttttgaatggaatattgatatttggaaacaatattgatattaacttaatattgttttgagaatatttttttattgttatttatatattataaatttattaaaaagtaaaaaaaaaaaaaaaaatcaatcaaaaaaatgaataattatttataaggaaattagaataattatgaaatacaaatcatagtttgaaccaaactagtccgttcttagtagattggtttggattagtttgagaattcaattggtgtagcttgattttaattaatttttagaaaattgtaatactaaattggtttaaaagaattaaaaatttggaccaaaccaattcatgaacaatcatatttttcaatttcaaagtctttttacactaatcatacttcaagccatttattttttatttattcattgattgtttttaaattatgtaggttgtataatattatggttattttcaataaaattaattacaatcataaaaaaaaactacaaaactacaaaaaccatgtttagaatgattgaattttattttaaaaataaaaaaattgaatatgatatgattaataaatgagtattaaaattattccaatgtaataattgatcgaaaaactaacttattatataaaatattcatttgataaaatggcataggtgattattattattagggtaaatactatcattataaaaaaactgttacttttagtgatagctttttaattataatataattttttgtgactaaatgtgacttttagtcacaacaaaatggtacttatgactaaatcataatatttagttacaagttgtcactaattaagttctagttataacaaatattgtgactaaaaatacatttagtcacaacaaattgtaattttgtgactaatacttttatccattgaacttttttattcacaacataggagtcataatttataattagtcacaatttttttcacttttagtcgcaagttttgtgactaaaagtaaaattttttgtagtgtattttggactctgtattttgcaaaagttagtaattggaccctctattttgtaaattgacaaaatgaactttatattttttaaaatggtaaaaataggactctgagctcaattttaac

SEQ ID NO: 308864 - DNA, 813 bp, Cannabis indica
ttacattaatgaaaattaaatgccgagaaattgtaaaggaagtgagggagaattttgagttttgaacaagtattggtccaagaactctaggtcaatgattttgactgaaccagtataaatttttggtgtgctctaacctgttgcatctgtagttttgcttttttggctttgatatattatttttagttttgtttatctttgttttcctttcatctttcattgagttggttttgcgtgttaacaacaagacgttatatttgttgaacttcattttatttagcgatattccttattaaaattctgcaatttacattgataaattaattctaacaagaaccatatgaatatcaacacatagtttatcttcacatatacaaatacacaaaaagaggctgccattttcaacaaacttagatattttgtgttttcaattaagaaacaatgctactgaggctctatctttgatggcgggaaggttccgctatgatcaaacgcttcttcaccataaggattggaagagctcatcttacttgaatactcataacttgtagatgtgggttctgaatcagcatttggattcaaaccagcaagcttcatgatggcttcaatttctttcaccacctcactcattgtaggcctgtctactccagaatctccaacacactccattgccatatccacaaacttttcaaagccaaccaatcttgttcctgaacctatattagagtcaataaatgagtgaaggttgtatagatctttagttttatccatagctaaccgaatttctctaacgacgtatttccctcgctctat

SEQ ID NO: 308865 - DNA, 1966 bp, Cannabis indica
aatttgattatattaaaattggttttatttagggcacaaaacgcaacagagtcttgggtgaggaaaaaagtaatctcagggtgagggacacctctattttttggggtacctcgagaccacttctaacaccccatctcggggtgtggctcaacaccccaactcagggtaacattcaaaaccccatctcagggtaagggagaaccccatctcggggtaatagtgggagacccatctcaaggtcatgcaccccaaactaaagtagaaattggtcatcaacggaccatatttgagcaacatatggtgcttccaatacttataattttgctaagaaaacacattgatctgaaagtattcaaccccaagttggcgataaaaactaaaggcctagctttgggtgtacatggcaaagctcatggttatgtaccctgacacctcacaatgtcatctcggggtagtgcaccccgacccctctatagttttatctctggtgaaaaaagacaaggtgacttgaagtcacaactacatcgttcaacaattcctttcaaggtacacactatcttcacaaatacctatttttcaattttatgagaatctaagcaaaaagagagagggaaaattgaaattctccatgttcttccaaagctcaagaacacgtgcaaccaaaagtttcaaaatcaatcgtttcttcaccaaatttcaacaaatcagaggcaaaaacacatgacccacaacctatgctacaaaactcaatcatcaaacactcacatttcatcaaaaactaaaaataattaaatgtcattttcggccatggcaaaaactatcaagaagaactacaaaaaagtcacaaatctcaaatttcaagtaagaaaatacaatggaggttagggagaacttacccactatgaagatagagacctcaaagcttacaagaattataatgctacaagtaatttattaattttatctttgtaaaaataattagattatttctctttgtaaataattaattgattttttgtaggcaattaatttttcttccttgtaattatttttgcttgtaaaggaataattatcattgggatatgttgttaaaatatgaaaagtgaaatgattgggaaaaatattttttagattttgaaatgtaattctagtataagcatcgtattctcggcactgtaccactaagtcataagagtaggtgccactacccctacctcaaatgtattgatatactcaaagagggatgaaggtagtctaggggtgaacttctaaacccttacatccacatggtccaagaaactcgttcttcgacataagacatggtgtatatggcacatcttcatgacaccaaggctacccacaacatcgaaggtcatgtggaaggagtctcggggtatcaccacgagatggcgactgacacccccttcacgttgggaaggggggtgtcattccaagtattaacttctaccccaaaggaggttaacagtcatatcacactttaggggggaccctcataaacagttactcgttcaaatattcaattcctacaaggagctcaaagatggttacaaacccacgaaaatagcgggatataaccgtgagaattagaattcaaccaccttcgaaaaccaaagagacagttgagatagctcgtattggtctcgtctcctgaagcgagaagcaccgacctttttctctatatatggggtgagccatgatttgggaaatggattcgaaaatttgagtacttagagaaaaaagaactctattgttgttatctatcgcattcaagagcatgttcttgattttgtgactctaattaataaaatacaaggggagtatgctattattgatatcttgggccgaacctcattaaatttcagtgtcattatttacatttattatttattttttgacttaaatctcatttattacgactccgtgtcggttgactaaaaatccaatc

SEQ ID NO: 308866 - DNA, 1033 bp, Cannabis indica
actacacttataaattaaggggcatcatagtatagtgtcataagtacagagactaaaaaagctaattattcttcttttaatatttatttatatatatgtatttataattatgtttatatataccaatcaataatacccgtaaagtctagctatatgttttttaatttgagagagagctaacatacctaaacaatgcatatgattattttactacaatcatgcaaacatgaggaagagttctctttccattatttttagatagcgaaaaaaggtttcttttccctcttaaaattaggagtctagaagaagcatctcgacacttctgtaggctattttgtagacagaagtagataatgggcatcaatatggttgtgagattataatgtatttccttaaaagctaggctatatatatagttatcggaccactcaactattgaatacttaagtgggacataaactaatcctttggccttcaccaagagttaagtgccattaactattaactaaccatgcataaaaaataaaaaaaaactattcattaaccaaagcctatattaaaccattaattatagaactcacaagtcgatgtattagctttattttgaggattaatgtttataagtttataataacagtttcttatttttttaatttatttacaaatcttcgcctttatatggtcaaatatttaatataaatatatataagacatagagaaagtggccgctagattaaaaaataatagaagcacatgcgtggcttagaatttaaataataggaggatagtaggaagaatgtcgggaaacatatataatatctttattgtattctgtaaaatatgaatattatttgggacaaagaggagttggaaataggtgtatgtttaacttttatctccgagtggtaggctcctttctcattcaaaaagtgccctatgtctctcccttactagttactattcaatttttgtattagtttttagtaatttttttattttttttttttgaaaataagcgtagatttatattaaa

SEQ ID NO: 308867 - DNA, 2237 bp, Cannabis indica
tgtcctactcaaagggagagttaaaaatggtctttacatgcttccccaacagcctacatcagaatctgatctagagcttcagtgtcatgtggccaccacaatggcttccacctcagattgcacacaatctaatgttccttcttcagagtctaagtgttgtcaattgcattgtactccagctgttacaccagctgctatccattgtaacaatactgatattaataaaaatgactctactatctgtctttatgctacttcttctacaaattcagatatcaatatttggcactctaaactatgtcatccatccccacgaattttagcacaaattctgtcaagtataaatattccacatagtttaaaagctcttagattttgtgaagcatgtaaaataggaaagagtcacaaactgccttactctctgtcaaattcaagagcatctcagccccttgaattactccacactgatctttggggtccatcacacattccctctcttgaaggtcacaggtattacatcatttttatagatgattatagcaggtatacctggatttttcccctctctctcaaatctcaatcatacactttatttcttgaatttaaaaacttgttgaaaaacagtttgatctccctatcaaaactgttcagtcagactggggaggagagtataggtcattctctaagtttcttacccaacatggcattcaattccaacacccatgcctcatgaccatgaacaaaatgggagagtggagagaaaacataggcatattacagaaactggtttgacacttctagctgaatctggtcttgatctcaacaattggtggcttgcatttcagcacactgtctttgtaattaacagactaccaacaacagttcttggtaatatttcaccatatgaagttttgtttcataagtcaccagattatacattccttaagccatttggatgctcctgttatccacatctgaggccctaccaaacacacaagctcgaacttcgatctgaaaaatgcacttttgtgggatattccttacagcataaaggctatctttgcagaagctccacaggtcgaacctatattgcaaggaatgttacatttaatgagcaagattttcccaccaaatctgcaccaacacaacagcaggtacatacctcttctaatcttacttttccatcacttagttttccaactaatcccatggaaaatcttttttctaacatacctgctgcttctgttgacacaacaactgctggtgcaactggtccatgcacaactccaacttgagctttgcatcaaggtgcccatgattcccaacctgctactacactgcctgtgttaccaacacccgagaccctatcctctcaaccaccagtcatgccccctatccctatccccacatactgtcgccacaaatccctcacctcaacctccccaccatagtacaagtactgcaataccagaatcccaaccatcatcatctcaaccatctcgaaacactcatcctatgaccactagatacaaaaaatggtgtctataagccaaaagcatacctctcaaccaattatcctctcccagaatcccttactcctaaagaacccaaaacccttaagcaagcccttgctgatcccaaatggttcaaggctatgcaagatgagtatttggcacttaaacgaaatggaacttggactttagttccatatgattcaagcatgactctggtagataacaagtgggtccatcgcatcaaacttaactcagatggctctgtaaacaagcttaagtcacgacttgttgcaaaaggataccttcaaactccaggcattgatttcacagacacttttagtccagttgttaagccagcaactgttcgaatcctcctcacacttgctatctcaaacaactagtctctaaaccaacttgatgtgtcaaatgcctttttgaatggcactcttcaagaaaccgtgtatatgccacagcctcctggctttgttgataatgacaaacctacctatgtgtgcaaactccataaagcattgtatggactaaagcaagcacctcgtgcttggaatgataaattgaaacagactctgtttcacaaaggcttcacagcatcacggtctgatacttctctctttatcaaaggatctggcagtgatctaattgtgcttctcgtatacgttgatgatatcatagttgttaggttttatgccctaaataaaactcttt

SEQ ID NO: 308868 - DNA, 536 bp, Cannabis indica
aaagagctcagttataggtttacaatcatcgagcaactatattataggctcaccaatcattaatactcgtattgcacataatgatcatatatttgctattgattaactatatatgaatttaaattcattaaaatgtgatcattatactcttggcactaggatgcttaataggagaatttatatgatacaaattcttttgtattcagtacttgttactaatatatcaacataatattctgactctccaacagagttctagtattataatatagtaatagtagaactgagttttctaattaaatgaattattatgttgaacaagcaccaacacacttctcatgtttgagggaaaaataaaatgcaataacatgcgcgcactggctaattatcaaagtctattgtctccacaccaataaaagggtgcaaaatctagaaataaaacaagtcctaaagcttcataagaagaataaaacactatactttttatccatacatgagagaagcacgaaatctttagttaattagcaaataaattg

SEQ ID NO: 308869 - DNA, 1960 bp, Cannabis indica
ttccactcaggagtgttaaaggctgcaacaaacctcccggtctctggtgttcaaccttgatctgctgacaggttaggcatcgcgatacgaattctaccacattcttcttcatcccgctccaccagaagtagggtttaatatcttgatacatcttggtggtgctaggatgcaagcagtatggagtggtatgagctcttcaagaatttcatttctaagttccgtactaattggaacacaaatcctggtcttgaacaacaacatcccactatctgacactgcaaagtctttggcctgaccagctaaaatctcttccctgaccttcactaactctggatcagttaactgagcagctttaattcgttctaacagattagattgcagcgtcaagttatgaagtttgccaacaacaaaatcgatgcttgatcttaccatgtcctcagctaactgaggtgaaatctaaatcatactagttatctgtccagaacccttcctgctcaaggcatcgaccacaacattgcctttccccagatggtataggatctcacagtcgtcatccttaaccaactctaaccaatgcctctgtttcatattcaaatctttctgagaaaagaaatatttctcaagtggttcaaatgaaattatttccatgtttgagtggttaatgattgtaaagctttattgaaagaactcaaaaatatttctgtcttttttataggcgatcaactaataaggtggctcataactttgctagagctatttttttttttatcctgattgcagtttcaatttgggatttgtcccaattaatttgctaccttcgttggtagctgaatttaatggttaataattttccattcaaaaaaaaatatataatactatgcaacgggatgcattacaatgccaaaactgacccaaagtttataaaatttatggttaattaattaggacaaaaggttaaaacagacaaacttgaccaaacaaaaaattgagttcaaacgagaccaataaaaaacttattcaatctaaaaacggaaaaccatgaatggtattgaagttgaactagagatgcatatactagtgaaataagaattattagtgtgagtgtagctgagtggatgtgattgattattgtgatgaagtagtactatgaatattaagatagggttaatattcacaaagatagaggtatatagatggttggggttggaagagtttgactccatctccatataatgtatccttataaattataaaaatttggttgcacgcttgggaagcaaaccctaggtcaaggaacagacaaggagggtcccaaccgagggctacattttgggagtttcactgaatttggagtcccaagtttgccatttgactcagtgtcactctccatttaattcactctacttactttgctatacttcccataaacatgtttaattaccaaactcaaagtacaacaattttgactatttataaataaaattttaatgtcaagttattaattgctaaaattttgaaggagttcaaactatttacctctagtttcgttgtttgtagccctttttgttttactaaaagcaagaaattgaggaaatctataccggggaattccaaagcccacaaattcagagaaatcttgacttgcgcttctgcaaattacctaaatcacccatatctataataaatcaacccactttaattaatacatttttcaagccaaaagaacaacaattaatataccaacatggaaataaattggtctaaggaatcaactgattgttttgttttgcatttttatttaggtttacattgcattttagatataattatataagacactattttttgtaaaaatgtatactattttttgtaaaaaaatacatttttacgcttaatttttttttttttcacattttttactatttttcataaaaacaataagaaaattacattaaagtaa

SEQ ID NO: 308870 - DNA, 870 bp, Cannabis indica
aaaaaaaaaaaaccatatttttgtacgaataatataaaatcccataaaatttataatttccacgtacaaaactaattaattttttttttctattgtagtgtttagtaactaacgcaaattagcataaggataaattttgtggacattatggattcatgaagatgatatttctattatatttagtgctacataataaacttgatatttgtatcatatgtagggagatatttttggagcaataataataattcagagccaaaattgtacaaagacatgtctaattgttgaaaagatatacaaattttttaccacaaagtttgccactgtggtaatttatcatcttccattctgaaatcaatatactaataattagtatattgttttgttttcttgttaaataagaaatgaaagaagtgcattatttgaagtctcttttaatggggacctccctagactactactatgtatagtatagctagtgattgtcatagaacattaatcccaacttgtgattgtctatatatatatacatattattacatattgatattaattattccctcagatatgcatagtgaatgcaattgtttctgtaaaactactaaaattaaatagatcaagaacattacttatgaacaaaggtgatcaaattcatatatatgttatgtgattaaaattgacatttttaatcctaaacaatttttagtataattaacactagagaaaaatttacttttagtcacaacaaaatttgtaactaaaagcaaaaaagttgtgactaatcataaattatcattcctacgttgtgactaaaaaatttgtggctaaaagtattagtcacaaaaattacaatttgttgtgactaaatgt

SEQ ID NO: 308871 - DNA, 1116 bp, Cannabis indica
tcaccaagccaaattcctacaattacaatgtttattttgtgacaaaaaccggatatagtgtaccacatggaaaatagaagtctattatatttttttgcttttttatataagaatgctcatgtgaaataaaaaatctcaatttaatgtaatgtagaaaatctttgatattttaatattattaaagttacaacattgattagacatactaataatgagagcaaaatattaagttttaagcttattagtttttacagaaatgtaaaacaaacttagatgattatcctctcatattgactaatctaaactcaataaaatttttctaaatgaaataatttctaagaaaacacaggcccttgcctctaccctatttcttggggttgatcggcctgctgaatgttgcttgattgaaccgtgattaattgaagcaagcaacagccagggctctttgtaattagttgagttctctaaaatcattacttcttatggcaatgaagtgaaaatatttagctctgcaaggtatacttttttattattatttatcttttgattacatctcactctttgtgaatttagaccattaacaaaaatgaacgaggattgctaaagaaattctctattacactcttttatactctcattcctcaaaatgcatgacatgtagacattattcaatcatattatattttgaaaatattatattataactcattaaacatgtcatttatttaattaaacgatagtaaaatagagtgcattttagcatttcccaaaataatacagagtatagcttattctcaagtcaatttgataagtgaaacagcagtagagtagtaaaatagaatgtgggagctaatatatttttttttttttttatttaagcgtttatatattacaaccatattttacatgagactcgaacccagacctcccacacatatacacccacctatggccacttgagctagcctcaagtggttgtgggagctaatattcaatacatgagaaagctaactataactgatgggagggctgtacatcggtcgttttgggcggtttatctaatatattttttaactccaatctaaagttcgggttgctaaaatttaagtgcaaccc

SEQ ID NO: 308872 - DNA, 2475 bp, Cannabis indica
atataatacaatttttagttaaaaggaaaaaaaaaattgtacactaaagtgacaacacaaagtcacatcatacatttatcacacttaaaaaattataagaattactcaataggtgctcataacacgactgtatatgataataaataaaagatagtataaaagaaaatataatgatgtattagtaaaaaaaaagggaaaaatagtatggggggtaaaatttttttttcttcataaaatgaaaaaaaatgaatgatatgacatgaataaataataaaaaaaatatgaaactaaaaaataaaaatctaaaatattcgaataaaaaaagaccttgaataaatttgataataataagtatcactagaaagtcgtcgaagaagacttcagtgccaaaaaaaagtcatcagtaccgaaaactcatcaaaaaaatcagtcgttgaaaaaattaccagaaaaattattgaaaaagtcaacagagttgtgtcgtcatcggaaatgtcaccggagttagatgtctcaatttaaaatataaccaattctgtaacagaatgaataaaaataagtaacacgcaataactcaaaccagttatatattaaaatagaaacggaactatgacataatgaataaaaacaaattacatagaataactcaaaccggttataattaaaatataaccgattctataacataatgaatacaatcaaataacacagaataactcaaaccggttataaataaaaaacaacgaagaaatcaattcctaaaacaatgaaacataaattaaaaacaaaattattccacaacaaattaagtaaaaacgaaaaacatataatacctcataaaccatttataattaaaagaaaatgtgggaatcaattctaaaaatattgaggtatatatttaaactaaactggttccataacaaataaataaaaataaataacacataataactaaaaaatataagataaagaaactggttatattgatcaactagtttaaaatctgagataaagaaattagtttcgtaaagcaactaaaataaaagttacacaggaaaacagttaaataaaataaaataaaataaaaatcagttcgttaaattaactaaataaataatcggtttccaaaataactaaattaagaattaattaaatgtaaaaccaatttttgaaataaatattcaataattgtttttgaaatagttaattcaaaaaccaaccaagacatgaattaaaatataatcggttccacaataaaataactaaaaacaaatagcacacaatatctaaccaattataattaaaaaaaaacaaataaagttttcatcatcatcggagttagatgctggagttggcaattatatttatcaactagttaaaaatctaagaaaaaaaaattaattccataaaataactaaaataaaaattacaccacgaataaataaataaaaactttgcattctaccatgttgacgagtttcatggcccaaaattcactaaaatattgatactcaagaaaataatgtggaagaccaaagagttatctaaaggtttcctctgacaaatacatgtatgtatatcaaaaacacatttaagaaaaatagaaggcatcataaaaaacattaaattcatcttctataacttgaatatccaactctgataagtctcattttcccaatcaccacaaaaaaggggttcaaaccaccactttatgtgaagagttcttatcaagatgacctgaacttgatgctgattttgcagaccctctgctatttgactgcattacacttggaatatgcccaacaaattcaataaaaggattagcacaaaattatactaaagttgggcaaagaatataattctgcatgcaaatttttttttataatggtccaattaaatgttataatgatcagttttcagatcctccataaatatcaagctctaactatgttccataaacaaatgattgtattaattatcaagctcctttctagagttttattgctaatcttttctagaactaatcatgagataaatccagctaatataacattttatgattctattgccacatttttaccccttaaagaagcaatagtgagagtatctgttataccgaaattaaatacagtaaattggaacgaattaccgatagaataatctggctgagtcgcggataatgtcgctctctttaagacgtttcgcggctctgcccgaagtgtgcacgacagtctagcaaccacggcgtccccaggataaaacagcctctgtataagtacgatacgttctgcaccgaactgtatcgctctgtaacaccctactgtttgctctcagaaaaatcgtaaagaaagaaaacaattttttttaatattgaaaagatatattcttacgttgttctgatacgacttatatagaagtcgatccaagaaaaaacggtaagaaaacggtaatattatcgttcgtgggaggagtgga

SEQ ID NO: 308873 - DNA, 1630 bp, Cannabis indica
aaaaattagactaaaatttttttctggataccgaaacaagtgaagggtgtatcagtacatcccttttaagaaggtgtattgtagaatcacccatatatttataactattcacaaaaaataagaatgagggtacaccgtgcattactttagctgcaccctataatttttctaaaatttatatatttttgttaagaattaagatcacttgtttaaaattagtgttcctattaaattaataatttaaatgtgccaactcaactaattatttttttaaatactattaactatgtagatatttttttttttcctttaaaatactctcaaataaattgatgtatcatatttagattaatttaatacattatggtatactatttttcttttaagggtttgcatattgacaataatattatgattttttaatttttattatttttttaagggaacaaaagtattagactcaatatattccaaaaagaaaagttaaaaaatttagaatcaatcaaataaaaaaccaaatcttccacggatgttgtcctaaactcatttttattattattaattcattattattttgtttttctaataaaaaaaaatgcaagaagagaaataaggatagtaaataaactaaaggaggagtatataacaaagcccttttcaaattaaaaaacaaaataattacttaagtggcattaatttgtagagtaatgaaacaataatgcatggtaataatagtattaggataataatattatgatgtttagtttatttttgaaataataattagaatgaatggtatatattaaaacaaaacaaaaaaatacattttactttaaatttttttagtagaggcatgttatgagaatatttttttatatataaatattatattgataattatatgaatatagatttgtaatattaattcatgtaaatagtataatagtaattttattgtaaatgcatcataattttttttaaaaaaaaactaaaccaaaaaatacaattattataacgattattctgttcatttttttaaaaaatgataattctgttataattatgattaggtcaaaatttgatattatttatgagattaaaacgctggaaacacaaaccaaataaaactaataatttaatttatttatttttttaattttttttcaaaaaaaagagtactaaactcaaatttaggcggtagtaaaaaaaaggtcatagtactggaaagttgtgtcttttcctacgctccacgtaaagcgcgtgggccctagactaagacaagttaaaagaagcttgataaattgaagagattattagtgagaaataaaaagttattggtcttatcgcgataagatggtgaggttgtagtcacgcgttttaagtggtgtctctatcaaatatcaggtccatcaactttggtttttttagtacatcatttgagcgataaataagcttttagttaggtctaatttccagcttaaacacttaccaatatagaaattgttatatataaatatataaaaagtataattgtcaaaaagaaaattttattacactcaacaaattgttgaagatagttattgcggcaaaagtccccaaaaatttgaggttgatgccgattagtcctcaa

SEQ ID NO: 308874 - DNA, 4914 bp, Cannabis indica
tggaatttattttaccaggatagatttactaacaagtatgtttcattaacaccctaaatatgaattctttacgatgaaattaaagacgtaagagtttagaaaaccttacattgattgcagcagaataatatgactccttccacttagatatctaacccttgttctattctatcatagtgtaaaaaaagatatgagcctgaatctctttctctccttcgagtgggttaccaccgtcttccgcacaattttcgatgccaacttagtaagttgatcaaacttttttgtatattctattactaacatgatctcttcttgaaccagttcagtaaactccttccgcttagcactacatactgcctcattaagatatttggcattgaacagatccctaaactcttcccatgtcattatgatgatgtatcgggtgtgagataccaactcccaccacacaagagcgtcctcctagaattgaaacatagcgcaggtcacccaatcatttttggtgacacccataaagttcaggatcctctcaattactatgagccactatttgcctctcatgacatccggaccacccaaaaaaaaaaactggatgtgcttgtttgcgaaacctttcatacaaaggttccatacttgttggcaacaataagttgttctgttggcaccgctggaaccaaagcggccgacatttgcagtggaggcactacagggggaccctgctgtgttagcctctgaattcaggcttgcatttctgcaaatctttgctcccaatattaaagagcttgtaatggattttcatgtacacctctttaaaaccttccacggcctctgccgatttggaggattttgacctccccgactgccttcgagctcgaccatgttgccacaacttctcattttttgttgggaatccattatataggacttagcctgcaaacccataagttaggtaggtcagacagtgatcaaatatgttctaaataccgcgcttatagattttaaggcaatgcatttaaataaataacatatgactattgccattaaatccttataattttatcgaaaatggtaataggtttgttttaatagtctaatcgcttggaaatcaaacttgaacaaaatactaacagagctgtcattgtctactagcactctgaagaatcttttgtttgcactttgtccttcaattactagagggtcgttgttaggaaagttcataagccttgcatgctcctctgtgaaggtcattagaagaatcatcattctgggacgctaggttggtaattgcactaaagtgcaaacttacccttaatgttccagttcgtttaaacatctctttggggagttttgagtatttctagcaaggtggggacctctagagatagtggcgaaatggtcatcagcaggtggcagagctaaccatagaagataaggatttcctagtcctagagctatgactgctaccgcaatgtgggtaggcgaagcaagtaaagtcaaaaactgtgttccaggagcttgagggagaatcacacctgagaaggatttatagctccctgctatcccagattgataagatttctgtacaatattacagatttccttgtagacattttccagagtatctatcaaactagaggtccatgagtttcatgtcaccactgaccttatttttgttcgctacttccatcatttgttggatgaagttcttcagacttttgcatggtttttgtttgagattggttagggaatcaaccggtatgttgtaatccctagcaataataaattatcttaggaaggtagaatttaactccatctagtcgtggattaatccaagtgataatcttttccatcaatcctcagcggacgtggctaacgtcagtgaaaaacaaatgcaattggccttatcattaactcttacacttgcatcaaatgattgtatttggacaaatgagccttggggtctttcctcccatcacataattctatctatggcatcttaaagttttttggtagcacatcgatgatatgcttaacacacagttctgaatctgtcttccgagttcgatttaactccactctaattctggaccagtttcattaaagcggcttgtatcattatctaaaagcccacattcacaaattctatcattgatgtagttttggagatcattcccacgagggctcgctttttctcatttggctttctcacgtttgacatcaagacgccttcgaaggtcaactatagatcaactgcccccatcgaaaaatttcattcagattaacaaaatcactacaacgatttttccttcccataatagtaggtcttcaaacctgagcaccaggcctattgttatgctcaacgtggcctcgcaaagtggaagtgtgtccaagcgcataggcattggtggccttctttgtctgcaagggatgcttggtcgtgttcacgttatttctaggaggtaatgcaacatttttttaggttgaggttcattaactttttctttccccttatcatttagaggagccgaggttccaatatcagtagggcttgctcttatttcccctattaacatgctcctctaaaacatcttcttcgaagtccatatctataacattgagtataggcttccagtcataccatcattttctccattcatcaagaaaaggcctcttgctctagtagctttcattgagtttcagctaactcacaagatacttgggtcaccttggggtcttgttcataatagtatccatctctaatttcacaatcttcttcttcctcctcttcctcgtcttgtggtttttcttaatgaactattctcaattttggttgtttcaaccattcggtcatcagttttagacacttctccatccctcacgtaaggcgcccggtctgagcgtgccttggaaggagcatattagcgttgtccatgacaacactcctagcctgaaggtaaggggtttttcggcaacagtcttcctagtagccacctattgttgcaaatgttaggtatcttcgatcctttctagagtctttcagtgaaagcacactaaaatatttatcgagatctcaaaaactaaattaaataagaacttaagaaattaaattattgtttaagtaaaagagaaaatgataattttacgtggtttgggtattaataaaccatagtccacgagtcaatgtattgtctttagaggctttaaatgtattaaaaatgggatgtggaacttgaagaaccctaatttttgctatagtgtttttctctaggtttctcttaaaagaacaaagcttagagataacttagaagtattttcctttgtttgttctttgtcccctaaacatgaagggataaagggggttctataggtttagattcaaattcgggcatacccatgacccgctagggtttctgtacaaaatgagtcaactattggggtaaatacatataatacatgactttcaggctcgcgataggattttggcttgtgggttataaattaatgttcgtacagaaggaggcctaggcaatctggacaggtgtcactcgagggtacacttttggataaaaggggatatatccctttttgcagtacacgcaataccatgtcctgacataggggacaagatcagatttagtaggactaggtgtcagcgggtacccacatcaccttataaaggcttctagatccaccttgtgagctttctatccgggtgtgccttgttgattatctaaaggacctcatttgctccatctcttggaaggctggatgggcttttagaaatgcgaggatcgtgtcttaaaaagctatgctctgggagtttggaagggcttaggcccatttctgacttggaaagggccttcgtacgcatgaaggatttgggcttggaattatgcggactaatcaaaccttgaggatgccacatgtcacttatacagaaacgtagataacaagatacaaaaaaaatatgatgttcatgttgttatctcaacacatgagcaagaatattctctggagaaaaaataaggataggattaaccttttttaggtttcctaagtaatatgtatatattaatttaagtttatatccttatattaactataactaataaaataataataaaaatttaattaaataagatatttattaatttaaatattaaataataacatttaattatttgaataaatatctgcaaccgattttgttaaaacattaactttaaatttaaatatttggtttaaaataaaaatttaataattgattgagggaatatctcaaccacttaaaaatatctccaactatttggaaggaatatctaaaccatattaaatatctataattacttttcaaattcaaatttaaataagtattaatcgtttaaattaattaattaatctaaaaacaaacccattagggccaccaatagtgataggctatcaatgttattacacggtgactgagcccacttataataatttttacaagttggtgttcgtcgtaagaatatttttatctccctaatttaataattaatttaaaataaataattactattttgttaattcaaagtaaaattttttgaatatctttatcttgtgtcatccataccttgatagtgctatatagtggtgatctcgggaccatgaacctataatactaagcataaataaattaaattatttattgaattttatcaaccaaagaatcttatttattaatttcatgattactccactaaaaatatggaattgaactcatagaggctgtttggctttgcagtttaaaaactgttttctgttttttaaaactgaaaacagtttttaaaaactattaggagtcgttatttggcaaaaaaaatttatttttttttaaaaattgagttttaaaaactaaaaaacagaaaacatcaa

SEQ ID NO: 308875 - DNA, 2541 bp, Cannabis indica
tactctagtctcgagaagaccaataaaatcaaccttttgaacattaaaaaattgctttattaattgttgtttgtgttgattgttagctcctcagacattccaacacaagagcttattcatttagaatagagggctctcccccctcttcagtatttcccccattggtgatcacactacttccttcccctgcatcctgtaccatatcaaggacttggaaagtgttgccaacttcaatttcagctggtttctgcactgtggtctcaactttcctagatcttgtcacctttgtaaatccctcctcataaacttggttttgtttcctattatcagctttcactatccattccttcttccctgtagcattcttcttacactttgctgccacatgacccaaaccagagcagtgagtacaaacacatggtttccattcatctttactccaatggttgtgttcgatccatattcatcctcaaattccagagtatctagaaaaatgttgatccatggataccttaatcatcaccctagggtaattcaatcgttctctttccctagtcatttcatccaccatgatcgggttctccatttgacctgtgatattaaacaaagatctttctccctagtactttagctccagttctttcaattggatccaaatttggacacatttcacatcctccttcttaaaattaacatttggatcccagggtttcataataacaggtcttctattaaaaaatatgtaccctccatttagcacctggtctctgtattccatagaacaaaatcgtatgataaagataccaaaggatagcatcttcaccctgtcaactttgtccttccaaactctcttggaaaaaccttcaatgatatgcaatggtggatttgaacccaatacataacacacaatcgaaggcttccaaaacagcacttcatcctcgatattctccattgtagttttcaccttacttctttgttcatcaagcttgaaagagtttttgagattgcgaacaactgaaccagagcgtaaaacaggaggaattgagttcttaccttgctgcaaatcactgttacattggttatttgccttgaggaactacagaaagtcatttctaatttcttcctatctctggatcgacttcagtgatgctccaggcgataatggaggttggaaaacatcaacaagagtaggatctactatatcgatatcttcctcatccgacatctcctgaggttaaatttcatcattttcagtgatctgactagaacgaatctcatccgtagtcaatcccactcttttattcttcactttcttgataacagatctagatttcccttgaatttttgatctcattttagccatggcaccagcttctcagctgcaagagcaagaacacaagggacaatttttctaaaccagtgataaatttttagcattatagttatatagtatagatagtattttcatgttcggtatggcctgtagccttttactttttgaacactacttatattcagctctagggccttcatgtgttgtactttttgcctataggccctctatttttgaacattactattgtttggtcctgtttctttttatcatggattgtgtgactgaccagacgctctttaatcctagctatcttcttatggccttgacatgtaagtatttggatttatttttctttatgtcaagttgaagtatgtctgcacctgacctagaggcaggtttaatagcttattttaagcgttaaaatttctttgcataagttctctatgctagtttaatgtattgtatggtgtgggttccccccaagtgaacaagctgacttacggtctcttggtcacttgcaattcaccaagtttcatagaccttgtctaggaattttcttacggtgctacctgttgtatgcatgtggaactgaaaaagaataactttgagaagttaatcttattatcaagtggtttagacacaataatttgaacataaacattgttatttattcattaattagtctttgttgttgtgaaatttacataaattgaatctaaaagcttacataacaaagtttttcttctagatatcaggtggctacccctgcttgacttgcatagcagaggccctcattgaagaacagtgagagtccataccaaaaatatcgtgggtactagctcttttacactctaatgttgagtaggtagaactgctactttgtgtagtattctataagctggttactgatagtatttgtaaaggtgctctccattccagtatcttggtaggagaacgagctctatgttattgttgtagcttcccagcttgtaggctcccttactagttatgtctgtaatttgataggggcctttccagttgagtctgaacacttctcctgctggatctttggtgttgaggaacactcttcagagcaccaggtctcttatgaagaatttcctatccttgacttgcttgttgaagtgccttgctaccttttgtcggtaggcctgttgggttttatgccctaaataaaactctgtttc

SEQ ID NO: 308876 - DNA, 1881 bp, Cannabis indica
gataatgtctatgagtattccaacccatggagacatatgagtcctctcgcggtcctcatatgcccgtgttactattcccactgaccagtagtagctcacttagcatcaaggtgctaggggtgggggagagctgacactaggtactccccccttaaagagcattctaagcttttagtcttctactaggaacatatatggattttgttatgtagacatatggtcatcaccatataccaaatcatagagtttctcaaatctaattacatcattgtattcgtagacccaaaaaaatgatgaataccaagttctgtcccagtccgaacaacattgaagatatttacgaaaataccactactgtacaaacttagcatcaacatgccactagcatatacactaacatgcgccaccacttgactacaacttggccaacttatgagcatcacctagcttataacgtaccatcttggcacacaggttacactaagcatttatttatatctactttgattatgcacataactggtaaagacaaaacctaaggaagtaattgtatacgacaaagaggaataataatatgatttcttaagaatgatcatatttacattattgtttatttatttatgttttaatgtttgaaagttggctatgactatacttggaaattattttgtgaattgggatttattgagtaattcatcatgccaaagcactttagaaatacacaaacaatgagtaattaataaaaaaataaaaaatataaatcattatctcatttgttttaagtatacataacaaatctattgggaatgatagcaacaactataagtgagatatagtaatgataacgaccttgaatatagtggcgattgtaaatgtgatacgttgataacaagtttgaaatcatatcataaatttactataaatttatcaaatgcctttttagatatctactttgtgtgaaaattctcaatttcttatgacatttaaagatgaccctttgtttggttagatcaaaaattgtacaatatttttttttttacaatattaattttttgagtaaaaataataaaaaatttgtagaatagtggctcttattattaaaaaaaccttgtataaaaaatataaaatttaaaattttaatatggttttatgatttagtcatcattaaattaaataaacgcattttatctcctagctttatatatttttggtaaatcaaatattctaaaaatttaaatttagccacgtcaaaatcgtcggaagcttcagctagttcattcccttcacattgtgggctagtaatattacccgcaatgactacgaccgattcatctccaatctcttccgtcgtacaaacagtggaagaacaactgacagaaattagggcaaccttggcccgacaaaattagattataacacaaagggacgttgagattatagtctccaaagcccaattaaatgcagctttggaaggactgacagttgctgttgcccctgattttgcccaaaatacgtggaccaaccggatgatgacacatggacggaaaggggttagcattttaaaaaaaaacagctaagtctccttaaagcgttggattaccttagacatgcctcccggagaaggcatgtaagtctcgtatgctcccggagagcaagattgcacaaaagtatctccgggtggtgtcagagtctatgtgaacagtcatctcgcatttaatgccgcatgggaggaggcgtatcgaaactgccatacgtgataaagtctgacggcacaaccccactctgcacctactaggctatgatcaataaagtctagtgacggctactctgtgaggaatcacatcagtcaaaaaagatgaaggactgcactcataaaatccc

SEQ ID NO: 308877 - DNA, 920 bp, Cannabis indica
ggcataaaacccaacaaataatgcatcattcttgttgagaaaatggttgctcgggttaggacacggaggactcaaaacttttcagttattaataaataggtattgatcctcatttttacatcatatcatatattttcactattaaattctcatcatcaagagactaaggttcagagaaaattttgatgcaaaaattgaaagatcataccactctaaaattgattccatagactcgtacgctttccctaagtttttgatatttattgtttcattatcataaatgaattaggctaaattcagattatagtatttctaaatgataaatctaacattttttatatgatggtgcttattatagttatatactatgcattttgtttgttttgggaaaattatgaatatattatggtgctaaaaataggatccaaatattcagccggacatacctgttttattttacacgcatgcaatattttaaactttattttcgataccgtaaagtatttaaaattttctgaaaataaatatctatttcaactacaatatacaatgttatataaaaaaaaaattagaatataatttatcaaagtaggaagaataaaaaactatcttacggttggagcaaaagtgctcccacttaagattacctctatagatatatgatgtaattaatatcattttttcaaagagttgtgctctgtcctatgtgggtttgcatatatgcgatgaacaacgagatataaaaatgtctacaaagggaagacgaaccagaaggagaaggaggggcgaggccgcccttggcctcaaggctactggaagaagatgatcaaattggtgttcgcactactacaaaacaagcctttagaggtacttttttcagcataataataaataactgacgccataggattggaaatttt

SEQ ID NO: 308878 - DNA, 2101 bp, Cannabis indica
gaaaaaaaaacaccatactatttcagctaagttataaacaggaattccacggacttttgaattaccttccgaaaaaatggattatcaaaaaaaaaaaaaaaaacgccgaatcccacatccaaattttaaagaagacagaatcaaattgtttcacttcacgtttagaggcttggcaatgtaacagaaaaccattttctgagaaaaaaaaaaacagaaaattttgagaagactttacaaaattatctttttagtttctcacatcactttctctctatcttttctcatttttctttctctctttttcttttttcatcactttcctcttcagattacaaacttttaaaaattgtctccatattaatatatttattaattcttcattcaaatattttaaattaaaaataaaaagctaaaaaattaattagaaaacattaaccacaaacaccttttgattttttaaaacaacaaaaggtgttctatattctcatttccaaaaacaatgccaatcaggggcacttgctttcttttgttgacatcttgcaaagttggttcatagtggcaaaggtaaaggcaaacaattagaccaaactacaaccagcaactaaggattaaacaagttacatagccccaacaagccccatagctcacgcatataagtaaataccaattggtcaagtataacatgcaagaataccaaaaactaagaacaggaaaggcattagtaacacaatactctttgttattattttgtttcatttatcataatttaaaaatgaaaagagagcttacggcatccaaaggggaaagattaaaacgaagcgactccagaagggttgcaagacatatttggctagcaacgaattgtctacaccactgtacttgtgcttgtgcagtgcagctataccatgtgctccaatatacctcattccttcttcttttccaaagccaaaactttaactagcttcgaaaacaaaaagaaaagaacccaattcaagtctcaacaaaaccacctgcacaataagcagattgaaataatttaatgtaacagcaatgcaatcattttcaaatagtatagaatataatagaatatattcaagtttgagcatttgggctatgctagaaacgtctcaaaattaagaaaacttaataaataccaatatgatagaaaaccttaaacggacagaagagatgatgaaatatgtaatggaggacatggatctacattcgagtaaagtaaaatgtatatatatataaatatatatatataaattaaaaagctttacctctttgaatggtagagaagatcgagcgatggatgagaggagagtgggtattgtatatttgtattcgtattaatcaaacgaaaataaataaaaaagttggcaaagcaaaatgaagaatttcttttgaaacgaacgattttcaaacccctaattaaaaaaaaaaaaggaatagttcagatcaaaaggaatagttgataaaaagaaaatgaataactattattgaacagaactgacaaatatatgttaaaaaatctctggcgtttggtcacagctaccaaaaatatcaggacaaatcactattcaacgtggtttgctttttcaaaaagtgaaatgctaagactaattttttaactatgatactataatatatatttttttttaattttatctaacacgttatttttaaaaatattttaataatatagtattatattattcgttaaaaatattataattataatatcatatattattatttaatatattaattataaatatattatcatactaaatttaaaaaatatatattaatacaaataagcatataaaatttaaatatcttaaaaaaaattaccctaacttttgaaataataaaattataactaaataatttaaaatatgaaattaaaataatgaacaagttgatatggaggcttcgagtagttagctgaaccaatcgtgagcgttattcttcagggttgccgtgagcatacgatacttcgctagttgtggtaactgatctacttccataattgtattaaatttatctaaataatctatgggattagtagtacatttgtatttcagcgattcagata

SEQ ID NO: 308879 - DNA, 3760 bp, Cannabis indica
aagcatctgctaattgaagtgtgctactgactggaataaggcgaatggtagaattggcaatcttttcacgaatgaaatggcaatctagttcaatgtgtttagtttgttcgtgaaaagtggggttgttagcaatgtgtatggcagattggttgtcgcagtagatgaaagctggtgttggttgtttgatgtggagatctttgaggagatattggatccaagtcatctcatttgtagtggctgctaatgctcgatattctgcctcagcagaactttttgaaacagttggttatttcttggttttccatgaaatgaggcagtctcctatgaagatgcagaagccggtggttgagcgacgagttgtggggcaagtagcccagtctgaatccgaaaaaccacgtagatgtaaagatgatgtgggagaatagaggatgccttggccaggggatcctttcaaatatcgtagcaggtgatggagggctgccaagtgaggtgtccgagggcatgccatgaactgacttagtgtgtttacagcaaacgttatgtccggtcgtgagagtgtcaagtaaagaaggcgaccaataagttgacgatagtgtgacggattgtcgagagtgtctccttctttgtcatcaagtctttgtcttggatccatgggggccttagctggtttactgttggtataaccggtgtcatgaatgagttgcagagtgaatttgcgttgagacaagaaagactggtttcgactctagctatttcaaaccaaggaaatacttgaggggacccaaggttttgagtttgaatcttgcttgaagggagtcttgtaaagtatgcagtatgtgaatgttcggtccagcaattataatgtcatcgacatagacaagaagaaccacaaatgtgttatgagatcctcttgtgaagagggtgtagtcggcttgggactgagtaaacccttcttgcaaaagtgcacagtaagctttttataccactgttgtgaggattgtcgaaatccgtagatagatttatgaagcttgcagacaagattgttccctgtgacaaaggaggggattttgaggccttgtgggatttgcatatagacctcctcgtctaaatctccattgagaaaagcgttgttgatgtcgagttgtaatatgtgccattgtttaatggtgacaatggcaagaagaagcttgaaagtaaccattttggccacgggtgagaatgtgtcaaaaaaatccaatccttcttgttgcgtgtaaccttgggaaactaaatgggctttgaggcgttctacacttccatcactattatacttgatcctgtatacccaacgacaccctatagcacgtttgtttggtggaagaggcaccacggtccaagtgttgttagtgatgagagccaagagttcattatccatagcttgtaaccaacgcttgaattgtattgcttgcttgtaagtttgtggttcgaattcagctgtaacagcaagaatgaatgctttgtaagtttttgaaagtttagaataagacataaactttgatatgggataagtagtagtggttttatcctgaattaagttatagcattcaaagtcttttaagtagctaggtggacgagggaatcgagtagatcttcttggtatagcagcaggttgtgtgtcttgatcttgctggtttgagggtgcagaagggtctgcatcatttgatctgcttggtattcagcaggttgtggttcgatatcctgctggtgtgatgtagcagtattttcagcatcatttctttcttgtctctcatcaaattcttccagcaaaatcgggttaggagaaaaagtgcaagtgtcttgtgtaggataatcattaatgtgagtgtgagtaacatgagtattaggaagaataagaagtgaaaaggatcaatagtattatgattagtgttaagtttgtgaaaaggatagacattctcataaaaaattacatttcgtgaaatgaagatttgtttagattgtagatcatacaatttataaccctttatacctctcggataaccaaggaaaacacatgttctagcccttggttcgaatttggttctatgagaagaaatagtggaggcaaatgctagacatccaaagcaccttaagttgtcatattcagggggcttaccaaacaatacttcataaggggtctgctttgtacgattaatcaaaaaaataccagttagtagacattcggtccagtattgaataagcactctagattgaaaaaataaagctctagcaacgttaagaaggtgttgatgctttctctcagcaactgcgttttgttcgggcatttttatgcaagtaaaatcatacaaaataccatgcttagcaaataaatctttgaaggtgagctcaggtgcattgtcggacctgaagcatttgaaaatgcaatggtatttgagtttgaatataagcaataaaatcaggtattatgaaaagaacattagatttttgtttgagaagatagacccaagtaaatcttgagtgatcatcaaccaaagttaaaaaaatggttagaatgagaagtaatatgataaaggccccaaacatcacaatgtataagatcaaaacaatgagaagtaaaatttacattatttggaaaaggaagccttttttgcttagctaaagggcagatgtaacaaggctcaacattgtgtagattcttagtattacaatgcaaagaatcttgaagtaaatctaagtatttattagacaaatggcctaaacgtttgtgccatatttcagcagatgtaaaggcattgatagaaacaggtgtggtatccaagatgtagagaccattttccgaattacctttgccaatcatccttttggtgcgcgtttcctgtatgtaaaatttgtcagtaaagaacttaatggtgtaatcattatctttagttaagcaactaacagatatgatgttgtacttgaagttgggaacatacaatacatcatgaagtatgagatgactatcaagtgagacattaccacttttatacactatgagatgttcattgtttggcaaaattagtttggtaggataaacagtatggatactttggaaagaattcatatctgagcatatgtgtctagtagcacccgagtcaaatatccaagaattgattttaggcaaaggagagcagtttgtaagtacaatacctgacttacctgtcgatgtaccagggtcagcaggtggcagaatgctggtttgggcagcaagaagagtcaagagttgctggtactggtttggagtcagttgaggtaataaggtgttgttttctgcagagctagaacctacttcattagaagtctgtagctggtttgttgcagcttctttggacttgttatttttgttgtacctcggtggatagccgtgtatcttatagcatttttcgatggtgtgcccatgcatgttacaatgtgtgcagaacggtctgcctcgttttggtggttgagtctttgttggttcagattttcccgtggttctttctccttgaaaggcaaaggccaagtttccattcgggtctgtagaaacattttgcctttccctatgattttcttcttgtgaaactagatgaaaaactctattaatctcaagtgaaggttccatcacaagaatattacctctcacttgtgcataaagatcggatagccccatgaggaaagacatgatgtattccatattataatggtcttgcaatttcttgactcctccacatgagcagccattgca

SEQ ID NO: 308880 - DNA, 4447 bp, Cannabis indica
aaaaaaaaaaaagtaaaaagtattctttttaaatttcaaaatatgctttgactaattaaagtttttcatatattgcttaacacgattttttgttgagaatcttataagtatttcaaagagtactaaagatcaccacagcactaagagtacgattgtgtgtgagtgatacatggatggaattaataattgtttactgttttgtcttaatatgcaacacgagaaacaaaaggaatgtaacaacatcgtgagttgttgtggaagacctatacatgaagacaaatcccaattatttaccaataattattaaaattaatctcacattactaatgtgtggagataaaatatcatatacaaaatgaataaactactccttccattgtcaattaattttagagtaatttacggtcaaactccctgaactttcaagtttggtgcagtttaactctcaaactgaaaaaattatagctaaaatttctaacctccacaatcattttggtcaaaacttcttccgttggtctagctttgttatgtgccagatggctcctacgtagtgccaagttaacttttccatgtcatataaaacccttcacatcaaatttgagtataagattaaaaccaattattaaaaatgacaaatgaaaaataaaacaaaaaatccacgccagttataattaatccagaactaaattattctgtgagtaaaattaaaaacaaattaaaagcaaagtaattaaaatgaaagaaattaaaaggaaagaaaccattcggacgagtgaagggaaaaaggaaacccattctgagaaagtaaaaagtagaaagtgattttggtcagaaaggagatcgatcattgatggtggcaaaacgatatctcaagtgatctattggtaatcccccacctaattatggtaagtttctttggttcatagtcatttttagggtttctggatgggtttcttatttgtagagggttggtaggatttttaagtaaaaaaaagttggctttatagttggatttttgttagaggtttgaggaacgatttagttggaatggtagatgtggtcttaattgtgctttgaatattgattaaagtataaaagaatctttctgtttgtttgtcttcgttaatggggtacatatgcacatgctacttttgttttttatgtaatctttttcatggggtctaaatatttgggagttttgcccaactgctccaataatatgtggttttgcctagattagatcagggcccttattgttctttcattttttccattgaagggggtaagattgatcagttcacagtgaagctatttcacgggggtatatgtttaccccttatgaaaacagaaggtatgaaggtggggtgtatgatttgtttgacaattgcaaggctgaatcttcctcaagggaggacttggaggatatggctagagaattagaatacaaattttcatttggatttctgttcaagccttatgggaagcacttgaattttgattttagggtggtacaacagaaagatattgacttaatgttggtggatttgagaagtaaaaattatgtagaagcttctatttacttggtcttaccaaatcaactacttccactagagtggagagaagatgtggatgttatcaaacatgttctaaagcctccttaaacattgaaaaagtgcacaattgaggagatttcaaaagggagtaggaggctagctgatgtagttgtgaaccccccagaccagaagaacaaatatgactacttttaaggtgcagtgatgaggttttgttagatgaaattcaagaaccaattgtgattaattcaacatcatcttctgagtcagagacagatgcatctttgatgtttgagccacaacctgcaccacagcctataccaaatcaaaatgaaggcaatgattagagctatgattgggaccatgaaaaggaggaatttatagaaaatttagaatacttcaatggtcctagagatgaagattacgttaaatttgctgaacaacttgaagatattggtgaaaatttaagtgttgtagttgtgtgtatctattttttcagtttttgttagggtattgctaccttgaatgttaacttatggttgcctttttattaggaatttgatgatgagatcatctctgcttgagcatttgatgatgaacctcgagatggagtagtggatgttgaacataattcccttaaagtcatggatggtggacataattctcatgaagatatggatgatgaacctaattccccttaagtaatggaagttgaaataactggattcactgaggaaacacctaggttaaagagattaaaattgaggaggttgataaaggctcaacaacaaaatacagtgaatgttgatcatgcaccaggaacccctcctttggcagattttttacctgatcaacaaccttatacacaacctgaaagccaacaagaggccccacttgttgaaacacaacctgaaccacttgctgaaacacaacttgaaccacaacctgaggcccaacctgaggcctaacctgaagcacaacccgaggcccaacctaaaatgcaccaacttgaggccaacctaaaaatcaacctaaggcccaacccctaagacatggtgattttgattttgttgaagaagagttcaatgaagcactatttggggagatgtatgattatggtccagcagaaccacaagcttggtgggatcaagtttctagcttagttggggatgttgaggtagatgaagctgatgggactgaatatgcagatgacctggccagcaaccacagtgaagatgaagctgctaaaatagatccaaaagtggaatacaatccacatacaaaaatagttgacttcaagtttgacattgacatagaatttggtagtgtggacattctatgaaatatgatgatggaacaattcatctatattgacaaggagaaaggtttagggtaaagtgcagagcagaaggatgtacatggaaagtatatgcatccattaaagaagatggaaagacttttagagtcaagactctcacctctaaatatgaatgtgggattgtgttgaacaataggtatttaaaattacttttatttttcaatacaacactgtaaacttatttgtgattttttatcttatggattgcatactttcattaatcttagaggcatatagatgttaactagctcgacaaatatactttatggaccagtttagactccacccaaatatgcactatagtgtttttaaggagatgacagagaatactaagttttctaaagtgagttcatggcaattctatttctttagctttaattttatttaaattagttttcgaaaatctcgataaacagtgcccaatttttgtaactttataaatatgtgcttttgtgtgtgagaatacaagtgagttgtgagaagaaaagtgagtgcgagtttgtagtgtggtgagggtgaggaagaaacaaagaatgtgctgggatttgggtagagagattgagatagtgagtgtgtaattttaaattataagtgaattatatctttttttgtgagtttagtaattttaccaaaccgagtaaaaaaaatttgtttcgtttttttattatttcaattagagtgaagtttatcattttttctaacaaaaacttctattcatgaaatttaaacaatagaagagaaaaaaaagaaaaataacttacaagaccgatcttaatataaaaacattaatagcaacaaaatgaagcatgaatgataggggtggctttaagaatatgggaacaaatgagacaaatttaaaatgttcttttcctattggatcgcgacataggtggattgaggaggggctgcatgcatgacagctaggagctgaagacgaggtcctcacggtggcgggcttggagatgagattttcgacagtgggagtgggaggctggatgtggctgtcattaaaagtaagaactaaaatggagaaatgtagaaggagagagaagagaccaaattgtattttgtagatataaatttaaaaagtaaaattgttaacattcataggtataaaaatttatatatccgtctaaaagtatttttttttaaactttgctattcatcctgagtatgagtgaaagcagctaactcatacttaagtgtagggaaactggaaactacatgtttctcctttccacttcgattcacgtggtagatgcaggtttggtcggcaagtctgcagtcaaacttgctggccaacccgcattcgccacgtggatcgagtggtcggcatactcgggatgaataaatttttttttttgtaaataaagttgctctttcaattttttaatgtaaacatttaaagtatttatgaatgctaacatatattatacatatcatgaaaatgggtaagttttttgtaacaccctaactaacataggcgtattacgtgatt

SEQ ID NO: 308881 - DNA, 633 bp, Cannabis indica
tgtttcgtggatctttttgtagtctctgaactgggatcatatgtgttcatatgctaatgaagttatgtcttggggtcaactgaagaagtttgtggttccaagattttatatgtggtgttgaggacaagtgactgagaaaagcacactcttggaattaataaatgcattacaatggttcaattcatagcaattgtagcagatctcactcccccaacttacgcactctcaggactcacatacgaagcataaaagagttaatttgattggacattgttttttcttttaataggtaaattgatattatctaatatctattcgattatgctgatgtagaaatagtcaaatagatgtaggagtctttcttcttcaaatcatatcagcataaaagtaaggagttacaatgcaacgacgagtaaataaagaatcacaaaataatttgatacatttttattgacacttctcaagtgaggtacaaaatgttgggggtatttatgtccccaatttgatgctgggtatttttgtctgttaacttatcttgaaagatcacttttatttgcaccccatcaaattacaaatgcacctcattattaaaaaaaatataaacttaaataatttttaaaaattattcttgat

SEQ ID NO: 308882 - DNA, 2273 bp, Cannabis indica
acatatctctaatctatcatccaattaaaagtcttcttttcatttttgttgtgtttatgttggaacattgctatagtggtgtgttatgcatactacatccttttcacacaacaaaactaaggttgtatgctcatcttttcatctttatgtgtaaaatagcacaagtacaaggtatttatgtaaatagcttatggttgactgaatttcgtgatttcaaatcaattacattgatcacatataaattctgaaagatatattatctccatatttattgagtatgtataaatgtcctcatattgtgtcatattctcaaattacataaagattaactgtccaagaagactgcacttatatattacacaaaaagacacttgttaatacgtctctattatacatgtaaagagagaggcatccctctataacttggaatgaaaaatgaatatgattaactactttttttcacaaagctaaatatatcccataatgatattctagtactggacgacttcaaataacaatgaacttttgtaatagtatgtgtatcaaattaaaaaattattagcagaatatactaaacctgtaaacttaaaaaaaaaaaaaagaaaaaaaaaaagaaaaaaaacactgctgtcagcctgtgattatttagtatagtcgtactatatatataataagtaatccaaaaagattataaccacatatatgtgcaaaagacaataaaaagttgtgcattgtgcattggccattaattcggacgctcgtgatcaaaataaggttactaactttctcaactatttctagctcatccacacacacccaacttgagtttttaaaagtaatagtaaaaattaaaagtttagagtccatccatagactcatatcaagaagattcatgactctggctgatgtaacgtgcgatcaaagatgtcacaatacaagttaggtgatgcccacaagatggccaagtggtggttaagtagtggcgcatgttggtgtacatgctgatgtttagtttgtacgacagtggaatttttgcaaatacatcctcaatattgttcggatcgggacagaacttggtattcgccatttattggggtctatgaatacaacggtacaagcagatttgaaaaactttgtgatttggtatatggtgatgaccatatgtttacagagcaaaaatcatgtatgttcctggtagaaggcttatgatatgctcaaggtgggagtgtctggtgttagctctccactaccccctggatccttggtgttatgtgagttactactagtcagcgggactagtagggtggccatatgaaagaatgctgctagaagttagcaggtatgtttgcattcgctctccagtatgttgcttgcaggtatgtttgaaacactttggcgtagtacatggtttgattgggttatccatacagtatgcttggtacactagattgagtttacttgagtgacatcgtaaaccgcaagaggcttttattgaaaatgaagcttgttagcataagtgtggaagtattagaggggccatcagattcttagtcacaacagtggttgagagttgatgatcgagatgatttgaattgggatagacatggaatcctttagttgctacatgtgtgtgtccagagggctgcacatggagaccaagaagggcagacgccgcaatcgttacaggatgatcgtacttggaggcatttgcatatgacttttatttgatccagatgggaagcactgagatagtcgagtgggatgtgttggcttgtaaaaatgcaagtgggcataagtcacacaaaggcagtgatagagatgcggagttgtggaatgaatgcatcaaagaagccagtagggttaagaagattgagagcaagcattaagatggcgctagagtttgagtgggggccagagggctatgacagtaaatcttagaagtcatgtgagcctgcaaaggtaaagagggtgctagattttgcatgaaggctagaggattgcagcattggaactttgtacatcgaggaagccaaaagggcatgatgctagtgtaaatcagttggatggttgagtcgacaatgcatgcatatagaaatcgatgggtgtgctttatgagatagttgactcgagagtcacatcctgtgcgatgcacttttagatggcatggtgtacataaagagttgggcggtcaggaattcgtgtgtgggcatgttttcaaagacaccaatagatgaaatgggggagagaccctcacggttcactcagcagactag

SEQ ID NO: 308883 - DNA, 1574 bp, Cannabis indica
ttttttttttgctaaagaagtacagatgaactcactctcatcccttgatactccaggaagggaaacacgaaacaagtaagaatcctcacattcaccaatgtccattaaccctataattggcccaatttttcccacagcagcacttcctgtcagtgcaaccccaattttgttggtggccataatattctcccagtcctcctttgttgtgaaagaagacaaaaatataatggcaggtccaatcctttccacatttttattctcacttgcaggtgatggtgctgttgatggaggactgtaactaagtggcaacggtggaccaatatatggcatactattaagaggtgccacggcaagaactgttctttgtgggttttttcgttctgtattgttactttcactccttgactttccaaaactgtaagatgaaacgaactcaaaccacataagaacatcataaataacatgatgtagacattcaaaataaaaatatcctagagcaattttcactaaacacaatgaagctaatcaaatctacattctccctcaatcttttagagttgcaaacagatttaccaaccataaagttacaggcaaactttagaaaatccccgaataatcattttcattattagacagaaaaactcaaaacacaacaacaaacctcacccaaaaatgtactaatacctaaaagcgaataacactacaagcatttgcgaatcggatcagaaaagcaccgagcataccaatacctatgaatatgatctatcaatataaagcatcgaatgcatacatgtggatatacaaagttgcgtgtagaacaacaccaaacaacaaagaaataagtttagagttagttacctgggcggagaagccattagagaccgacgaactgagttggagcggcgagtttttgtcgtttagctttgtccgagtgttcttttgagctttgaatgtgtcaagtatcagttgaaatgggctttttccattcttgattttcttctatattcatctagccgagtcaattttgattcaacggctccgaaaatacatcttatttattaagaggatcgatccatgttaacactgtcatcagacgctgatgcgtccgtaacattcaacacgtgtgcatatcaccactctagatccgacattaccaaaggagtttttgttcttacatatacgagtaattactgctacaagttgaatattattcttatattacatatctatcttatgtagtcattcataacactcacctttggtgtactccgaaaaaaccttactaagtaaaacccaataggaaaaaaaccatcatagtaagggaaaaagagtacaggtgaataaactccccctcacaataacattaccggttacttctaatagattttgtatatgatgcattccaataccatgtctcaattttttgagattgtagtaggaagtgactttgtgataagatctgatagattcgcattggatctgatgtattgtataattagatcatttcttttctcaagttcttgtgtaaatgagaaaaatttaggaggaatgtgcttagttctatcgcttttgat

SEQ ID NO: 308884 - DNA, 765 bp, Cannabis indica
ttcatccaaccataaatactcagtatttatcgaaaaagtatatttagctagcctatgaacaacaatatttacaaatctattgacatgagagatatgcactctagttggtagctttgttttgtccttataattttagcatttccccatttttaattttaatagcatgacaaaaggtaatttactttgtacaaagtgaagcattcaagcatatattcctattttttctcaaaaaaaaaaaaaaagaaaaaaaaaaaaagaaaagaaaagcatctattcctatgttttggttgttcaatccaatcaaatagtaagttagtgggcgtacgcaaaacgcattcattggcccttaattttttatatatttattttttgttttttcgaatcattggtctttccaaatgtatattaaacttttcttattactaatatatcaaatacaaaaacataattttattaaattaaatccaaaatatttacatatgactttctcttatttagagtcttgtttaatctaattttaaattgaaacttggatatgaatcaatcactttgtatagataaattaattttttagtagtttatactattggagtcgttgtgtttcgctaccattatatgtttgcactatactatatatattttataaaattcttatttgacaatcattagacaaaaacaagtatatttatgagtgttgtaaaataattattaagggtgtttatctgatttaattcgctactttttttggtcaaataacattcaatc

SEQ ID NO: 308885 - DNA, 1268 bp, Cannabis indica
aatgcaacatggggaagaacaacttactccttaccagtgaaagtgtgcttaagggtgtaaacccataattctctgactttacgacatcttatgcatcatttgacgactacattattaattgtcaagtcatcagtaagagataagtgtagtctcaccaaacctatatcaagcccatgcacatcatacaaaataggctatcatgccctataattgtgtcggaaattgtgcaaagcatagttcatacaagcacaacaatggtgaccttttttttaccaccattatgagtctataaatattccaaaaatatataggaaaaggggatcgaatcattaactctctgtaacacaatctaaaaataaaaacggctcgtggactaagaattattaatgccccaaccacctaaacaaaatcctattctttaatctgcatttattattcaatacttcgtgaattaattgttaccgaaaatctcggtcaatattatggtgctttcattgagacatgtaggaagctttctaaaagagaaaatgataaaaaaatcttatacaattatggtactaaaaagaaatacctcgcgtccacctcaccaacttgatgcgcataagcatccaaaaggggaagatgtggcttctcgagtggatgctgaggaggaagatgacaccaatgaccctgagtatgtaaaagggcaagacgactatgaaacctatgatagaggtaattatacagagctagtggaattgaggcaacgagctactgaccatgaagtttagttggcagagcaaaaagagcaaaaccaaagaatgcaagaagcaatgaaaaccatgaaaaggacgatggaaatgctgggattcatctatacccagctgttgtgccacccgtgcatgagaaggtaggagaaaaatcttctcaacccgcggagaaccaaagacaaaaagatagggaacctagccgaatcaggtacccttctgagaaaccacctcttagggtgaaccctatgattataccaaaaagaaacaaaatagcctgtgaccctcaaaatttttgttctgatctcccaaaagggaaatgcccgcagggggtatatttcccaaagggaaggctgggccccaggactgcgcagatcgaagaagcatttgtgtgcatcaagaaccaggggaaaagagggggcccgcaaggaaagatccttctatccacttatgacaaaaactcaataaaaaacacgaagacctcagggcacatcttaataaaaaaaaaaaagaaaaccactc

SEQ ID NO: 308886 - DNA, 2805 bp, Cannabis indica
aagtaaaacttaatattttattattttttttgcttgaattttttttattattattttcttttcgaaattaaccgaggttatatttttctaattaaatagtaaaactaagcataataactgctttttttttttttttaattatttaagtatacccatatatatttatacaaaacaaattctattggttcaatatctactatctagaacttaattgtaacatattttgtttgtttctatatattctgtttcctttttcttcttttgtaatggcgatcaaggatgttttgcaggttgctaatgagctgaagtttagtaatttcatactggaatccgactgcagcaaagccgtagatttatcaaatggccagctaaacatgctctgatcttgacaatattgtggtagacattaaagagtttgctttctaagcatgattgtaattgcactggtatttcctttgcggttagagagactaactttgtagctcatttgttgcccaaaatagctttagagtctaaattaagcttgtgataattgggataggggcgttcccccgcctgttgtgagttctgctatcaatgtagacgatccactcttcccttgtaattttcgttggtgaattgaatcatatttcaaaaaaaaatccttgtaaaagcacgattatatgcatacaaacatgatcatctcatgcgcatgcacgtttatatgctcatattttattttttcgcaaagttatatatatgctcatatttattaatacaaatacgtacgtatatatatgtaggtcaagttttactatttatacttatttataattaagtgtaatacatatatgtaaatttagtgtctaggtttgagcttaagtttttgatgatcaacatcatgagcttgagcagcacctggcgcagcctgttccgtcgtcattggtcctacagcaaccatagtagcaacgacgaccgtcagggctgccacttccaccaccaccaccaccgccaccaggatacccaccacctccaccaccaccaggatagccaccgcctccaccgggatagccaccgcctccaccgggaaagccaccgccaccaccgggaaagccaccgccaccaccgggatagccaccgccacggccaccaccaggatagccaccgccgccaccgggatatccacggacaccaccactgccaccgccaggatagccggcaccagtaccaccaggaataaatcctctatatttaccatccaccactcccttttcattagtactaccatctacaactgcaacaatatatataatcatgcatgttataatacaaattaaatgaccaatatatatatatatatatttggttatatatgtttaattaaacgattgattaatggatactagaaaccaaaaaatacacataacaaatcggacctttattattatttttctgagtggaagtttcagcaaggtctttattagctgcaactacatctgaagagatagtgagaaaaacaagcgcaagcaaaagagtagcaatccaaaagaaatgtttcgtcgaacccattattttgtttcgataggcttcgccaaaagaaatatatatgtatgtatatatatattatatagtgtatgttaattggagtgaatgtggagaaaaaagtggatacacgcgcacatatatataccttattttaaaataatatataaatatgtagaaaaccttgtttcgaattgcgcgaattaaccacaatttctagagtatcctaatagcaatgttctaattacatataattattctaagctctatccctaaatcccaactaccctaaagcttaattccaaaccctaaaccctatatatagcctgctgttatatatatacctaattaattaaacacatctactgtatataataaaatttgtaatgactaaatatattttttgagatgaaaaatgttaaaaggtaccagattgaatattttgtctggattttacccatatctgaccaatccgttcagacttgacctttttgtgtgggaaaatccgttctctatgggtgggttattaggtccgacccggtcaacttttcaggtgggttcgggttgaactcataccccgcttgagaagccggccattttttttttttatatagttttaaagtaaatatataaaataaattaaacaatttattttttatataagattttaataaaaattatatgtatgtgtaacaataaaaattgaaatataaatataattatttatattatttttctattatatatattttatctattagattgaaaatgaaaaatttaaagttatgaatgtaatatgtatgtgtatataatactaatgtataattattattttttaaaggttatgctttatatcatttgaacatttaaatttatatcatatggtagacaacataactagtatagaatgtgtaaagttatttttttggcaagttaaatgccaaaatattttttatatatggtgtgatttgttgacttttataaaaacgattttatcaccttattattgtttttattgctttttcttttttttttttttttttttttttttaatttctttaggtaattgaatttatttttcagcttgacgttttatttgtttagaaactttcttgtaagagaagaaattctcttatggaaagttttgttttgtttttttttttttttattagtaaattttgtactattattattttccttaatgtagttcgattgtgtcttgatagattagatcaaactcactgtttatggcaggtatcaagaccaaatacatgatcggatacg

SEQ ID NO: 308887 - DNA, 1829 bp, Cannabis indica
atgacataaaatgcatcactgaattccataaataacagtataataaattatttaaatagctataaataattttcatgattaatcataattaactgctaatttccaaattaactaagcgggctttacagaggacgacaacgatacccctgctctgaaatctgtggaacgggatcagaaggacctgtttcgatctccattaacgcccaggtcgtctctgcaacagatcaagctgcaggaggaaattcaatctgacttcgagttcttcttatcagcaaaccagaggtgtgcagatttgagcattaaaggtaacccgactatccctcctgtattgcgttctggcactgtgattaggaatctggagaattcgtttaagaatgaatagggtgttaaggctaaggttaagattactacagaggatatagaagatgagattgaattttggagaccctctattgcgtgctatgtgtttggagtaaatcctccattatctgtaattgaaggatttattcccagggtctggaaaggggaagtagatagagtggggatgcttacatatggtgtcttcttggttcggtttgattctgtacaaaccagagatagaattttgaatgggggatatgtgtttttcaataagagaccagtgataatgaaggcttgggaccctggcactaattttagaaaggaggacatatctatggtgcccatttggatccaagtaaaagacctagaactgaaatatttgggtgagaaatctttgttcaagattgtaggccaattggggaatccattgcaagtggattcagcaactaaagagaggaacaaacttacatttccttgggttctcattgaggtttctttgcatcaagagttcccggatgtaatatgttttgaggaatatgggggaaatgttaaagtgcctattaactatgaatggaagcctctaatatgtgctcattgtaaaggattggggcatgcacctgatgaatgtaggaaaaaagaaggtgctaataaacaatgggtggtcaaggagaaaaacattggaagcaaggatggggagatagcaggtccggttgtggactcggatggatttcaagtagtgactagaggtaaaaaagatagagggaaggaggtgattgctgaagtacacacaagcaacactttccaacctttgtcaatgccagcagggccttcgggtatggctggaaatgagaagactgagacacaagtaattactattggtagtcatgagatcaaagcagctgaacatacaagaggagggggagatcctcctctccaacatggataggatccttagttggaatttccgaggaatcaatggaaacaaaaaacggttaagaatttcattcttaagcaaaaaattgggttagttggtttgctcgagacaagggtaaaagcccggaagttgggggctttatatctaagtatgttcaagggttggtgttttacagctaatattgcttggcacaaaggggaaaggattattgtagcttggaatccccatagtttcaatgttagcattctcaagtgtactagccaacttatccatctatttttttccactatagatggtaagtttaacttttacactacatttgtttatgctttcaatgaagctgataggagacaggatttatggagagacttataaggattgtttgtgaaagaggaatgggcgataatgggagactttaatgacatattgaggaaagaagagagaataggagatgttgaccgaggttttcggcaactaataaaatattataaagttactgagctgtaagaaattgagagaaggatttttacgtggt

SEQ ID NO: 308888 - DNA, 883 bp, Cannabis indica
aattatgcattgtaagataaacgtttaaataaaaaaaaagaaaatattgcaagcatatgtaaaaagaatccaaaatataattcatgaaacttgtgtgctttaattgaataaaccaaaagtcaatgtatgactcatgtcccctaaaagaagatacattttcattaatatttattgttataattaagtacgttttatgaagatacattttcatagtattcttacgaacaatgtgtatttattattaattttaggttggaaaaatcgtgtatgaacacaaattgggagtaatgcaaaactaatgaaaaatggataatggaccccaaaagactataattatataggacttttgtgtctctcgtgttataatttcaaacttttgttgtttggtatcttatattcaaaaatgctaaatgagcatttattgtgatttataaggatgggtgaagactttttatggtcaagtgagccctgcaatggccgaggcgatggggattaaagaagcattgagttagataaagaagaggtcttggcaaggcgtgtctatagaaaccgatagtcttacagttatgcaattacttcagagttcgattgtaatattattttattttaggagtattatttctgaatgtaagacactatattagatgagttacaaagtgttatcgtcacttttattagacagttagcgaatagtgttgtttattttttggctagagcacatattttgttgatgattgtgtattaaggagggatgatatctctcatgagtttcttgatgtaatctccatgattgtcgttaataaaatgtatgacttattttgggtaaataccattttggaccctatgttttacaaaagttatcaattggaccctctgttttgtt

SEQ ID NO: 308889 - DNA, 1094 bp, Cannabis indica
tttttaagaagcatataaaaacatttatgctttttttaagtatataatgtcaaatttccaaaatacaatactctttcaaaaaagacacagtctatattaacattgttattcgacttttaaagtaaacaacatcataccaatatatagtcaaatatatagtgggttgtgagtaattaattagtgtcaatatattgtaggttgtgagtaattaattagtggttatctaccttatttagtaaatccaaaaatataaaaccctataccaaattacagtatactagcgatttgcaaattttttaatacaggtgtcccttagcatataaatatattatatatatacatataatactaatagtttatatttgtggtcgtttttttgagtgatcatcaccacatgcgcccatccgtgactagatataataaagacacaatttataaatgtatagagcaatatatacatatttatatataagatgatgaagaattaatatactggtatgaattaatttattgttaatttataacttgttacattcatgcatgttcatcgtgctaagcgtgacaagctttcaacatattatagaagataatctctaataattacggcgaagatagttaattaatgaaatgcatgtttattgtgcatagtataataaaatttaaaattatatttcattaaaatagatcactatttacggtcataaggttatatgattaaatattgtaataatttattgaataaatatttaatattgaggatttgtttggtttatagggtaagttggataataaaaatgaagtgtagttgttaatatataggtaatagtaggtagtgtacatgtaggtgatgatgttggtaagttgaaggtgttaatttatcaaatggaaaagtattgattttggttgctcttggctacacaatatggatcatttgttgttagaattttagataagataaacggggtttcatctcaaaattaattggtgatgagtggagtagcccatgttcttatatatgattcaatatttttacatttaatccatgtgagacaatgttctccaatgtcccccctcaagatggtggctatttttgc

SEQ ID NO: 308890 - DNA, 1082 bp, Cannabis indica
cttttctaatcatcacttccaaccactctctttgatccattctcacttccctcttctaaacaacacttcattaaggtatatatatattatttattcaaaattattaattcccattaaccccttttcctaatctctttcgatcttcactctcattttcaaaatgttgatctgggtatgactaaagttctcttttttatttttaaaaaagaaatctttgagtatcatttagtttttgatttagggtattattgtacgacttactacctttctatatagggagaaagaataatagtaaagaaaaaagaatgtgatttttgtatgatattttctactctttattgtgtttggtttgtcagaaaactaattttaagtgggaaattttgcttttttaattactgggtttttattgtttatgccttttggttggatctggagaaaattcttgtatacatatatttatatatatagtagcattttctttgcctcattttgttgagatccaaaatcagttcttttctttgtttcagatcttaatgttctgaggcctgaattgggactttatagtaagtttcaaaatttattttataatattgttatagtcatcaaacattaggtattggatgatgttacatatatatatatatatatattatagaaccctaagtttgaaattaactaaatatgaagttattcccatttaaaattctatctatcatttgattgggtattactatattttttaatgaagagtaatttttttagtgatagtaagaatttggtgttcatgtggggattgttagtgcaaattaaactctttcaaaccatatccaattgtgtggataagaacttttaggatctcttgtatttcatatttactatgtactttattcttaagtgtaattgtactgattttttgaagttttattcagtctttaagtttaatttacttagtttagatattgatatggttagaaactgttgatggaatttgatcagtattcagtatgcttgttacattcatccaaaactcggtgtttgtttgtttaacagtaggactttgaggatcgctgcagcattgcagc

SEQ ID NO: 308891 - DNA, 1312 bp, Cannabis indica
atccgccaacccaactttaaatcttaacacaattttctgtgtagaccatctcttgtcttatttttttatttgtttagtttaaattagttgtttgatgtaataattggtgcaaaaaattgaagatgagataataaattggtgtggaattgtaccatttggtatgaaattgtattaatttaatatgacataaattactggaatttactctttactatgtatagattataacattttaatgttttaaattttatatatttatataccaattatttttaaattatgtttttgaaaaaaaaaaatgaagtagacaaatatcttaatgacacaaaattatgctacgccaccttcatgagttagtgattggtcattttttaaaaattgactaatttgttgttttttgtaatatgtataatgaaaattacaccttatgttgactgttgagaataaatagcatggtagaattcctagagaattaaattctgcaactgataacattgccaggtgggcattgagctctatggttgatttatatatctattttaccaataaatctcttcactttttcatcaaaaataaaaaacatatgattgtctttccttccttcaaagataatctctttcttgtgacactgcaagttgatcaacaagtatcctgttgttgatgttttctttttgccttaattaatttaggtatttttgtttcgaattttgcttatttatagcgactaatttaagttggatatatattgcttttttatttattattatttatagtgactaatttatgtattgtgttgtgtcttaactttgccaatgtcttgtgatagcctataattttattaaaattaaggaattaaatttcttagattggccttgtaaataatttccatttaaattgatggggacacatttttaatagaaacaaatttttaaaatgaaactcttgaattaaatggaaggaaaatataaatgaaagaatcaaacgaaaaaaaaaaatgaggaaataattttgatcatgcaattttttatacttattattatttattttttttttttgtaaagggtaattcattaataatcaaattcaatacaaatgaaatggcatatcaagattgtgatcttacacaaacagcggaccaaatccagcttaagtgtccttaaaaaaaatacatcttaagtgtttttttctcaaaatgaaagtcatcattttattaaacgattagctcagttaccaaacttggtaacaactcaaacaaggacattgtccagattgaaaaggcgatcagggtgcgatatagaagctctagcgaaag

SEQ ID NO: 308892 - DNA, 2343 bp, Cannabis indica
ttttttagtctaattttttttcatcacggttacaattatagttatttaatatattctttaaaatttttataaattcaaaaaaaaattataacatgctaaaaacagggttcaaacagtctatttttgattaattttttttacgtaatagccgaaactaataagagtacatcagtagactcttttaagtaggtgtattgtaaaaacaactcaataatatatatatatatgtatatctatatatatatatgcaaaacagtgttcaagcattttgaataattaataattaattgggattaactttgcttatcaaaaaagataatatattagctactagttatcataaaaatatagctaggcgccaaaagtattatctaatgaatataaatatttccaccatgcatggaataataataataatatgggaaagaacacaataattatttaaaaatttgctgttggaaaacccattaattgatcaaaacaaaactcaaatatattaattaatatatatatctcatactactcattattgaaagaaatgtgtttgaggccacgagagagcttaaaaccctttcatgataattatttaatagataagggtatttttggtacaagaataaattgtaattttattttttttattatatggttatatattataattacatgaactttttataaattttatgaaaactagtcctaataactggcaagcatacttaaaatttgatgttaaaatttatttttactctaatcacaataattatattggagataaaagtcctcctaaattacattaatttaccttagagatttcatttcaatttaaatttagttatttaccatgtacaaaatacccactaataataaattttatacttataaagtggtatgttaatatcacattattaccatatttttataatagtaagatttaatattttgtgtaaggacaaaagtggtatgctaatatcacattattaccacacttttataatagtaagatttaaaataattaataataccaaaattatgattaaatcaacttattgacgtatacacgcattgacatattaaaacaagcatacatatattaattaattattgaattataatttcaacatagtaaaatatttaaaaaattttgaaatatatataactataggataaatatatacaaatttataccaaaaatactaaaaacttaattataaatagcgaatcaaaacaatcatcatccttacaatttttctatatgtaatatgatttcaaattaaattatatatagttagatagtgtgtacaaattgttaattgggactaaaaataaaattgatttaattagtaagtactataaatttaagacttatcattagttgatatgccaaatttgacatccacataaatactatagaaaattggtacgtaagagtatagtaccactaatctgttttttttttcttaattaatataaagatccactacaatgaattaattaatttataagagtgtgagttagtgaatatataaaaagacatataatattaataaagttctggtaacatttaataacataaatgtagagatcctgaatataaataagttaggcctgtgagttttcttttaaaattatacattttttattttgaaaaatattgtatgtttttttttttttaaataataagggtctaaaaatattttttttcttatggcaccttgctagcctttggtattattattattattattattattttaattattattatttgtagcaaattaagtgttactaaaatatttaaacgtatttagcttaattaattaattagctagttaattagtagcaatctacaaatgcaactgaaacgatatatcactaactagctatagtggctttttgtaaaataaaaatgccttaaaacattttaattattcaaaattccattagagaaatgctttatttttttaaaaaaattaaaaataaaaataaaataatgcagtacaagttataaattttaattgccactaaaattaaatagtttattaatatattaacaaatgtcacattatcaagtttttattatgtagtgggatatataaaaaggataattacacgaataaacatttgacaaaaagcataaggttaaattaattaataatttaattggttatagtgggataaatattcttataaattagcacttaataagtgcagcataatgttaagctccacaaatatccagaataatattatatttatatatatatagtcctaataaagagttaaagttaaaacataattaagcaagtgactaaactaagaaggaaaaaaaaaggatgaatt

SEQ ID NO: 308893 - DNA, 2393 bp, Cannabis indica
ttatagctttgcatgtgttttccttattgtcacatacttaaacgaagaataatgtacatatataaaatataatttttcacaattaaatacccatatgagaaaaatcccatatttatatatgagcatatactcaacaaatccaaaattaacaatatacattaactcctaattcgtccttcagtcccttaaggtgttcttttttgtcttaggcttggctttaggtggatgatcaatatattttttaattgtctcgtttggtgttagctatctcaagtaataataagaaattcattgagtttgatacaaattgtgtatgacattaaaataaatctttttttttccttaaatatttcttatctcattgtaattaaactcataatgttatggctcaattttttgatgagacaatgctttatcttttgatgtttgtcaagtttagtggcctagtttacattccgatcaaggctgatcattttgtattgtatgtcattcttttgtatttgtgccttttaatgaaattatttattctcttaaaaaaacaaaaattataaagttataagctttttatcaatactaaactaaaaattattaaaaatctctttaaaaatcaagatgtggatatttatgcattattttctcaaatcaagtgaatcacattattagccggcttataaatatatttgtattaatttatataattgacagttatagccggctggatataaatatatttaattatattataaggtaatattgatatatatgaagtactgcagagtagctcattttcctagcaataaacatttgtatagttgaatctcagacatgggaaacattattaatttttgtaatatatatatatatatatatatacctgggcacatgtattttgtctgaaagattttgatcaatattttcatgacatatatatcatttttattaagtgatatttttttggtactgtttattaattgatctagtataattaattttgtagatcacctaataatttttacacgtcattttcaaacttaaaattaaaattaaaaaaaattgattagaattaacaaatcactttaattcttattccacacatcaagaaagcatattcaagcattagatcccacaaataagctagggctctgcattaaaccaggtagaggagtgtttgtgaggctatttattatttttatatatattataattatatgagccacattattcattgctgagtatatataaattaataataatattcattttatatagggttaatagtgtttaatttacaaaaaattattaactagattctctgttttattaaataacaaaatagaaactgtattttttaaaattgtataaatagaattttgaactaagtagtttttgacaattttctttttaataaaaacaatttgaggacgatttttgacacgaacagatgcaaaaaatataatcaattttgtaataatacttctatattatgttatattaagttttattttgataaaaattaattgatcagagtactatttagtactattttaaaaaatataagatgtgatttatcatttagtaaaatagaaaattcaattaataatttttataagatacaagatttaaaatagtattaagggatgtatttattatattatgcattatttatatcttgacttaagtgatgaaggaacagaataaaacccggattccatggagtcgcttgatcttcatggagttgagaagaaaattcagaactgtgtacttaatattcccattattataattatattctattctattcatacatatatattataaattgagttattaattatatgatcattattttatgtggataatggctttgcacaattgaagatcctctttcagattcttttattgtgaagggactgttttgttgtgagtaaatgtttgacaacaaccaaaaaaatgttgttgttattatatcatatatttatgtaataatcccttcatcattttttataattaatttaatgatgatatatatattcatggcaaaaaaattacttttattttgtcttttttgtgtgtgacccctataagagcatttgcaacaagtcacttatattatatattgataaaattagagatacactcttcaaaaaggttttacagaatgataaatcaatttgatatagtcctgtataatttacaactttaaattcacttttttttttaaataatattatatattcatataaaaaaatatataattttatctaataatatagataatatataatatagtgctaaggtaattgtttttaaaggaatcaatactatgttaaaataataataaaaaaaaagtaacaaagttacacaattaataaaaaaatttcttccatctatct

SEQ ID NO: 308894 - DNA, 1982 bp, Cannabis indica
caaaatcacacacactcacacttgacaaaggttagagttaaaaaattaattaaaggtttcatgacagtttatgatagtacttagctagaaaatcagaggggattgtataaggattctgtatttgacacttaaatcattataatctaattcagttaactgtgtatattgcattcatagtaggtatttaaaaataataataataatttataatgttaaaaataagattaaaaaagtttacagttcaaagtttcaccagtataaaaattaagtatgcgtatggtataactaataactacaatttaagctttgattttgattaacactgtgattatttgtaatttttttttttttttaaaaaaagtgagatgataattataactataatataaattgccacataaaagaaattaggtgttataatattctttctttttctttctctaaccagaaaaaaaaagcaagacacaatgcattctaattattgagctaattaaaagaatatttttttctaatacttaaagcatcccctttgtgcatgaatcattcttttgtttcgcccaagttcctaagtagaaaagggaagaatcaaataatgttcctgttggaaaatctgaatagtgctttgattaaaaaaaataaagtataggtatactggaataatggtgatcttagagtggctgctctcactaattataagcacatatagaattgatagatagggtagcactaattaaaaggaaaaagctggtgtgaaccatacattaaataaacaattatcttgatagaaaaaatatcataaaaaatgtgttctgcatgtagcttagttagggggaaatgcctcaattaaataaattaaatcaatttttcttgtcatttgtgtgttaggtaatggtcatgccaccctctcacatacacacaggttacaagtttttgatgatctcgatcgatttaaatatattcataatatttatatagatttttatacttgactacatacggctttctaattagccccaaaattggaatacccttttctaacttgtatgaaaattttgattttacaagcaaattatatatttatcttaattattttatgactaaacgagcaaattaccttttgaaattggaactacatacatataatatatatttatgtacgcatatacttatgtcatgattcatttatgttacgaggccaatattaccctttgaaaattgtaactcgaacaaccaactccttctacgtaaggtttggaaatataaacacaagttttgaaatttcttacattttgcgtatttttttactattcttatagtatatatagttttataatttgacaaaaaaaaatactatatatattatagtatttccttcatttattaatgttaccattttcttatcacatagtcaagaattaggatgaacaaatcaaacaaaacaacaactactcggctctgtcttcggaatttcaccaaacaaacgttcatacagaattcaatttatctataatatctagtttacgttcccctttgactgaatttataacacaaataattatgaaataaataattccaactacttataccgaaagtagaatttcaaaaatgaaatgttttcctcaaaccctctatccagtatatccacattccaaattttttttttaataataaaacccttatccacattgaactattatcataataacagaaacacccctctattttggataaattaaataatctatatgatgtatacttttaaaaaattataaattatactcttattttgtatttttctaaccagttcacccattagttactcttactttcattcttttttattttgaaaatgactcttactttcaattaggaacaaaaggaatacatattgtaacactttttattgtaccattaaaatagaaactcctagcacaaaatttaaattaaaaaataatatattaataaagttaattaggattttt

SEQ ID NO: 308895 - DNA, 1648 bp, Cannabis indica
  modified_base (991)..(991): a, c, t, g, unknown or other
gtttaattataataaaagtaataatttcattacttaaaaagattaaaataattttattagcatattataattgatgttttctttttaagaagttattgattttatttattaataaagtttaatcaatgtggtgcatctgttactttattatgatatacatttttataattttattttacaataataaatttaacagttatttattattgtaactatgtacgcattaaaatattttttttaacaaaaataaattattcttaaatataaatgttcaacatttttcttcaataataatatcctcagcaaataatgttattattttatgtgttacattattacttttattatgtttttagtggtaaaattctatctataaatttttatatatatttcacatttttacagatatcctattagtatcaatcttgaaagacagaaaatatggtctctttttttattaatttcatgtcacctatatggagaagaaattccaacgacaccaaacaaaaaaaaaagtccaaaattttataaatagcacttaaatcgttttgtatttgtttcctttgttttttttcttttttctaaatttggttgagttgctctctttttcttctatttaattttaaaaacacattaatttcatgttttttatttgtcaaaaataaccacatctttctacttacccaattttattctactactctatttatttatttattttataattcaaacacaataatgtcatattttatattataccacttaattaattcaaaaataacaatatcctaaagtagcaacactgcgcaaagagcggcttaattccctagtatttatataaaaaaaagaaccctttattatgttttaatactaataagctatgctttttccacgtggcagcacctgcaacattgtagcttcagagccacatgcgtcaatatgtgaatattgtcttctacttgagtgatcctttgatgcatatgcacttganctttttttttttttttacctaatcttgttctctacagtattttttttaaaaatactaaactttaaaaataatattttttaaaatatttaatagtataaatgtttatatttacttgtaaatataaatatttaatttaagtaattttaaatctaaaatagaaaaatccgacaatcaaaaaggttatagtatcttcgattaatcacacttgatttttaaaagtaattgcttaataatttaaaaaaaaaattgtattaattttgagtattaaattattatcttttttattcatttatttataatagtttaataatatttagaaattggactgctcttaaattggacatgtccaaggcttttgaccgtgttgattggcattatttagagagtgtcatgtttcatttcaattttcctccccgatttgtttctcttattatgaaatgtattactactacctcactttcttttttgattaatggctctgtatgtggttccattcagccttctaggggtatcaggcaaggggaccctctgtccccttatcttttcattctttgtgccgagggcctttctgctctgttaagagccaaacaagataatggtatgcttaagggagttgctatttctcgaactgccccatctctttcccatctatttttt

SEQ ID NO: 308896 - DNA, 975 bp, Cannabis indica
acaaaattctgttgtggaaagaaaacatcatcacttgttgaatgtttgctagagctctcttattccaatctcacatacccttgatatattggggagaaggtgtgagtactgctgcttacctaataaacagaactcccacactcaatttgaaacacaaagctccttttgaaatccttcattccaaagtgccaaattataagcaccttaaagcctttggatgtcttgcttatgtttctactctaggggctgtaaggtaaaaattctctccaagagctgatgcctgtgttttcttaggctatcctattggaatgaaggcatataagcttcttaaccttaacactaattgtgctttttgttctagagatgctgtgtttcatgaacacatttttccctttgtgtccacacacatataagattttttcccaccactactactacatatgtcaatgctgatcacaatatcaacgcctccctcaacacctgatgttgtgcatactgttgatatccaacaacatcttgacatcccttctgttggtagacctgttagataaactaaaaatcatcttacctacaagattatcattgttttttgtcaactaacaatgtccaaagttagacatctacatctgtcacagaccatgtcatatttgaaatcattgactacactagattgtctccacaatttcgagcccttgttcttgccatttctagtcattatgaacttgagtttttccatcaggctcatggcataccagtttgggatagggctatgtcatctggaattaaaaccttagaggataaccatacttggatgtaacgccccgatattttgccttattttacaaaaatactattttcatgcataatttgaaaagataaaaaaaataatttaaatacaacagtggattttaaaaaaaaatcaaaatgcaacagagaaggatccttcatttgtaaaacaagatacagtaagtaaat

SEQ ID NO: 308897 - DNA, 1828 bp, Cannabis indica
ttaaattaatttaattttaggttttgggtttcgttttacttttttttttaaactttttttaaaaaacttaaaaattttagttattaacttttttttaacctttttttttaacctttttaccttttaaaaccttttaaaaaacttagttttttccgttttaccgacgtacttttacttttttccttttaacgttttaaaggaacgttaaactaaaaatttaattagtttcgttacttttattttttacgtttagttgagtttttgttttttggattaattttctttttttttttttttacaaaacatgtaaattcatacttctatcaaattaaataattaaaatttcaattctttaacttaaattatacatgaattctttttttatttttgctagaaatttattatactatattatatagtctatataatataataccatactgtcaattattttactataaatataataattccttatataaatttttttaaaaaattattaccgtgattaaaaagaaagaaacgaaactgacttttcatgtatatttatacaaaaattagttcaacaacacactcgatagaattggaaaattcaaaattgtatatataaatgatattttcaataaaaaagttaattttttctgttttatccatttttcatatagtactaaaaattggtacaatgttcattaatgttccaaaaataaaataaaacaatatattggtagaataataattgattgataaacgagatcattgagatgatcttcgaccattcatattttatatatttctttgtattttagattacttatattatatgcaatctctattctaagcattatattccctcgatcataattaataataatcaaagaccatggcttaattattcaattatgagtatatatatatatatatatatatatatatatatatttctatatatatagcattgttatcattatcatttttttagtttttttagtgtgacaagaggatactgcaagagtcgtgtagtagtcaataatatgaatcatacatatataatccgaaatattacaaactctaagatgtcataatcaattcgaaccaaaattatactttcttatcactccaagccacccaaaatacaaataaaaaaaatcatcatgtccatttcacgttccttgcatgagattctaattttgaaaacaaccactcaaaaaatatatacaataaataaatctctctttatctatataattattcatttaatttaaaacaatatatataactttcatgaaaatggagggctcaactcaggcttggtacttagttcaaagatagactgtatataaggcttatccattaatattaatttatggctggaacaaaattagcttgaatttgcaatgaaaatatatgatgaaatcatacatagttatccttttaaagattaaataataataagaaaactaaaaaaaaatatatggagttaatttcttcatgtccttttcttgtatctccctaactaataagataattattaattggtcaatatttttatatataaaatatggttatttaaaagtttttgttggtttaataaatatttaaggatataaaaatatttcattaaatttaatagtatgatcagtagggttagttttataaatatatataaatgttaatattgtttattttaaattaatctaaatatatatattaatattattgttttaggttaattcaacttgtactaattttaaattaatttaaatatatataaatattaaaatattatttttaatatttggagtatatttaattttatatttttaaattt

SEQ ID NO: 308898 - DNA, 2372 bp, Cannabis indica
agcagataaagattgtacatattagagcagttagacctggagtgtttaatctttgggacaacaggattcattttgatagtcgctaggcgacaacttttataactaagcattttgtaaaatatattataactttaaaaaaatggatcccagattatgtaaactatttatttattcaagtttaaagtttaattaagaaaattttaattattcatgattttccataaaccctttgattagcaaacgagtgcaaatgagtgtactgtattaattaatcacgatcagattgtcacgatatgtacaatcatcatcaaagttatgctcaactcacggtttagtaagccatttgatgctttagtagtttattttattagtatattatgagaaaagcttaataggaagcatgttagtagcatgatcgctgaataggcgcatgttttattttctcaagtaagcaattattagaatttaatcttggtcgcgatctaactaggctagctcactgtttcgcaggctactttaatagaatgggtgccaagtggaacacgagaaaccagggtagttcatttagatctagtggcagtcagagagtctagtttcccccaaatatttgtggccaaggtggaggcctaagaggtagggcacgcaatcagggaggtgttaacccactgcaggctgctcagaattgggaacataggtttactgaaatgcaagacaggatcaatgaataagatgaagaaatccaatgtcagagagagcatggtgctcctgtaatgcctcctcctgaggtgtagatggctcctgccccagttatgcgcaagtagggtaagttcctattggcaatcgtatggaacaactttatgaaaggttctgtaaacaagcacctccagtcttcttaggaggtctggacattatgaaaatcaagcaatggctaatagttattaacataatattgaattttatgggagtcactggcaatgatagagagacctatgctactttgcatttccatgaggatgcttcggtttgaggggacatggtgtccctcatatgtcaccagaataacctagaaggaatttcaggaaatatttaattctaagtactataaggaggctgcctatagttgaaagagaaaagaatttacacagttgactctaaaagagatatgtcagttacagaatatacaacaagtttgagaagaaaaatagtgccatctgattttaacaagaaagaaaaatatctggatgggtggaatcccaagattaaacatgacttgatgatcacaacggatgacataactacctatgttgatatggttggaaaggtactgcaagctgagggcgcaattgagcatatctaagagtcctaaggaactcaggttgttagtggagccactgctcctcttacctcgagttatggtaggggtggtagtgattcaactactgctcagaaaaaaaaaaagtttcatctgcatctggtggctcgaatcagaacaagaggttctgggggaaccaaggtcgtggtaatatgcagagtggatctgagaaccgatacacctacccagaatgccctaattctaagaagcatcatttggtcaagtgtgaatgttggggatgtttctggtgcagagtatctggacattacaaaagagactgcgcacagttaacgaaagaagatcaaaggacagaggctaaactcgctctagccagggtgttgctcttactcatgctgatgttgaagccattcattcattagtgacatgttagctttcagttaacaactcttactactcttttttgtttgaatctggggccactcattcgtatgtggcggctaaagtaattaataaattggataagtcgtgttacagttaaaaataggatttggaaccctactgcctggtggagaattagttatctcttaaaggtggattatgtctataccaatttggattgaagatagggatttgagcactgacctaatggaattgagtttagcagatttcgataatatactggggatggattttttgtccaaatatgctgctagtattgattgtaagcgaaatatggtgatctttcaacctgagggtgaggagctgtttatttttgtgggatcagtgatgttagtgttgaaagccaaagaattattacaggaggagtgcctagggtttctggcagtggtgttagataccaatcagcctgaatcagttcagcctaaagacatcgaactggtttaagaatttttatatgttctagaagaacttctgggattaccactgcaacgaaaaatagattttgtaattgatttagcacccggagcagagctagttctaaggcaccatatagaatggctcctgcagaacttaaggaact

SEQ ID NO: 308899 - DNA, 2231 bp, Cannabis indica
aaaaaaaaaaccctaaattcctctctatctttccccactcttccctttccttacgctctttcttcctcgtactctctctcttcctttatctttcttctcaggcaagccacaactattctctatcgtcggcaagtagtagcctcaaactctcggcttcgacagtcccaacaggctcgagttccctctactcaacttcttgctccaccaatttcaatggtggtttcacgggctcgagttctctcactaagttcaatggtggaccaccaagctattccttgctccatcgtcagccatgaagggtgtgtagctggttcgaaaacctaaaccccgtatttcgagttccttctactcagtttctccctctcttgtctccttgccaaatttaatggcaaaatcgtcgtccccaagctcctcttgcgagaagatgaaatctatggcggaagaggtcaaatctagatgagtttggttaaaatgaatgtccacagaagaaagagaagattatagaggtatagggtgcttgattttgtttttctttggccattttttcttctataaatagaatattgaacaatgataaaaattagcagtgttcattaaactgctgaaaccgcccgtaccacaccgcaccggaaaaaaaatacggtttgaaattctttgaggcgcggtcgcggtttgaatttttcctaaaccgcgtagtgcggtttgcggttttgaattggtaatgtgcggttcaaaccgcaccgcaccgcacattataaaaataccaatatttatatttagttaggtctaatatgtgaatgtccaacccaaagctcactaattattgtattattaaaacttaatttttttccttatttatttttaagtcttatggtatttttgacaagtgttgctcaagctttgttgtattggtgatagtttaattattggtgatagtccaaactgcaaaaccgcaccgcaccgcgctatttttgcggtgcggatgagatttgagaaattgaaaaaattgcatgtgcgggttgatttgaaaaaatagtcaaaaaccgcaccacccgcaccacgaacacccctaatgaaaatatgataaaatattgccatttatttatgtataaatttgagtgtagtctgtatagttgtgaataattggtttgaattagggccaatcctatgctaatttggacattcgacaaaaataaaaattgggggctaagtgaaaaagtgaagttgttggatttaatgtaaggactcaattatgacaaagtaaaagttatataataaaataataaataataataataaaaataaaaataatatatatatatatatatatatatatgtatgtataaaaaaaattcggaaacccccaccccatttcgtcctctctctcttcaaagtttcaaaaaaaaaaagccaaccaccactgccacttttcgacgacccaccttcggccaccgtctggccccatgcgctggactaattgaagccccaggtgttggcgacctcaaccccccagcggctccgctcctttccccgccttagcccgggattgccagtcaaagtttgaaggctcaaagaacggatttataggccaccaccggtgtctgtttgacgagtctttttcaccactagacttagctcgttgaggagaacaacctacaccaaaccagttcgcctaactcactacttttttcgatgatatttttgtagctctgccccttttcagtgatattgtgtactgttttgacaaatggttggcatgggtatgatctactcgtcgaggtggttgttttgatatacactactcctatttttggcgatgtttccggtacaccaatttttaccgccactagtagttaatgtgcactgcttaggtgagattttagaactccaaactttaagtatagacatattatatgtcgttggactcaattttcagtgtagaatgcaatgatgataattatttggccatttaatggtataggtgagagtaatatctaagattagactaaataattggagctcaggacttgagagcttaagattgtcttttggacaaagcttaacgacttgggagaggtaggaactcaacttgatttttggacttgaattttatatgtgttgaatatcattagacatattccaatttttatgatttgtaaattgtttaaaaaattaaaaacttaatctgcatattttttctggactgtcctggggcacggagtgccaaatat

SEQ ID NO: 308900 - DNA, 1129 bp, Cannabis indica
aatgttgttttgtttattaaaacacataataagacaaaaaaacaaaaaaaaaaaaaaaacaaattctatgcgccataaaattatatggagcctatttcagttaacttaactatataaatatatatataaatatatattttaatatttaaaattatgttctataaaaaaaatttaaaagttatgttatttggttaattattgtgggcgcttataagtttctttagatactgtccatgaaaagagagtaggaccatccactattatatgtccacttttgtgagcaagaaatgtgtaatatgtttttctctaaaatgttatatatattggactaataattataattgatatatacatatatatatatatgtctgtgtataataactataatgaacagagactgaacatgataaaggcaaagaactcatggctaataaaacacaagccacaacccagtttcgcctgaataatcaaaccaaataattaaatctatttttgactcaaaagaattgacactataattcttccctggctccaccttcgtgcagtactaaacattatatgatcgacataataaaatagaattatatatttattttttgcctatgccatatccaactacatgtaatataaacaatatattaatacataagatttttttatttttaaaatggaaactctatattaattaatatttacatgcaaataatactacactgtatagatttgctaattcaatctaagaaaaagggccacttgtttaatttattattttttttttctaagaaaatatactagttttaattttttttttttgaatggaaataaattatcattaagcaaaagccaaaacaagtccaaaagacttgcatgatcagctacaggtaaatctggccacccaccaaactctcgcctcatgaagagtgagccattttaaaatttatccattgaatgaggaatttttcagaataataattattattactattactattattatacatatattgtgatcagatttagttgactatatatatagtggtggtatagagggccctcttccaagttgtatccactgcagccttaggtttaagtctaatatagtataatagtatttattccttcctccaag

SEQ ID NO: 308901 - DNA, 1286 bp, Cannabis indica
acatttgtaaaaacacagtttttcataggtaaaagaaaaatgtaacgataagtgttacaataaatcatatatataatataggtttgtttttaggatataccataagatataaatatgtatatgcacgtgtacgaataatatatataatataaattgttattaatgttactaaccgaatagcattagtatttagaaatagtggcatggcaggatttaaaatttaggttcctagataatatgtaattagttagtcatattattctcttactaatagtttttcacaatttaattaaatgctgaatacaaatttcactctgtacttttaagatcctttctaaaccatatataattcctaaaactctcatagccaataattataaatctttcaacatagaatcaaactaagactagaggtacgggtagagcaccaagtcaaaggaataagagtaatcgaggttttgagtcattaaaattgttgattgaggcctctatcacagtgttcgatttgtaaggtaagaaatttttccttgtcttttaatttcggaatttgatgtataatttttgtcaagtacgattttttgtttttttaaagaaatagtgttttgtaaaactatcatatctctctctcatcctagatcctccgttttcagtgatctaggtacggttttaaagatctaaatattttctgaagagtgttttccctagttctgaatctttcgatgtcaacaattcatgtttttgtactggttgtcgagttatagtttttccagatttctttctgatattgccatagtaaaagtgcgatatttctcttgatatctattattttctagtgattcaggtaccgttagaaatataattcgagaatccatattttccttgaaaaaacctttccctaattcggagttcttacctgtcaaaaattggtatctttactcggttaggttatctcattttaagttttgttccagaaaaaagtgtccttagaaaaaactcatcatctgtctcaattttgatccatttcaaaagatctttatcttgttttaaatattaagaaaagagctatattttttttgaaggaagtgctatctggatcggggttgtaactatttttaaaattattatttttgggctgtatccagaaattggcacgatcgaaaattttaaagaaactgttttaataaaatatgcataaatcctagtatgaataactctgattttgatggtctgtataccgtttagaaaggtctttcgattgtctaaaaacttgtgaacaacagtattct

SEQ ID NO: 308902 - DNA, 1703 bp, Cannabis indica
aaaaaaattgtatattttaacgaggaaaaattttttgggcccctgggctgggtgggccctaggcacaggtttagcccacctatgcccagggccgggttcattgatagtaacatcagcgttgcaagtagtccatccaggagcgggtgggagcaatttggaaaaggccatgccatcgggagagcggagctcatccatctccgtgagcctcctattgatctaggaaataatagcagtaggaggagtttcaattgcgttatgaatccggttgttccgctctttccaaatacgttcgaagatggcattgatatttatgttgtatctttccattactttaaaagtaactaaccaaaagagtacccaaatgtcagtagataaaatttatttgatttaaagtttagttaattttttcttcataatatatagggattatttataaatacaaaaatttatatatatatatatataaaatacaagttatttttataatttttatgattttatttacaacaaatacaatcttttgatatatttttatattgtactcttgttaatttatcgtcgattttttattattcgtatgctattttttatttttattttgatgttatttttctaatagtacttttatgtagttttttttattgttttgatattatttttatagaacaccgtaaaaatattaaaataaattctttcaatgtaaaaacgtaaaaaaaaaaaaaataagtgtatccctaatgtatatagaaattaactaaattgtttcttttaattatgataatcttttgggatatatacaatattatggaaataaataaattagaatttaaatatatatatatgacatacaaagttaaggaattattacatagaaaatataaattgtacactttttttttacaaaaattaacttcataaggtgtgaacatttatacattttatgtaaatttaattactaaaataccacttacactatcacttacacaatcagatgatagttacagggtagtgattgtgtggttgcatcagacgaaggtttctatcagacaaaagtttctgggtggttgctgaatggttgctgaatgtttatgccactgtattaatgcaaagcatgcatgcatgtgtgtacatgcaagcccgttagcgtgaaaccgttacaaagtgttgagtatgttgtttgtgtgaagaggagtgaacgtgaaatttgaatgcatatcgagaagaatgacgttggagaaggataaggcatgcaacggagagacgtacaaccacactttctacaaactctaaaaccaagaaggtacgagtagcgaagatatataatacaccttaaaggtctgaggacctgaccaatggtactctgcaacctcaatcctacaactggggaccacactcctgcaaccgtggacacactcctgcaactggggaccatagtactcctgcaaccggggactacctgacacaagacaaagatacgaggtgcaaggccacctgcacctcctgcacctacaacgtgtagcatgaaagcgacaccttgttcccttggggccactgtgtacctcaggccattagagcctataaatacccctttctcaggtgtgagagggggttagaaaatcattcgtgtaacttaaccttgagaacaatagaaaggttatcatattctctaattttgatatagcaatttgaattcatatttcatc

SEQ ID NO: 308903 - DNA, 1979 bp, Cannabis indica
ctttacaaaaccaattacattatgatcatggatttacatgtccatgtgagagcgtctgccgtaatttgctctgaggcagttaccttcctttttggtttttccatctaactttcagattttcctgcagtttccatatccatcttcgattcttttccctgatttgccgcacttcactttcatttttaccgtgtattatggatccattaacgcaaaaaatgaaaggaattatcaacttagaagaagaggaggaatccattctgtcgtttgatgaagaagcgtccaacactttgaacgataatgaagaacattgtctccttgctcgagtactaaccagaaagccagtatatttgtctacattacaaaagcagatgaaggtccattgggatggtcgttttcctgctaaaatcactgaaaaagaaactgatcttttcatgatcacctttggctgtgaaggtgacatggaaagagttcttactcaagaaccttggcacttccaaaaccaccatattgtcctccaaaaaccttctgcactacaaaatttacaaccgactgatctcaaattctcccccttttgggtacaagtttataggctaccttttcttagtaaatcaagagggttagcaaaggctttgggtaacattattggggagtttttggaagtttatactgactctctcaatgaaggatgggggccatttttacgcataagagtgaaactagatgttactaagccactgagaaggggtcgcaacattcgtctgcagcaagttcgtgacaagttttgggtggatttccgctatgaaaggttgcccgaatggtgcatggaatgtggttgtttgggccatccatatcagaaatgctctactttccttgaattaatagataatggtgtggaaccagaacttgcttatgggcctgcaatcaaaggggctgccttgccaacttctggttacgatcgatacaggacagatttctccaaaggccatgtttggcctttagttactcgacttgcaaggaaaaccataacaagtaccatccctgccttgtctcttcgtggtcagccacagcaaacaacactgctatatggggaatcatcaggcaaaaaaaatgtacatcctagtggcatcaacaattcagatccagataatgggaatttttcatcttcgagaatcaattcctcacataccagtggtgccttctcctttacaccagcaactttaaactcggcttctctggtgcataatgacacaacaatggctcatacatctcaggttcaggatgcagggaaacatacagcaactatgaacattaatccacaacctactatgggtgtttactgcttgtcctgatacaattaatgggcaaaaaacttactcatccattacctccagcaacaaaggcatcaacacctggccaggtttatggtaaaaccaaaaatcccacggttccatcaccatcctcaaccagtattatgccttcttccccaactgagattgatttatctgacattttcatgccaaacattggatcacctatgggttatgttgctacatatccgcctgatgtaagcaactcaaatgcttacaccaccctctccaacatggctagcccatcagtccacgctcctatcacaaccgattccacaatctccatgactactgctgcatcttttggcaaagaaaaccagtcaccaaaccgatcttccaagagacagccaggaaacttgtcaatgagaaaggctcttaagcgttgcaggggactacaacttgcttcctcaaattcagttctgtccactgatgctgaggtgaaccggaatgtttctgacactgatgcagatccatccgtttctttggacaactttgcggaggctgtctcacagccccgcaaccagccatgaaaatccttagctggaatgcgcgtgggttggggaatcctagcgcattcagacaacttcggttgcttgtgaagcaacaatctcc

SEQ ID NO: 308904 - DNA, 1223 bp, Cannabis indica
tatgaatgcataataaatatttgtgagaatattggtttttttttttcattttatcttaatggatacccgatgggttccccataaccgagtgggtacttcccctacctcgaatccataggcaattagacagggatgggcggggataggggtataaataggtagtggggatgggggcggggatcgcattccccatgcattaaccgccaaagttccatctctacttccaatgcatactccatgcatccaacccaagcttactttaaccaatgcgctggaaaggagaaagcacttatccaaggtgcaagtaaactacattgtagattatcctatcagttaaaccctgtgtacttataaatcataagactacatttaatcacacaatcttgattattttccactgtgctgatgacacaataaacaagaatatcaatgtgataagaatttggatgaattcataaatcaaataaacaaataaataatcacatgaacaaaataacacactaaataagtaatgaaaataaatctatttctttattgataattgaatagaaaggattacattgaaatagagttttatctatggcacaaagcccaacactctaagtgtcccgtataacacctccttccttattacctgctcccaacactgactaagttgtttgcaattagaggaacatgcaacatattattcagtattaaaggtgttgaactggtaggttttaaactgccactacaaacatatttgatttgtaacttactgccatttcaaaaaatttattatttccttatcacaatactcagttttgtttctcagtttgtctccatctagtgtcaaatgattattggccctactatcaatgtaccagttgtcatccttgacaagacttggtgttgccataagagcttgatgttgctgctggtgttggctatcgtcttgtccagggggctgtcccatataagcatcatcttgcctattatagtaggttgcaagatgaccatattgcccacagatctagcatgtaggtttgaagttgttacctctcccaatcttcctctaccacgattatttcttgaacctcctcctcctcctgagttgttggtgttgggttttatgccctaaataaaacttcatttcaatgtaatcaagtttattcaacatcaataaagaaatagaagtatttttcattcatttgtatattttggttcatcttatcaattgcttg

SEQ ID NO: 308905 - DNA, 756 bp, Cannabis indica
caaaaaaaaaaaaaaaaaaaaaactagaaacattaatagacataatgcggagtatgcttagcaactctaatcttcctaaattcatgtggattgaagctctaaagatatcggtgtacatattaaaccaaattttaataaagacaatttcaaaaacttcttttgaattatataaaaagattggaaatcaagtttaaatcaaaataaaaaaaaaacatcagctgcccattgttatggccttattggctttgaatcacttgactttttcttctattctgacacaaatacactgccctaattaagtttcaaaattcaattagattttaccacgtaagagtattagattggcatatttaatttttatttaatttacattattattaaccaaaggatatatattggcattgtccatgaaaaatattgtctcgaactcttattttttcctttattataaattgggtttgttttgataggttataaacagaatgcttttttattattattatacttcaattttgtattttttttgggcttgtttggtacacaagattagattggattatatagattaatttgtctagtctaatatttgaacatgctgaaaatttgaataactaatccagctaatactatctatttaggcttatttatcccatccaagagtgtgggataaataatcttatactggtcagttttttattttttttttggtaaataccattttagaccctgtgttttgcaaaagttacagattggacc

SEQ ID NO: 308906 - DNA, 691 bp, Cannabis indica
ttcctttgtttggttgcatttaataccattactcattatatatacactataacaatgcctggcttcacttattagatctcccattagagtccttatccctctcaaaattgtagtgaatatcatgcactagtgtcaaatggaagtgattgctccaaagtcaattaaggcccaacgtccgaatatcacattgtatgtcgtaggtcaatcgactattacaagcatacattatttgaaaatactttgatgtgtatcaggatataatgtgataggatgtcacacatttaccttggggaagagagaatttccattgaatatgaacaagtgagatttaacaaaaaaaaaaatatatgaacaagtgagagtggcaaggctctaaatcttggtcagcgaggacaatggctagaaatgtggacttgaaaagtacattaaccgaactcccattatttatgaggatatggccaccggcgccctattcgaaatcttcttttctatacaacgcgtcatgatgtgaaaagtggacagtcttggtatcttcttgattaaaagttatagcttgttccatgagcttgggtgtaacaccttacttatttacagttgcttttcaaataaaagaaactaattaacaaatttgaatgaaattaaaaatgtaaaaaccttttttttttttatttttttttgtttttttattaag

SEQ ID NO: 308907 - DNA, 2294 bp, Cannabis indica
ttgatctagggttttgtttagataaaacggagtcattttaaactcggttgacttggaaagtcaaaaagggaaaagtcagatttgacctgggtttaaaattgatgattgattgttggtgtatggcattttggtcaaattaattcctacaatggtatcagagcttggttaagctggaagattcaacatatcaaattatctgggaggacaaacactgaaacagagtatcaagaactttaaagaaaaataaaataaaaaaaacactacaagaactcaggaactcaaccttgaactaaggacactcaaaaacaaaggacttctggggacattttcataattttttctctcaacctatttatttttctctaattttattaaaaatgagcaatttaaaggtagaattgacaagtttgatgattctggtgattacaggattttgaggagaaagatcaaatcactctcggctcaacagaaactcttgagagttcttaataaccccatagaatggccagaagggacaacaaaaattcaacaagaagaacatttagaaacagcaactggtatcatgatattaaatctctcagatgccaacattcgattgattgacaaagaagatacacctaccaagatctgaaagaaactggaagaagagtttcaacagaaatctttaaccagcaagatattcttaaaagaaagaatttttggtttcaagatgagcttatccaaaactcttgatcaaaatttggatgaattcctaaggatgcacattgaacttgtaaattctagggaaaatgaggctctaagtgatgaagactaggctattatcatcctaaacttattaccagaatcctacagtgaggttaatactgccattaaatatggtagaacctcaatcaccattgaataagtaatctctaccttaaaatctaaagacctagagatgagaacagagaaaggaggcaactctaatggagaagtcaacctaagtacaggcagaccaggaataaggaaaccctgggagaataggggaagaagtcaaagcaaaaactcaaacaaagtaagagggccccaaagaggaagatcaaactcgaacactaaaaaccctgatgaaaacaatggttaatacaactatggaaaacttgggcattttaaaagagattgttatttcataaaaagaaataacagacacaaatctcatggataatgagactctaaagccacaaatgctaaaattaaacatgatttacatgatgcaaatttgagtgatggatatgaaagtggagaagcgtaccaagttggatcatctcttaaagatgaatggatcctagactctgattgcactttccacatgactaacaataaaagctttatgtttaattacacggaatccaatggtggtagagtaattcttggaaataatcaaacttgtgatatacaaggatctggatccatcaacttcaagatgtatgatggcatgatcagaaccctaagtgaagtcaggtttgtgcctaacctagctagaaacttaatctcactaagtgtcctaaatgatctaggtgttgtgagaaagattgaagctggacaaatgaagattagcagaggagtcctaactatcatgaaaggacataaagaaggagcttatactacttaaagggcacaccagttgcaccctgcaatttcacaacacacaacatcagtgaagaatccaatgccatgctgtggcacagaaggctaggtcctattagtgagaaaggtctgcaactaatgagtgaacagaagctcctagttaaggacaaggtcagtttgattgatttttttgaatgttgtgtacttggaaaacatcatagattgaaattctctactggaacacacaacacaaagaaaatctttgagtatgttcactctgatctgtggggactagagaaaactagtacccatggtggttgtgtctattttttatccattgttgatgaattttccagaaaaatctggatatttctcttaaaacataaaaatgaggcatttattaaatttacacagtggagaacccttgttgaaaatttaacaaatgaaaaattgaaaaactctaagaactgacaatgggttagaattttgcaatgatgaatttaacaactactgtaaagaaaatggcatacagagacacatgatagtgagaattacaccccaacaaaatggagtggtagaaagaatgaacatgataatccttaacaaagtaagatgcttgctgttgcagtcgggattatcccaaggattttggggagaagcacctttaactg

SEQ ID NO: 308908 - DNA, 1112 bp, Cannabis indica
caagatttctgatcactctacattggttaaagaagttgaacctccatatcctcaggcttctacatcaatgacagaagtcccaagtgaaatattttcaaaagccaaatctgttactagcctcattaagagatactttcctcactcaaacgagattaacaatttctcaagtcctgcaagttctgatgctacttctaaaattcgaaagcagaggaagaaatactcgaagaccaaattagatgatcgagttgaatcctttcccaagtttgctgaatggagtccctcagaaatacgtggacccgacgttgggagacgtctccaaatggcgtcaaataatcttggatcttccgcaagcaaaaaaaagtctgcaatttatttcagcagatctaaagataaaaaagtgttagggtttgatgctcctttgactaaatggtcagtttttgagatcagtgacagtgatggctaagagaatatgaaattcaagtgttaagtgttggagggattcaagattacatcaaataaagctaaaaggtggtttccatttggaaacacaaaccctcaagccatcacaaattaatttacctaatataggttcaatttgacattcccattccactaaccctatactgaatgctccctaaatctctatgcattgcagtatcatgtttcctcaggtttcatattatttgctaactccttaggtgttgcactagttagtgatttatgcagttcttattgcaactagcacaagaaaacgaccttaaggagatggtggataatagttcagaaagagttatttccaaataagattttggatagtaagaacagaagaagattgcacttttagctgatctctcatatctgtcgaactacagaaatgagtggacacattaacggtaaagaagtacctgaccagccatttagtgtcttctgattttgttttcttaagtaaatgaggtgtgttgagggttgaaggataacatgtacacaactgctgtctggtttgctcgtcatgaagaactgagagagtgggaaagtgatttggatgtataacttatgtattgatctttcttagagttttttaagtatatatatgtatatatatattggttttg

SEQ ID NO: 308909 - DNA, 912 bp, Cannabis indica
aaattagctatttaggtttttgaatacaagatttggtgaagagagtaattttgtgggtggtcaaagaacaaagttctttttctttctttctagtgtggttcaataataatagataggaagagattgtcaagtgagtggcagatgaacaataaataaaatggtgtttacctcttatcttatgggtttgaaaatgataagaaaagaaacaataaaaggttgatctaaagagtaagtcttttctctacactatagttcaagaatgagaggaaaagatagtagaatattggctaggcacaactcatgacttattttcctttttctttttaaatcacttaattagtcatgtgctgaatttcaataagccacatttctagtcatgtgacttgtccacatttctaggacccattttaccacttctcttctatttttaggtctctaaattgacagtgtaaaactccattaattattattactatagttttctgctttacttacttacaagccaatctaacattttatgtatgattttattgtgttccaaaaacataaccttaaggttccaaattacaaagtattcaactaatattctacaattaatctatagccactatatatataataattatactctacatatttaatctattataaagttcatattattccatcgaataattagtaattttgcttcttgaacttttggcactacttacttttactccttactccttaaaatatacgaattgttaaaaattctcccttaaatataacagttacataattatgcccctcctagtaggttcattttcttttatcgttaaaaattaccatttttacctcttgaactttgaccaatacaaaattttgctcttttttttaaaaaaaaaattgattttaaaaattataatattc

SEQ ID NO: 308910 - DNA, 2514 bp, Cannabis indica
cactgggaggcatgcaaaagactacttcgttacctaaaaggtacactaacagatggattatggctcaaatcaacagatacttttcaactacaaggctacacggatgcagatagggcaagctgcatcgacgacaggagatccacaggaggctatctaatgtttttgggcaacaacttagtatcctggtccacaaagaaacaataagttgttgctagatcaaatacagaaagcgagtttcgcgcccttgctaatgctactgctgaggttaaatggattacatcacttttgtctgaattacaagtaccactctctcaggctcctattttatggattgacaatcagagtgctgcagctcttgcagcaaatcctgtgtttcatgcaagatgtaaacacattgagatcgatctccactttgttcgagaccaaattcttgccaagcaactctcagttcgttatgtttcttctttagatcaagctgcagacatactaactaaaccgcttactacagatcgttttaactacttgaaaagcaaacttcaaatggcttcatcaccatttcgtttgaggggggatgtaaacgatataactattacttctgacagttagttatgcaagtagttttttctgttattttccttttgtattgtacttcataacagtataaataaatggtctcaagctaaccactttggttaagcttttcttggtaatctgttgtgttcaaaggctatgctaattgctctgctatacactctgtattttctttcatcttcaccattgttaaagcttatatccacacataatataaagataattacaagttttgtaacccaaaacataagttaagttgaccaagtaaatgttaaaaaagaagaatattgtgatttattttgattggtcctcccaacgtttacttgactagatttcatttactcatgatcgatgacatatacttatattatagctactcttatttctcataattatatgacatgtactcgtagctagctacatattccactatctatgatgataataaaataaaagagacagaaaaggaaatctcaacaatattattaattggtcacctaattaatttatgttttgggctatatatatttctggttaatatctttgtccagtcgttctatatatagtgtgtggtacgtaatagaagtaatgaatagttaattgaaggatttcaaagtcaagtcaacgtagcaagtcataaaccatcatatcttttgaacataatatttcctatacatatatttatatatcatctaaaaaatttatatgtacaactaatattttaatgtaaaacataataatttaaaaatctaatatatataatacaaaaattacaaatatattttagaacttaatatgctatagttatataaatatatgttatatattggacgagaatactcttatgacttgtgtagcaaatagggttttcattcttaatgtcttttatattgaaatttatcacgaatttaaagacgtagaaaatttacatatagattaagatcttatatcttagaaaaagaatatgattcgttttagttataacccgctattaaaattagagttataaattgtagaatggattagtaagatgaatagatttacaagttgacaaaattaatgttctaatctttgtttgcttactgaattttacagattaattaaattgttttcctggttttaataatatttcttcaatttttgtttgctaaatagaaagtaaaaaaaaatatatataattattgatacttgataatagtgtttgtatacttgaaacgagacaaatacttgcgttataaatttttcctatcaggtgcttgttgatggtgtggaaggtagtaaagattgtcttgatggtgtgtataaggctagatttctttttattttttttttatttttttctttttctattttaggtcgatctacttatatgtttcttttgattatgttttgtatgaaattaaaggaaaccttgttgctttctgttcaaaagtttatttcgtgagaaacgattgactgaatctcacagtcaaagttttgtctcaatagcttcgaatgaaatttaaatggtgatctgctttagtagcttcaagtgacatttttgaatagcttgaatggtggagattggaacgatccaatgttgtttgatgatcgaaagttttctgtaagcaatatagtagttttctttttttttgtttttttttttttttttttaattctgacgatcgaagctttgagtagttttaatggtaaattatctcggcaccttgaattgacatttttgaaccgcttcaatggtggagcttggaatggtcactacaaaaaatcttacttttactcacaacaaaacttgtgactaattataaattattcatatgtttgtgactaaaaggaaggtgcataactaaaagtattagtcacaaaaattacaatttattgtgactaaatttaatctaaatttatttttagtcacaatacttgttg

SEQ ID NO: 308911 - DNA, 641 bp, Cannabis indica
aaaaaaaaaacaaaaacaaatacatataagtgaattatttaaattatattttcagtaaagtaaattatttataatttccaaaaacaaagcatctttgataaccataatattgggtcctcacctcatattataatttctatactaagaacaaaagtgatacatacctaaatattttctaaatatatttacagagagaattgtactgataattaataaggacaaaagtaatgtgcctaagtaataattaatgttctgatgatagtaaattactttcatatccagctgcatgaagtcgataattgaacgatataacaaggcaaaggaggaacatcagcaacttctcaacccaacatcagagataaaggtattattctcactgtatgcttaattgtttatttgatgaaaaaagggtgcagcagtactattagtcatcttatatatataatagtttttttgttgctgcaaattatatattgccagtcaaaagatattatttctcagttactcaaagatagactctgtctgctgttaactttataaagatagatcaggaagaatatactataatgttgtatatatatatattgttgtgcacattgtcccacttaaaataaataatggtagagaattgagccatatat

SEQ ID NO: 308912 - DNA, 1097 bp, Cannabis indica
ttttttaaaaaataatatttttattagtgatcgatggctataatccttattaatgggtccatccttcatgtatcaatcactaggagattattaaactaagccaccaaagtacatggaaaatggaaaaagaaataataataatttaaaaaattcatgattatcaacaagagatgggaccattaattaagcactaactagctaccaatagctacttggagtgtaaataaaatacatcataataatgaaaataaaaagacaattaaattacaaatttaggggatgataatgaggtttgaccgaagaccaaaaaaccaaaatggtctcgttaagtaataatattatagatagtggagtagtctttttcttgtacatgtaatgttatgtgattttcatcaaaaatgtaatgttatgtgatgaattaataatgatgaacgtgttgtgacacaagaggaccatgcagaatcccattatcgatacgcagttcaaattttataaatttcattgggactcaaaaacgtacgcaaaggtccctactttaacttttcttgttttttttttgactgatatgtttcaactttattgttaaagttgattagcccttggatttctggtgggattttgatgcacattattttgtctctttaatcaattataaagataataatgtatcaatgtggcaataagtttcgtcctacaactacattggccagaacacattgcaagaccatgaaggaattattatgatgccaattggtaacaatgacaaataataataataataataataataataataataataataataattaattaaaggagaaatttgtgacaaaagtcaccaaataattttatttgatgcacattaatttttaacattttcaaatagtaacaataatacttaagttctactttttgtattagtcatttcacttaaaaaaaatggtcaatctcagcgagtttgtgtgtgttcgttgggatacacctacaaaattaaaaaaaaaatctcaaacataacaataacggcggtgatagtgtatttcctgctattattgagattttttttttaaactgaatattttacaaataaaggccga

SEQ ID NO: 308913 - DNA, 1419 bp, Cannabis indica
ttctagaaggatgacatgtggtgttctcaacttaagattaatttgctagggtctggtcaaaagcactaccaaaaagccagtcccaaccgatacagaaggataggtgcaagcccattcaaggcccagaggacacaccttcgagacagggcttatccggatccagaatggcctccttccttcttgagaagaagtgatcgaagccctccaaatgagcatttgggatacatccaaagggggcactccaagaggcacctcagagacctggtctgggataatgtggcagccctctgacacaatacatatagccagtggccgcaaggcatttgtcaaggatcttgtcgtccctagacgtacggatcgcttctggctcatgatctgagcttcaaccagtgggtccatagtcacatatttcatgtatttaccccattagtgggccaaccctagcgagtcacgaatgtacccaaacccggttcctaccctataaatatcaccttataccctcatccaaatattaagaaaaacattacataaacactatagcaagaagctagggtttttgagcttgtaataaccccatcgtaatacatcaaagctattaagccaaatacgattgactcgtggactaggattcattaatacccaaaccacggaaaaatccccatctctttataaatttatttagtctctcaactcttattttaatcagttttcgaaaatctcattaaacactttttcataggacgcctttcgtgttttgttacttgttcaacaaaattttcatcacaatcatcattgtccaccataggccatttccctttgcctcttttcaccaacaactccacacccattactagaggtttagaacttttaacaatagttttcttaagagtgagttttttcacagtaggagaaggagaagatgaataacacgtgatagccattatgtataaatttattgaagggaaaaaatatgaaaagaaattgtggagttgagatgatggagaagaaatcatcaaataatggagcttgaattgcagttggagatcgtggcagaagtttttaggagagtgaattgattttgatcatggtgatttaattcaaaatgaaagctgaatatgaaaataaaaataaaaagaagaagaagtgtagaaaagaaaggaaaaataattgagtgtgatattaaataataacatcggcatttgcctgcttgatgtgtgaccaaactgtaaaatttttatattattgtcgccattttttttttcatgtttaacaattacaattgataagaaggttcctctccaaatattaaaaaaaaaggctaaataagatttttgtcctctaaattttgacatgtaccaaatcatgccccctgaacttttaaggtcgttaaaaatgcctcctgaactaatgagattgttg

SEQ ID NO: 308914 - DNA, 2485 bp, Cannabis indica
agatttttatttaggtttacattaaattttattggttttattataatttggattgcttaagatagttctttactgtgttagctcatattgttggtgattaatagttaacgagcttggcatctgtgtgtaaagtctagataaaacaaaagtgtgggctttcctagttaactgaagcctttgatgaactatgtagctaagtccctaactttataaatatatattatctcatcacaattgtatacttttgataatcagataaataaattgtttctgacttaattagagatgggaaagaagacttagatgatagtattacattatcaaattacggtaattactatggatcaatcaagtacgcatgtacacttaattattatatattattatcgtgttttatattatataccgatcttggatttatttttaatttatctaacatggaaaacttctttgtatacctaattgtagcccatctctaatagccacaagttcaacaagaaggggagtcatccattctcttttcttggcggccgcataataaacatttccagtagagtcttgagcaacagcactaattaatgctaaatcatcttattagattttgcattccagcattataattgatagtgcaggtggctggcattttgtatttttaacttttgggacattgtttttgttgttgtggttttcaacttttttttatactttatgacacctctccagtatatctccatgccttggactatactcaccatgggttactccatttctaacatttccgaaccttccatgacaccaataaaataaaaataaaaatatttgtgttgaccatattttttaaagttcttgtaaaataatcattggatctgctgtaaagactattgctttatctgatcccaaagaccattttgttttcataccaaactgttggctttacatccccaaagtgcatatatattacgatcttcatcttgacctgtggcacatcttttaaacgctgccaatattgtgatcttcttatgcacaagggttgcatttgttggaagcaaagaatggcaaaccttccaaacaaagtgtttaacctttggtgggatttttatcttccataacttcttccaccaattgctccatttcggccatatcaaattacatttcctcttctttcatttcacctgccacccaataaccactattgactaaatactctctatttttgatgtaatgccacaatagtttatcttttaattaataacttccaaaccaccactaggaagattaataatcaacaccacatcgtctttattgaatagagttcgaataaattaatcctcatctcaggagccatcccctatcttcatatcaatgataaatatgtgttcaaggagaaaaagtttatcgtagatgcgaaatctctttggtcttggcagttaaagatcttccaacactcgaacattattactgtttccaatcctcctacctgtactctctcataattatcttctttctccaaaccaagctgctccacacaaatgaggcctttgatccacactttttccccaacaacatcaccatttggaaagtagcttgccttgagacctttactacacaatgagttgagaaactttatgcatcgatcgccttatgtgctttgttaacaacgcttggttttgcaatctcaaatctcggaaccctagtcctcgtttttttttttggtttactacatgcatcgccatagtgtatgctggtatatatatagcttgaagaatggccttaatgagaactttaatttttgcctccaaccaagaacatcgaagtctttcaccctttcactttatgccacaccctcttcttgatcacctgaaatagctctttcttcgttctacctacaaaagattgaagtcttatagatacttcccataattgtcaacagcttaaactcccaagagatcagatgttaatttgcttcgcataggccctcttacttttttccctaaaacacatttcgatcagactttggttaaaaacggcctcaccaccaaatctggtacaccatgctgccagagcagccatgatcatcacctactagtcttggcaatatccctcacaataatatgtgatcaatatatatcaactccataattaaccaaaatttccaccaaacagtgaaacctcaacgtgacatgtgacattcaaaatacacatcacatggtctgggttttctcttccactcagcagatacattagttatattaaatctaagcaatctatatacatctttcatgagtaatctatcaacaaccgaaagctatagtataaatctattatcatgtattctatgttcgtacgtattcaaaacaaatgtaaagaggagctaatatctttttaagatcttgtatagtcttacaaaacagcctctcaaaaaaaaaggtcgtacttttttttattattattaaatcaaacaattattatatgtatagagatataa

SEQ ID NO: 308915 - DNA, 1634 bp, Cannabis indica
taaggtgaatagcgacataagtacgtaaagttttgagttttttagtggtataaatccaatgtttatttttagcggcaaaaagaaccaaaggttataaaactgtaaattttttctaatttcgtcagtacagactctgttattgtcttaaatagggcacgcataagaaccaaattctagattgtgtctagatagaaacgtagtattagtgacttccaattgttcttttaataaattcgaaacggagtttgtacagacgaaattagagaaaaattacagttttacaaacattaagtacttatgccgctaaaaataaacattgagtttatgccgcttataatcttaaaactttgagttcttatgccgctatttactctaattcttattcatataaacagtgtaatggtgattatgttgtaaagacattactttcaaaaccgaaacaaacaatgaaattgtaatgttgattccattacgattaaattgaaccaaacatggtcttattattatttggttaaaccatcaaatcagtataatagacctaaacatgtcacaacatacttaggtgcttacacgtggtcactggtctatatctaaagacataatatgtgtctgttgtatcaggtgaactagatgccatttcccaatgtgtcatcatctcattaggtggtggacacacacacatggttcttgagtagaatgtcggtccttaaactaatctagctatgtttgatttgatgatttcatcttgattttgagtacaagtaaagtgtttatgtctaactatgtttctttctttctttcttttttaatctacttgcaaggttttttatggtgaacaattcaatgttgtttgttttgagttttgtcttgataatctatgacactaatgtatggtttctttttctcttttgggaaatagacactgatggatttgtaattccaagcttgggaattggagactcaaatcaaagcaatcttgatgatactccaaatgtagaagcctcaaaaccaccttctcctaaggttagctagccacaagtgcttttctttctctttttgcttatcttaatactaaagctgttaatatcaaaagggttactaaaacatgttaatgcaaatcagtttaacttataatatttcggaaactcgggcctcgaataattaataggaccaaatcacatgtctgattatttgaactattatttgcttgttaataatagaaattgatgaatcttaaaacaagtttttaatatcagttaacttgtaatatttcgggaaacttgaacctcgaataatttataggatcaaatcacatgtctgactatttgagcaattatttgcttgttaataatcgacaatcgatgaatcttaaaacaagttctcaatattagtttattttacaatatttcgagaaacttgaacctcgaataatttataaactcaaatcacatgcctgaccatttgagctatcatttgcttgtgataaatcttaaaacaagttctcaatatcagtttattttacagtattttgggaaacttgaagctcgaataatttataagatcaaatcacatgtttgactatttgagctattatttgcttgttaataatagaaatcgatgaatcttaaaacaag

SEQ ID NO: 308916 - DNA, 1508 bp, Cannabis indica
tgtatgcgattcaataattagttagaccaatagtaatattataaaatagtcctaaataccactagttagtgtcccttcccatttctctattaattcattagtttaagttgagtacccgaataaagaaatcaactatgttagtttactttattattatatattaataatattattattgttcaatgatgttgccactacccagtattaactctatattaaataaaatgtacactgcctgaacaaaaaaaaatatttatatattccacttcttcactgtcaccgttttgtttaactctctttattatatagaatttgagttaaaatatatatgtgaaaactgatcatcaattaagataaattaatttattcataaaaatatggtctttgggttttgtcaaatatttgaaaaactcgattggatttttcttagtttacaagaataaaaagatgcctaataataattaccttcttaattttaaaaaagaaggggtttcaaaaaaaaaaaaaaaaaaagaaaaagaaaaaaagaaacaatcatgtaagtccaacagtacccatgtatttaacatattaaaaaaattgatttttgtatatgtatatatagtatgtataagtaggcatgtctattggctattcagtgaaccataccttagttttgttttcttattgttgaattattggcctagaatttatgtatacacatgatcatgacactacaataaaagtatcatgatcatataaatttattcactttagaccttgctttccaaacatccaaaactttatgatagctcattagcatgatttgacaactttaattttctttttctctttttagggataaataatatatatatttcgacttttgttttacctgctttaagtgaatggatggtttcattggaatgattttgtctagcatacaatgagtataatgatgatgaggaattctgggcaatttcacagaaccactagtcaattaaagcaatttcacatctaattaactattaatagtggtagggcctagtcggttgattgataatttgtatggtttgggtgttaaatccatgttaccaaatctcaacctcatcaaggtaattaatatatatagttatttaattattttatactcgttgaaaaaaaaatacaataaagagatatatgtctgtatattatactaattataactcatatatcataagtaatattctaatgatcatgtactaattatatatgattacaatgttgtctaattttcctaaaaagttatctctatttgttgtgattggtcactaaagtcaagtaaacaaatagcaattggctcaatcccataactactaactgttttacctaactgtcagttataacaggattgggctctaacccaacacaggctattatagccatctgctagtgctatttgggaacagaattgagagagagatcttaagggtattgtgagtagggctgtacatcggtcggtttgggcggtttatcctatatatttt

SEQ ID NO: 308917 - DNA, 953 bp, Cannabis indica
gtttttttttttttaatagtaatataggttataattatttaggatcaattataaattttcagaaaatttcgaataatttacaatatcataagatttacatattttgttacacataactatttttttttatacttataggaattaactgtttaaatctaatttttgatactgtaaattattcaaatttttttaaaaacttacaaataatcttaaataactacaacttacgtgatcattaaaaaaattaaactaaaataatttcttaaatgccaaatcagataaaaatctaccataatgatccttttggaggtttactataaaaatttccttaattttattttatttttttaattacccatgtatacattgttgcacaaaacatattaatgatatacttaacctattttattaccctaatccaacactacctactaggagtacatatgaaagaaagaatggtgagatcgattggagtgtggaacattttcacgatgatgaggatgggactcctgtgtataaggagcgaggtattgtaatgtgactggagaattcgtcatttcaatcaacaaacacaactacttttggagaccatcaccgccaccatggaaaaaaaaatacctgtatatattacattacattaagccactaggagggccaatttggtacaattaattttgctataagaaaaagcagctatataattgtatttgggaaagaaaaatgatgagtgtttcataagttataaattttaaagcatcgtaatttagaaaaattgtgtagtatttggtaacctatatattattaaaatacagttgttaaattacaaaaataagagatatcatgtttatttacttattttttttaaatgagcattcattgattaataatatggctaattagtaatttttccccccgaactttgacatgtactaaatcatgccccctgaactttt

SEQ ID NO: 308918 - DNA, 1466 bp, Cannabis indica
ttttttcttactgtttttttaacaccccaatagcttcacatttagatataataggatttaggcacatttataattaattgcttaaatgactaatttatgatggtgtggaacagatatgagtttgaaaaagtccatcatgataattaaatcaatggctcgtcatctcactctctatctctctcaactctagtttcttttttaaaatgtagtggacccatcaatcactgtgctgaaatataatcaaatatcacatccaaagctatcttcttctacattgtacataaagagttacccatatccataacatgataaactaatacacaaaactcttcaagtaattaatcgagcaactttattttattttacttaatttataaataataaaaaatacattcaaattggaatgggtgcccataaaaatataagagttggaaggttttagaatccaatttattcattgatagtaaagcaggtgttgtctacatatataaatatagattatatatgtgggatttcaatgtcaccttcagaaagaaaccctgtttgttttttttaataataatttattctgaaattttttgaatggcaatatttggggtatctatcagaaactgggccactgcattatgggtggcttcctcaatagataaagctaaggaaaaaataaaaaaagtgtactgtgtattacaagtattatttaagaaatgtctttctctacactagtgtaattcaatcatttttatttaattattcgccctctttttttcttttctctgaatatgtcactcgaagcttatgtagagctgcagcaagacttgatatttgaacttgacaaacaaattccctttcaaagaaaaaaaaaactgagaaacagaaaatatatacagatgttgtaaacatgcatattcatatgacatgcaatattggattaaatgataattatatcgtaagaagaagaaaaagtataacgttaataaaatatatatatatatggttttatacttattatacaattattattattattattattattattattattattattattattattatttggaaattttatatattattctcaaaatttggcattaataatgtgacaagaatatgaataggtggccaaaatttagtaaatatagttttagtgaaaaagaagagaagaacagagtgaaagagaattgaattgactcaagagagagattacaattggagctgcatttatactagagttcagtaagagcagtaatcttaaactagtaacaaactaacagctctaactgtaattttgatacaccaaacttttgttacaactaacaatacatgacactcttaatactcccggttgagaatcatggggttccatctcaaaactaactggcaatgagtggagtagcccatgttcttatatatggttattttttgctcatcaatcttgaaccgtatcagaatggacatgg

SEQ ID NO: 308919 - DNA, 1617 bp, Cannabis indica
agaaaatataaacagttttgttaaaacacttttagatcggattattaaattttatattgataaaacatcagttcatggtcctatttatactattttagaaaatacaaattcattatgtcatttaataaaataaaagattcaattagtaaattttataaaatacagaatccaaaatagtacttacccataaattttttacttaaaaaaaattatagaaagggaaccttgtctcttgtgtgtgtttacctaggaatcttgatcatgtgtatagatttttgataaaattttgtgtggaattattataaattagaaaaatacttataaaagtttctactcgaagtagataagggcaagtagagagtagtgttgtaagtgtttgcctaaattcaaataaaaacaaagtaaaaacagttgatatcctttgtttttagataaaatgataaaaagtgtccctctgatgtaaattgtgaggtgggttttgtcatttacttactcaaatcaaagcccatcacacttggatcgaattggcaagtaacaaaactgaaaaataataaatgagaaattattttttagtcaatttttgtaattgaaattatacactgaaatattttattattttctattatggtgttcattttaattataatattatttttataagtttttaaatttttttaaataacttatactattaaaattagagttcttgttattttaatttaacaagcatatttaaaaaagtttaaatttatatttagtatgtaaatttttcaaaaaatttaaaaaatatataaaaataatattataattataataaatattactaaaaaaattaaaaaaatattcaaacatgtatttttgaatacgaaatttaattagaaattctcatatgataatgataggaaagtaaggtaaggtagtatgttaatgtcattagccaactggaaaatttggagctaagtccaatccaaattccaatgacagccaatcttttatacataaatactaaataggtgggtttgtaatttttgtggaccaaacccaaccaagcttagaaccaaccaagagccatggacccattggacccaagctccaaactcacccaaccccaactcactagatgtggatgtggtcacccttcaaaccctagtcccttttaacctcttttgtactttttcttatatacttaatgacactcaccccaccattacaaacaatcaaacaaatattattttttaacatcattacacgttacaatcatataatatgtatattatagtacttatcataaattctaaattcacaatactaatcattgaattgaacattgttgttcataagtaaaattatttaaagtgactatgaatttcttattttatctatattttattttgatcttcaaaaattaatttgtgatgatttcacaaaaaaaaattcatcacaaccgacactttatgttggcatttttataataattatgtaagaaaaacttactgtttcatcttccaatagcaatgtggcaacaatttttagttaaaagaagaagaaaagtgagcataaaataatgggtaaatactattttggattttttattttgcaaaagttacagattggacc

SEQ ID NO: 308920 - DNA, 1505 bp, Cannabis indica
tatgtgatgagcttttactcattgttgagctgtttaccattactgaaagtaacattaattaatggttggttcttggttgtcactttacctatttttgtttacaaaaattgactcaacttctttattgatggttgaaattagaactgcattaatgtataccaacctacatatatatatacaccatgttaatcagagcttttaatgaaaaatagtattaagctaaaccctactatgaattttcattaatggcttcacttttctatttcttccaattctattgtaccaaaataattttgacccatcaccctttctattccaactaaaagagtactaattacaatctctaaatcaatttttatgttcgaaatgacatgctgaaatatatttttttcataacagtatttgttatagtacaatattatcactgtaaatttttaaaaattttcaaatattatagtgccgaaaaatagagtttctgatatttcaatttactatgcgtgtttagaatgtttcaaacctatttttagcattataaattatttgaatttttttaataatttataggaataatactgtaactataatgaacaccgtcataaaaaaattgaaaaaaatatattccaatatgtattttctaacacgaaaagtaactataaagttgtaatagcaaattacagtaaaactcctccaacaaaaaatcaaaatgatatgtatgtctctcatatttatttttactacaaaaaatcatgataattcagcatttaatatctatatatatctatatatttatacattaggatatatgtgacataaaaatctcattattgccaactaatttttttcttcttttttacctattgtcaataatagactctattagcacaaaaacaatgataatacccaaatggtgaatttgcatatgcagtattggaattaatatcttaagctatttttttctcaacaaaacagaataagcaatattattatattgcaacattttttccatatatataaaattacatgactatagtccttaaacaggacattgtggtggtttactctcactattaattttaggtctttattaacaactccacaaaaaaggaagcctaccttttggttctttttctctatagatttctcaatctaaaactaaactaattggacttctataatagttttattttaggcattttgtgtgtgatttggagttattataattgactcaacatcacaaagtcaagatttaaaatgacctatgatctcctctcttcttatcttaaatcttatacgattatttaatgctgattttattcatgtaaaaacttacatattttaagacaactttttatatactaagagtgttccgtattattttttgctttttattttcaaaattgtatttttagaaataaaacaaaaactaattttcataattttcaaaacacaagacgcgtttggttaatattttctgaaataatttttggattttattattattatta

SEQ ID NO: 308921 - DNA, 1196 bp, Cannabis indica
taataataataaaaaaaatgaagttctttaatttactatagtaaaggaggtggatgagtcgaggcctagctagagtgggttttaggcgaacgttgttgttgttttttttgatgtaaggttaaagagtagattgaatgaaagagaatgaaacaaagaattgaaggtggaataagatttggtttggtttggtggggtttttggtatttccaacatgggtggcttttgatttctgccacgttctatcaaacacaggactttcaattttggtctctgcatgcatggtagctttttggcaattattgctgtcatcattactccactttactcttttttttatatataatatttattagttggtatatatctttatgtacattaattaattaatatattagcctacactaacattactcctcacaaacttgtaaaaagaatagccagcagccaagccatattgcagtttggtttggcttgcccacgtggcaaatcacgtgattgttttgtgagaggaaacgacaatttgttcggccaaaccaaataggtggagtaagtaatcataataaaatgatggccattcatcattgtgtatttttctatattttttttttttgtttatgctggaaattaacatatatatttttttattgtcaaacaaatacatcaataaacactttttcttttaaaattacataaacactttttttttttgaaaaaaaaataaaaagtaaacagtttttcttttaaaattacataaataaacacttttaagtaaagaaataaagataaaaatatatgtttttttttttaaaaggaaatttgcaaccttttattaatcattttgtgtatttaattttctggtattccacatttttagattttatgtatggttcaaataaaattacgcattaatatgcatttatagattcatttaaatacccgtagatccgtttattaaaaaattaacggtagaggcgtaggcatacatattaccctaacttttgtctaaaaaattgtaaaaaaaatagaatttgttatgtaatattataatttagagaaagaaaatagagaagagatgagaatttttttagtgttttattctaataggtgatctcctatttatacacatccaagagtcaaatatttagaaactaagaaaaaaagaaaactaaaaaaaaagggaaatagttaattacatt

SEQ ID NO: 308922 - DNA, 1988 bp, Cannabis indica
taaaccaaaaaaaaaaaaaagtattaaaaatcatttgcttcaaaaaacaagtcttttttctttctgctcaaacctcctctcccgggaggaaggaatggagatagaaaagagaccaacaaaaaaacacaaacactattctgaaaatctttttctatcttcttcatcgccatcattatcatcttcttcttcattttcattattactattaccatcatcgttaccattttggatggctttcctcctggtcctaatcctcctaccctttaatgtcatgatccctgcagtctcagctgcggcgcccgccgctgccttcatcccacaagacaattttcttatcgattgtggggcaaccacagcaataacttcaccagatggaagacttttcaagacagaaccacaagctgctcagttcatacaagcggcggatgacttcaaaatctctgtccctgccgctgatgtcccttctccaatctatctaacggccaggatcttcatccaagaagcctcttactcattccacttgacccaaccaggatggcattgggttcgaatccatctattcccaatgaacaacaccatttttgacctccaaaaagcaactttcaccgttaccaccgacaaatatgtccttctccatagctttaatgtcaacaatacaaatcaagcttttgttaaggagtatttggtcaatgctacagacccgcgtttcacaatcaaattctctccacaaaaaaattcagcagcttttgtcaacgcaattgaggttgtttcggccccagatgacatcataaacgatgttgcatcgaaccttttaccggttggaaactatcccggattatcaaactttgctttccaaccggtttaccgactcaatgtcgggggcccgctgataacatcttcaaatgacactcttggtcgaacttgggcgaaagatgatgtttatttaaaatccccaaatttagccaaaaatgtcgtagtttcagcttctatcgttaaatacccacaaggaggtgctttaacaccgttaatagctccccaaatggtctacgcatccgcagttgaaatggctgacgcaggcgttaacaacccaaaattcaacgtgacatggaattttaacgttgatggagctttcacttaccttctccgtctacacttttgtgatatcgttagtaaagcgttaaataatctttatttcaacgtttatattaacggtcaaatagctatatctgacttggacttgtcccatacattgggggctttagctgtcccatacttcaaggacattgtggtaaattcatcttttgtatctaacggattactaacggttcaaattggtccatcaaatttagggtcgggtgaccttaatgcaatattaaatggtttggaggttatgaaaatgagtaacacggttgagagtttggatggagaatttggggtggatggacgtcaagagacgtcgggttcaaggcgggggacggtggcggcagtcgggttcgcgatgatgttcggagcttttgtagggttaggggcaatggtgataaagtggcataaaaggcctcaagattggcaaaagaggaatagtttctcttcttggcttcttccagtacatgctggtgacactagttttatgtctagtaaaaattcaggttctcataagacagcaaatttctactcttccactcttggccttggaaggtatttattattctttaattatattaattttttaaattaaaaactagagcaattgtttttaaagctactaaattagattatataatcgaataattttttttttctaataattcaaattcaataatataagaagaaaaaaacaaaatatatattaatatattaatgggatgttgtcgatattctcaaaaattatattaatgaatcagcttttattctatgagagcaaaccaattttatgaataattaataaataagtgatatacagtagaacctctatttaagaatactctatt

SEQ ID NO: 308923 - DNA, 2342 bp, Cannabis indica
atgaaaagatgttacatagcttcttagttcaaaagataaagcaattggttaaaaaagggaaatgaccataatgcctacttctatgcttcatcaagaaagatgggaggaaaatagaatcaaaagctacatgaatgatcaagggcagttggtagaggactacactgaagtggtgaagcactttgttaatcatttcagagattacatgggaagtgctatccttgatgtttgcagttaccactttgaaaaactagcttcgagttcatctctgaatctcgaacaacaacttcaacttataaaaccatgaactaagaaggagataaagaagagtctattcagtataccaagcattaagagcccaggacctgatggctatggttctgagttttataaaataatgtggccagagtttggagatgaattctgtttggccataaatagtttcttcaacacaggagctattcctaattaatttgatgagacaactatctctttgattcccaagacagataacccaacaaaggtgattgactacagactaacggcctgctgcactacgatttataagtgcatttcaaagctaatatgcacaagacttgccatggtccttcctacattaattgatcaaaatcaaggagccttagtgcaacacagaatgatagctcacaagtctttgttttgtggatgatctaatccttttctgtaaaggatcaaaagctgctgtcaggcacctaaaaaatgccttggaagattttagtaaggtgacaggtttgaccattaaccctgctaaatctcagattttttatgggggagtaggaatcaaaaaaaaagaggatattggtcatgaaataaagctcgaggaaggacatttccctcttaaatatttgtggggtgccaatgagacctactgaatggaaaatggaagattgtggagtcattattgacaagataaaaagaaggattcatacttgggatacttggcacttatcctacgctggtagaatgcaactgattcagtctattttgttggggttgaggaactattggatgtatatttttattctccctcaaagcacagtcacagaaattgagaagctttgtagacaatttttgtggggtcaaagtggcaacagatgcaaggctcacctagcttcttgggagactttttgtaaacccaagaatttaggaggtcttggctttaaggaaggggagtaaatggaaccgagctatcctagctaagtacctttgggccatcatggaaaagcatgatgttctttgggtcaagtggataaacttggtttacttgaaaggtgctgatatatgggattacaatttgcctcaggagacaggttggtcttggaaaaagatctgtcatttaaggcagagtttcagcaaacaacaagttttaaatgcaggaaaaaagggagattcaaagcttcaaacttgtataacaacttgttgtccaataagcagattgactactctcatgctatttggtgtaagttaacactcaactgttactagaaacatgttatttcatctttgtattactgccgaggacaataatttcccagtgtgtggaatggtcttggagatccatcaatacttgttttttgattgcaatttctctaagaaggtgattgaagtgatttttgagtggactagttttgaagcttggtatctaaactttgataatttgttactaatgctatccacaaaagcaggttgcactaaagatcatattacttatgccttgcttgccgccactatttatgatgtgtagtcttaaaaggtacaagtgtatttttgagaaagccatttactcagttaatcatgttgtaaaagagattcaaagagtgataaaaaatagattatatagtctaactcataggaaattgacaaattgtaattataaatttttgagcaaaattctcatgtagtttttggtgggttgttcctgctctagtgtaattgtgctcttgttgattaatgaaatttcatttctttgataaaaaagggacaagataaaaaccaagggataaatacttactcgagttgcctccttcaaaagtccacccatctatagctccaaagacatctcattccctccgaacaactgatcatttatctcagggagtaattaatcctacaaatgttgaagcatcactttgcctttttggtctcagggtttagcacaataggagtatttgagggcctagggagaccaaacccatccaagcttcctccttttgcacccttagacttagagatcttcttggttagtggtgttggaaatattttaccaggatctagatttactaccaagtatgttttattaacatcct

SEQ ID NO: 308924 - DNA, 829 bp, Cannabis indica
ggcataaaacccaacacatggatcataggagcattttagcctttgattggggacaaacttattgtacctcatgaagtggttgcacccacgcataagctttctcactagatcttctctctttttgttgttattgcttattatgaccatacgtcttgttacaaattttacactttactcacattgttgctttgttgtgcagatacaccataattaaagatgttgaagtcgtggaacaaccaaatcctggttgctatggacgaggttacgaagtcccatgaaaagggaaagaagaagaccatgaccagggcttccaagactcgtaaacaacctcccccatcaacttcctcgtcatcagacgtccaagagtttctcctcccacccaaactgggcgcaccactactggccatacgacatcgagcagtggaggaaagagatctgataactcctagagatcctgtgaagttcttactaccctgagagaacaatcttctcaagttgttccccctacatgagaatcaatcccggatatagtaccaagtgcagggggttttgaggacagtttggatggacccgtctttcctctgaagggggcttcgtcccagtcaaagagtaagggatcatgatcttcttttgaccttgttgcgtagaagattaaaactttggtctcagagcttggggtaactgatgtaccattgaccaatccatcattgccacaaccaccacaaaagcaccagtcgcgacaacaacagaaaaaataacaacaacaatattaacaactgttggaattattttacctcagagccatggtaattgatttacttgcaagaaa

SEQ ID NO: 308925 - DNA, 1706 bp, Cannabis indica
tttataaatttaataaattaaatacatataattgttgaagaaatatatatatatatatatattatattgtattttacttctaattttgttttgcttacattaatatttggtagtacttttgagccactggtttaattggtttgcacaagtcattcagattcctgacttcactttcatttattttagctgtcaaccccattctccgaaggactggtaaatgtgcagcctcaggaccctggaaggtactgatttaatattggtttaatttatttttgccctttttattttgttccaaattttaacttggctattcaactgagctactgttttccaaattatacagaaatgataataaaagtcgttcaattgatactgctacatccccattaactggtgagaaaactgatggtacagttgctttggttaaagtggatcctgagagaaaaaccaccccagcaggagaatatcttactgctgctttgaatgagtttgatcctgatcaatatgacagccttgctgctatttcagatggtgccaataagttgttaatgctggtatgttttgtcaggatcattaacttttgatcgggctacctaggtttttaatgtgttgattttgcatgcattccagtctctcctgggtactcagcagttgctatagcttatgtatttaaaaaatgttaagagttaagctcagagcacaatttttttatagctagacgcctagtctaatcctatatatttggggaacaagaattttttgcaattgctatgtaggaactcaagagggactccagtattaaatcttatttgaatacaccataggcctgactagaagcaaatttcacaaaaagaaatgcatttctataaatgtggaaacttagaagggtgttcccgcaatgaattttatgtgaaaaggtttcatgaaattgttaaattggtttcattgtgatgattaacgaagagctgtcaagcttgaaggggtgatcaatgatatggatcgggtaaagctggaatgagtctattgagtggttccattttatcattttgactttgatgatgatgttgttggtttataagcttttttcttgaaaattttacgacaaaatttacaaaaataaatcaacacggtaaaaaacttcattttctcgtttgaactttttaatttacaaaaaatacctcgtacagtaaaaatattaacctgtttttttttggttattttatagtttttttatagttgtattatagttgttatgaggttaattttctggttgttttatagtttatatataattgtatttattatttttcatgagattgatttcttgtttatttttactttttgctaagcaaagttgtatgtttgtaattttaaaatttacaagtgtatttttgtaattaaaaattttatgccgtaaaattgtaaataaaacttaaaaggagagtatttttgaaaattcctttttttttctttttcattagttgggtctctagaaaaaggaaaaccttacatgagagttattagtgctattatttatgtggtccacctataattttgctaattaagctgataatatttgggaacattatctttttcatttgtaaaatctgaatatctagagtggttattgtttttttttttaaaaaaaaaaaattggtttcatactgtatattgacgaagaactgttggatttaatgatatgaatt

SEQ ID NO: 308926 - DNA, 1083 bp, Cannabis indica
acaattgatattgaacatcaaccactaagcttggaaagatgaaaggctacatgtcaaatgatttataacgttagccaatagcagcgagtcagtttcgacataatctaaatttaagtgtaaagaactagcccaaataaggctatggaaaagagctttaacttccctttcttgaggccataagctacccattaaaggttgtgaaagagcagccaaaacctgtctaaaagagtcccgaactaacgcaccaactcccattttgtttgtagaagtgtcaatagctatgtcaacattgagcttcagtttatatgggggaggaggctgccacggttgggaaagggcagcaccaattgcaacagaaattgatgatataggtgttgaattatgctactgaaaattgcagagatgagcacactactagaaaaagtaccattttcgtcagtttataagtgtcatttaaggaatttatgtcagtttaaaaaactgacgtatatgccatagtcgcaaatagttttttattagtatcggtttttaaatgacgcaaaaaataattatctttatttaaaaactgacacaaaatatacactcttattttttatcttctgcatcagtttggaaattacgcaaaattatttgtgccatttcaaaattgtcactaaaaatttataccgtcggttttaaaatgacacataaattgctgaaatactttttctttcacctattgcgtcggttataaaataaagcataaatgtaggtaaggaaaaattataaattttcatgctattttcctcacctacattatcaataaaatattaatccactagtgcctaacaacctcttcaattcttatcacataacaattaacaaactagagtactaatgtctcttattatggccctcccatggccaaaataaactagcacactaagctataaggcacgtggtataagagtgagtggacatatttccaagctttcctaattgtgttagccaaccattattccagaattaactatatatatataggtgcactcttaataagtattacttataaatgggtaaaattataaaattttaagtttttat

SEQ ID NO: 308927 - DNA, 2855 bp, Cannabis indica
taaaaaatataataataagaaatatttttttagtgtaatttttggtgttatggttagagtaaaaatatttttgacgctaaatttagtgatagtgcaacactaaatttagtgtgtctttggagatgctcttagtatttttttcaatgtcattctgttataagtgtaattaaatatgggttctcatgtaatttgagaaaataatttttaggaagtatcgctaactaatcgtgaaatactacctattaaaagtactcggtactactagtatctaataataatattgataagattaatatatactaatgaatgttcactcatatccataccctcttgtacgtatatagtcataaatatatgtcgcaaaaacttttgggtggtccttctttcggcaagttgagaagcttgagaacccaacatgatcgagttggcttcatcataagacaatttaagtaattacttaaagcatcacaaaatttaaagcatacattttaagggtactattactatacattggtttttttaataatatgtgtgatatatatcaaatttaataaatttaaacattaatatttattactaaatgtcaacattacactttaattaatttaaaaaattttgaactatcaattgataattaattattttttattgagaaattttatatataaatcacctctaaataatatcataatctttctttataactatatttattttattgtgatcatgttttatgactgttggttaattttttttcttgtgaaagattcttataaatgaattgaaattaattcataaagaaaacagattagtcatgaggtgataattattaataaaatatgtaaagagtaatgtaaaattagtattaaaataaaaattttaaaaataagaatataattaattaatgtatcttttaactgaaaacaaaacttaataaatcttgatattattttattttgttgaaatgtttaatttaattttcatccaaggtcatggttcaagctttgcctaaagctttgctgaagcttgagacggccctgaacatgatgcttcatcaatgacacctcatttatttatggatttgtctctagttgctgagaaagctttggcctggttatggcccattgcatttctcatattttcaaattaacactactacaaaaattactatcaatctttaaaatacttttttttcgaggatcgtcaccaataaaattaagtgtattttaaaccgatgcatacaatggagaataggcatcagttttaaacactcgtttagtataggcaacggtgtattatagtcagggtcggcccgagctttgagcagcttgagtcattgcacaaggccctccatttttaaaggtccattttttataagaaaagtttttctttattattattataaatgcatgaaaatatttatatttaaaagtttagaaacatatcttttaaaaaaaaaataaataaaaaactagcaatggaggtcttaatgtacattaattttttttttttttacaaaaagcccaatttttaatcttttgtacaaggcctccaaaatttttggaccgaccctaattatttaaaattcctagtttattaatagggttacccaacgatttaaaatcaataatttctattttaagaatagaatcaaagaattaatttaacataaatgaatatttaatattcattgaatcttgacacaattaattcattgatattttatctatggtcagattataattaatcaaatatttgatttttcgatttaatttcttgaattaattgtcaaatattctgatatttaatgtggtagagactttgatggaagatctcacttatataaatatagggtctcggtccccaagcttactactcagtctgtgaaacacagtaaatccatctaaagagagtagagagagcttagaagcctgattatccacattaattggtttcctttgcagatcaaaacttgtgtgggattgaagctcaaagaattaatgactggaggtatttccatctttattcataatgcatatatgtttgattaaatccgcatttcatactataattatatatgcttcatcttcatatacataaatgtctaatagttagtatcagagcggattaaatatctctgccttgatttattttgagttttttttattcatatatatacgtacaggattcttcatttataatataaattatatatacatatttatattatataatctcgatgatatatatacagtcatactcaatttatttttatgtatacatatatatatattcatgtttatgtttatcttcatatataatatatatatatatatttatatatacgatatatatattccttttatatatgtttatatattttttaataaatctattatttcattaattgttattgtttagaatattttattctatctgtttcatatattttttcaataataaaatcatagtatatatgactttatatatatacatgaatttgtaagttttccatccgtgattaaaaaaaattcattttcatttttagtgtttattttgaatcatttatgcattatcatattcacatcatggtttataatgatttttttcatgaatatgatttgaataaatattaaaatttggaaattttcttaagaacacgttttttggacccgaaaactttttgtgaaatcaaagtataattttgcatattttcgatgcttgaaatcaatatggatctcttaatttattcatggagatcattttaaaattggtttcataaaattttggacgttggaaaataattttatggtcgggttttgggtcgggttgaacgtgttggaattattttacca

SEQ ID NO: 308928 - DNA, 983 bp, Cannabis indica
ataataataataataattgatataaaaaatgcatagatcccttaagagtatccaaagggtgtaatcaaggctttagtgagaaaaaaaaaacaagaatataaggcaactaatttaacaattttgattccatgcactaataaataatatatacgagtaacaaattaagttattattttcgaagaaaaatatatatttataataggacaagacctaccaaaagtgataggataataaaatagaagaaagaaactaagtgggaatgtcacaaagagatgatatagaataaaatagaaaagaaaatggaggttggagtacatggttttgcacgacttaacaataattgaaccattatagcacctaaaagtttccaaatttttttaatatataatataactattaattaatgtcctatatatattaatctctttcaacacaatgcgtccgacacaaacaaattaaaagtctatataagatatacttatatataagagaatagggatggtactatagaatgtagtctatatattgaattataattccttaaaaaatatatctagctaatagatcatatagataaatatattattttaagtatcatgcatggaagtggttatagaaatagactcatctatagtatactaacacttcctttatggaaattattaaaataaagaaatttaatatatagatgtgtgcagaagaatagtactagatatgaaaatgtattaagcctgtataaacccagatcgcttaataagtgttagatacatagcagtaacaacaacactagtgaaaaaaatgttgcctcaaaattataataaaagtatatatttatttaaagaaattaaatgttatcctaaaacttaattcttattcatattttagtttttccaatgattatcatattctggtatagctttatattctttttaagctattatatatatatatggaacacttcttaatgggtaatacacattgat

SEQ ID NO: 308929 - DNA, 1618 bp, Cannabis indica
ggcttcagtatggaagaattgatggatattccagcaggtaggaggaggaaatatcatgatgatgttactgttatggtgatcaaccttggatcaaaccaacgcactacaaaggcatcaacctgcatatgattttttatttttatatatatatatatatatatatatattattttttcccttttctgaatttagaatttgttagtttcaggttttgtacatgctgtaattttcaggtttagtacaatttccttttcttactttcattccagttttcgtttttatagttttcaaattgtatataaagaatgcaatgaacaattgcttttggtattttgatgactttatcataaacccatttattattattccataattcaatgatttatctccaaattatgctcttaattggtataccaaagattatgctactttttttcttactagattagtagttcaacatagctttggttgttaaaaggccttttctttttctttctttaattgataccatcccaacttggttctcataaattcagccttttggcttatcaccagcctcaaaagcatctgaaagcccactataattgtaacatgcttaaacttttttctgctccctagttgattcattattttcgagaatttttggtccacaagccaaatggtactatatgcctaattcaaatatatgattaggtggttcatctatctaataatcatatactgaccaaacattaggaaactaagataatgctaatgatattgttgcattatcataaaaagtgatattggaaagcttaaaaaaacaaatttagacattggaaggaagatttttggtttcattaataataatatcatggaaagaaaaatatgtgacttttgttataggcaccaagtcaagtggcccctagcttgaaattttgtgtgccaatatgagtggccttaatcaaagaccagcatggcaaaagatcactttgtattttatagattttagcaaaaatcacataattttgattatgaaggccccacaacaagtcacaaacaaacaatactcatttaagctatgttggtgtatcttaggttcaaacctaccaatcagacctttctctttagagtgatgatgtcctctgttaaatctccatccctactaatgtatacaaataagggaaatttgaatttgtatgcttcatgatgtttcataattcaaaaaaatactccaacttgtcacattacaaatttatattaatctttctcattgttctaaaaataccattttcatatttttttcttctcaaaactttctgttctctcttctgtctctctcaagtctcatccctcattactacaaaatctaccaaaagagcatgtgtcacaataagttaattttaaaaaaaatttaaaaaaaattgtcacattgctgtgtgaattttggatgtatatttcaagtgcacatatcactactttttgagttagtagagtgtttaataaagataaaagtgctcacccccttcctacttgggcatcaaaaaataatatttttcatattttgaacttttgagtaggttaaattttttttttttttttttttttttttttatttcttttttctctgatataccaa

SEQ ID NO: 308930 - DNA, 1683 bp, Cannabis indica
aaagattggtattggacagttgtgtgtgaccctcatctacatcacaacacaattattttttatagaaaaaataaaataaaataaaataaatacacaattctttagaaatgacttgctagcttataactttcagagttccaacttccaatcaaaaattggtattaatattaaaccttgaaaaagtgcatgatttttacatcaaaaataaaaaaatataataaagcctccatcataaattctaattcaaacttcacctaattataaggctttgagttagtatatgaatagtgctttaagtcacaatctcttagtgcaaaaaagaagttgatagggatatataaatatatattatttgtttatatatatatatatatataaatgaatggattagatatagttatataaataaacccactttttgtcaacaaataatgacaagtaaccatctccaaaactaaccccattcaatttgttcaaattaatataaagtaacaaaaaggaggaacatagctatggctagtactactatatatatcatcataattataatgcattatatcttaaatttacataatacaacaagaatttctgtttaatcactttcatattttttgttttaaaataaaataaaattgattttattaatgatcatgaattgaccctatatatttgacatttgaatatgtactcaccctagttagttgctggattattgtagtggatgcctttgtagaaaggaaaggaagaacaacttttggagaagtagctttcaattatttaaaattcatccaaaaataatagggtaacattaataccttctcatcactcctcattctcctaaactagatatatatattttatgggtatatatataaatatatatatttagtagtatcgatagatttaaaatttatacagtgtcgaaaatttttaatagtatgtttaaatattcttacaaaagtctagaatttctgattcgagagtgacaaaatgtgtggaagactattttaaaaatatatgtatgtagcttcttatgtgagtatccataacagtatacattatagttatagtaagtattttgcatttttttcgataaattttgaataatttatgacattaataataaaatttaaaatatttagttacaagtgtataaaataaaataggtatgcacgcaactaactatttgaatcgtatttttgatattttaaagtatttaaattttttttaaaaaataaatataatgcctactataattataatatactccaatatataatttttttcatatatggaaaaaaataagaaacacctctaaaataaaagcaaaattgattccctatctaaacttttttccaatatatcaaaataaaactagtgaagatgcttgtatgatgtatgtactattttgtcaacctccatttcttcaaaaaagaccattaattaatctcaatattatttgataagaaaagccttaaatacaaaagagagaaagtatacatatgtggtaccccatatggttatccaaaccatgcacatggcatagacaaagctaggtcgatagtcattatccaactctaatataccttcaaaatgataggtcatgtatctaatctcaaattatatatatgtatatggagaattgattggtctattcataatatacatatatatgagaatttt

SEQ ID NO: 308931 - DNA, 2087 bp, Cannabis indica
actgcatgtatgaaataatctgtttagattctgtttctatactgtaaattattctgattttattaaaacaaaaattaaagttataactattcaaatattaaaattatagtgggagcagcgacagagctacttattaagataaggggttgtagtcctcttaatttttttttttatttatacattttagtatatattaattatgtaaaaaaaattatatatcattttctaatttacctcccaaaagtatttttttacattttgccacctctccaaatttagtaatttagtgagagtgtatcggtacactcatttttgcaatttgcatcttagagacacaaagatctttgtcattggtaagaagacaaggtaaactttaataattgtttaatcctattactatctatctctatgttttgagccgtgggtagattggaaaaaaggcaactttgtataaaaatatgattttgaagaccaaatatgttttcttccaattataaaattgacattaacaaagattgatgcttttaatatgcaggaaaatgggcatcactcatttaattagggacatataattccaaacatgtttgactattgaagaaacaagtaaccagctttgaagtgggaaacaagcacaatgcatgtgattccaatcaatcaataattgaaatatttcgtgtgagccatgtgtacaacgggccctaagagaagctatattcataattgacaaaatatcataagttcataaccctcaaaaactaatcacttaacattgataatcatgatatatttcgatacaaaacaaattacttagtttgacttggccacttgtggtctctaatctttgttctcaatagtataatcgattaatctaaacaatcacagcaaatcttctttgctacccaacagaaagctatctttgacttgaccatatatgcatagatacaaatcaatttagaataacaaagatggcatgtgcctaataatttgaattagattttaccataaaaccaaattcaatgacattgtatatgttggaatgggattttgattttatctaccttgtcctgaagagggtttattaacaattattaatacatggaaatcatactccaaacttgcagcatccaaaccatggaataatgaaaaatccaagatatatactttgatcatttaactaagaaagagttaacagcaatgatgataataatcccatcaaaccaatccaaagttcatgtagaaattttaagacaaatttccaagacaacttagtattgttaaacccatataggcatattcaaggagcaattcatcatcaaaacaacgaatatgattactgtttgtcttcctaactaacatcaccatttcatttaacacctagaacacagaagcatattcaaaacaaccaacttcaagccccttgtaacgccttaactttcatcaactgccctcatttgtccatagctggaattgagtacaatagtagagtgagatcatcattgacccaaagggaaaaaatattaaaacttttcaaaattgtcacatagagaatagagagaaataacttactattgtagttaagaagcttctcgatgagatcaacatgagtcatgagcattcgtctgcaacagtaacgaaccaagcctaatgcatcaagagcatctctgcacaccaatgataaaaagtcaccaatggaacttctccaagtcttttaagaggcaatgttagataataggcagggcaaaactaggaataaattaacaagtccaacttcactgcacttgaaaaatgcaatatatgaaccttgaacatgtaactccacaaccgtaagctaggaaaccttaaaacttataaaatctttaacaactaacaagcccccaaaatccacaccttttcacacttcaggacacttggcattggaataagcttccataagtaaaattggtgattgataatgacatggttagattgaaagtaaccatagcaattaaagacctaaacaacggaccttataacaaactctgcacatgaaaacccatacagcaataagagaagattaagtgttgttgaatgttaggatcccagattga

SEQ ID NO: 308932 - DNA, 733 bp, Cannabis indica
tgagtttttccaaattaattgaacctctaacgaagagacttagttcactagggctttgttgctagatcgtcatctttttaactttataaatacacattgtctcatcaaaattgtgtatatacttttattgatctattaatctacttttgttttagagatctaaagaaaaatttagtaagttagtattgcactaacatttttattatttggtggattatttatataattagttacatgattagagatttaattacaaattgtgtgtaaatagtgtatgtattgtgtaacaataatcattatttataaatatattcactcattattattaattactttccacagatatctcatgagatcattcataaattgaaaatttttgagcttgttatttctcacttgaccaaaaatatctatttaattaaattatgaaaggagataagattaggtgcaaataattaattataattgtctcttaaaataaatatgcatagatataagcttgacaagactagacatgttgtctaattaactcttaattaagtattctttataatgctaaatatctttttgggttacaaaatgaattcaacattgaaaactattgaaacatgttagggaagagattttgatggttatattaaatatgtaatcacggtgattagatttatttagttgtttggatcattattataaacagttgtgagtaatttaaaaattaataaaaataataata

SEQ ID NO: 308933 - DNA, 1964 bp, Cannabis indica
ggacctctccaagcagtttatggcaaaggacccccaactccctttctatgctaggtagttagggtggctaactgcttggattctcttctctttatacagaaactatgcctaagggaccctgttgaaaagaggttgacccaaaaaaggaagcaatggagcagtgagatgctcccaagttggtcctgaatgatagtccatgggaatttgactagcacgtcattctgttcaagaactataacaatctaacgaagtacgagaccctacacacacttgaaagtgttccaagactgttctagaatagactctctatactcagggagaggcctagcaagtgcacgaaaggaggcttcaatgtctggagttgggctcacattgcagtggcggcacatttgccttgaggtgctattttgctgaattttgtgttgtagctagaatagaacctttccagcttattccacaagcataccgcttgctatcaaggtggtatgtcttctacgttaaacatggcaaatttgtgccgatgatggaggaaatcttgtatttctacaagatcaagtcccaactaatgagagggcacaaggagaaggtgggcttctacaggttggagcaatacaggaggagcattccttgccccaccagctacacaaagtacacccatgacttcaggtattattactttttcatctccagcttcccgttgaagagggttcctaccctcagtttggattttaatcttgcaagtaagtctcatcctcacctttggattttaaagttctatttttccttctgtttattacattctaatctcctaccttttgtattttctagactgtcttacctagtcacctctgactccagagttggaagagagggtgaatttttattaatccttctcacctatagagctgtaagtggaaatcggtctcaccacaaagaacctttgggaagtcggtcttatcgccccacatgaggatgtggatcaccttttggtgaaggatacagtccaggatgccctacggggggacctaaatgaagttagagaggccatcacagttatttttgttgaggaggctgataactctatgctatagagttattgttagtgcctttaaactgaaattatcatgaaaagagtaatgaaagtgtgtttatttacttaactttaactagtttttatcttcaatttctatttagtaagctagcttttaagtcttgtaaaattgttattttagttgtgtttatttaattaaatgttgcttttctgtgctgttgagaaagaaaaagaattaaattgttagggaaaagaaaaggatgcgacgacatgatgggcatataagctgaaatgggcttaattggtgaagcattgctgcaacgaatttagcattctgggaagtgacgtggaaaaaaatgttgcagaacaaatttaattcgtccacatcagcacatacgtatcagccactcaaaattacgccaactggctattttggaagaaggagaccaaacttagtgggcgaagattggaaaggattgagcttctatttttaaggtattacattgtaccctaatgagggagcaaagcaactaagtacaacaaccttcttctacacatgagatcagctgccatttttgaaggaaattaaatgcagaagaaaaaagtaccaaaaaggaagtgattaaagaggaaaccattagaaaagaagaaggaggacacaagccatactcgtttgaatttctttttccctttcttctatttttttctctttgatattgttgacctcgcttttatccaacgacagtgactcaaatttagtaagcgataagtagtttataacgatcgaaatataagaaagcaatataaagacacaggaattttatagagcttcagccccgagcagttcggtaatagcctaatcctcgttatttgtattaactcaagaacaaggagaaaggttccttttcttata

SEQ ID NO: 308934 - DNA, 1268 bp, Cannabis indica
gaaatgaaatagtagtaaataataacaaatatttttatatttatttatatatatgtatagaagcattagatggcattaccttccatgcaaagtaatacgttaaaattagatttacaataataaagagtaataatatatattagaagttagattaataataataatctgttagacattatgttagttataataataattatgttagaagttaatttagttataataataattatgttgaaagttaacaatatatatattctctatattataataataaatgttatgttagatgtttaaattaatataaaatatatttacagaataattgaaatatgtgtataaaagatagagtacttatatgagtataatgagatagaatgatcgtgctgataacatgttataaatttagacaactatgagtaataatacttgtactcttttctgctcttcactttgctgtcaattctttatcaaacttccatatatataggagaatacagacatttatatgtatataatcattatagtttactgttacaagttgaatactattcctatattattgtagttttatcatgtagagtatactacatatctatcctatataatcaatcataacaatttattatttaatattatacttaatttagctattattatttatatccaaggcgcaccactttatcttttatttagaaaaataagaaaaaaaagtggcaaaaaaaaagattaatttaatgttatttttggtattctattttccatttaggaattcaaagtttcagcgacaagacactagttctatagtaaattaaatatactcacattaaaattgaaacattataggtataaattctcattatagaaatgtcgagaaagcgattgttgatcttatgaaccaatcaacacatattacaagaaggtttacaaacttcacatcacaagaaattataaaagataaaaacttaaattgaggaaattagatggcttccattttaagcatacccttttagaggtcatgattaatctaaaacttcaattaatcgtggaaactttttagggttgttgagtttcataagctcttataataataaggtagcataagttttagataaagctccacgaaatgtcacatatacatcatcaacaacacaaaaagaacatttgcatgtcttggagaataaagtgaggaatgtgattcatgaagaaattggcgatgcaaatttttctataatagttgatgaagcacgagatgaatctaaaaagga

SEQ ID NO: 308935 - DNA, 1295 bp, Cannabis indica
catagataaatgtaacattatgttaactgttatagtatgttgtattatgagtactaaatgttgtttcttggaaaatgcctttctcaacaggttcttcaaacaacttttgatgctgtttgctgttcacttggcatcattgtccatgtttcgtttcttggcatcattctttcagactatggttgctacaatgacggctggtagtttcacaatattgtttgtgttactctttgcgggatttgttatcacacaacgtaagaatagtctccatctttattagtgttaagtaattgaagtataaccaaaaaaaaataaacttgaatgtgttgtttacagctgcaatgccgggttggttgaagtggggtttctgggtttcacccttgacatatggagaaataggcctatctgtaaatgaatttctttcaccacggtggcaaaaggtaatctttatcttttcctttaatattttcttcaggattgatttcctttaaataaatgatctaacttttgtgtttgcctttggctttcacttagatgtatttatctacaaatactacattgggagaagaagcacttaaaagtcgtggactgaactttgatggatatctttattggatatcacttggtgccttagttggattctttatacttttcaacgttggattcattttgtcattgagtttcttgaagtgtaagtttcattcctttttcataatatttcaacttacaataccaagtgacattacacatgttaatttgataaatgtacagctcctggctcgtcatctggtgcaatcatttcacaagaaaagctttcccaacttcaaagaagcaaaagctccaacaatggaacacatgagaaaagagattctaaagttcagacacctaaaaccaacattcacactgataaatgttagaacaactttcttacacctttagaagttattcaaataatttccatttgagcttcccagcttgttttgaaagtcaagtctttctactattgtgaaatctcttcagctctaagttgtgtatgtgttttttcccctttaatggttataggtaggatggtcttaccatttactccattgacagtagcgtttcaggatgtgcaatattatgttgacaccccactggtaatcatatgatgctttaagggtctagttaattcagttaaggagctattcacattacctaaactaatttccttacttctattttcgtcaggaaatgagggaacacggatttactgagaaaaaactccaacttctagctgatattacaggttcatttaggcc

SEQ ID NO: 308936 - DNA, 1509 bp, Cannabis indica
aagttttaagccattatctatgaatgaatgtgctatgagagtgagactttgagtttggcaaaacttaaactttcattacatcttcagcttgtttaattgatggtagagaaaattcccaatttttgcaatggtaggtagagaatgaaaatgtcatgctaattgtttctgtattcatttgggtcagaaattcaagtgttcatgctatataatgctctgtccttttaaatgttgacaccattattagcgattgctaattctttcgatgggtctgttatcaggtttctcttcgagcatgtattgtagtagtttcagtcatacttgtgctttaattgagactgtagcgactgcttcgagtcatagagagtcatttaaaggaagaaactttgcaaatttaaaggtttgcacatatggggacttggaaaacagattgacattgaagaggaaacaaatgggtttatgtggatttgttatgaaaatctccaaagaaggggaggaactggccaaggagaagaatatagttgtgaattcttcagaagaggttataagggttcttaagtctacaatggaccctgattctgctttttcatattttatggctgttgctggtttaccatatgttgttcacaccactgaaacttgtaattacatgcttcaagtcttggtgactcataagagggtggaggatatggctactgtttttgatttcatgcaaaagaaaaaggttaaccgaagtttgaatacttatctagctatttttaaaggtctttatataaggggtggaattcggcaagcaccaactgcacttgagaagatgagaaaggctggattcattttgaatgagtattcatataataagttgatctattttcttgttcagtcacagttttgtagggaggctttggatgtttacgacaaaatggtcatgaaagggatgaagccagccttgaggacttattcagcacttatgacagcatttggaaagcaacgggatactcagactgtaatgcgtttgttcgaagagattggacatttgggattgaggcctgataattatatatttaccatatgcataacagttcttggaagggctgggaaaattgatgaagcttatgatatattgaagagaatggacaaagaaggatgcgagccagatgttatcacttgtaccgttctcattgatgctctctgtaatgcaggtaaacttgatgatgcaaagttgttgcttctaaagatgaaagctagcaatagtcacaaacctaaccgtgtaacttacattacctttttggacaaattaagtgattgtggagacttggaaactttgaaagaaatttgggatgaaatgaaagctgatggttatgctcttgatgtagttatgttcaacattcttattggcgctttatgcaaagctggcaatgttgatgaagcatttgatactctagttgtcatgaaggagaaagggatctcgcctgatcatcatacttacaacaccttgattgggggactattaag

SEQ ID NO: 308937 - DNA, 871 bp, Cannabis indica
ttttttaaaacacaaatccaaaattatatttatattaatattaaaagaatatgagtacacacaatttgatatttaatttcctaatattttcccttaatttttgctcgatattcattaacttatttaataatacttgactacttgttcccatagatttgtgttaaatatttgttagtagttgcattaaggcttaagctatgtgatttcccattaggtctagatttctttattgggtaattgctcaaccactatatatattatatatttttatgtatatattactaattgaataaaattgcatgtatgtatgcatgaggccgtgtggactattccatatatattgtcttaatttctttattatgacatataatgaaaactacataacctataattggcttaaaaaactcagcaacgtgtggtccctcccctttgattaatttgtatttcactatttttattttaaaaaaaattattggacaaggtttgattttttattagaaacaatcaagagaaaattaattaacttctaattgaattgctttatatcatatgtaaaaagcaattattaaaatatacttccctcaaaaaaaaaagtaattaaaatatatatgagtgacgatttaccatataaattaaatttaaaagtattaagctatatataagaacatgtgttattccattcattaccaattggttttaagatagaaccccatgattcttaacatggtatcagagccatattcctagcgagctttcaatccacacctatccaaatggttagccagccgcacgagatccagatggtgtaaagacgcttgagatccgaacaaaaataagcgagcaaatggtgacttgtgataaggtgattcaa

SEQ ID NO: 308938 - DNA, 2535 bp, Cannabis indica
tttctttttgatttttgtgatctaaggaggaatacttgcactagcactttaaatatataaccccagttattatattcttgtgtgacctcaaccacttatatcataataatgcttaaaattggcgttcaaatagtctgtatgtgcggttgttcaacctcatgaacttaccatcactcacacttgcactttagattaagaaactcagttactacaaacaacgccaacatttcattaaattgtagaatactaactcaggtgtgtgaaattcttgactgccactgcaacccttggctttcatgtaccagggtaacaccttgctctaacatagcaaagtgtatgtgacatacatggctctcgtgtaccatgattttttattagtgcttatgtaatatgcacaactctcatatattagctcttattggcccatgagcgatcgaagtaatgtctttcttggtcacttgccatagcaaataccattaggctttcttgtttggagagaacttgtccacttattcagagattcgtgggtttgcagtgtttaactcaccaaagaaataattttatttacctcaagaccaattctacaagctttattcaacacttgagggcatcgtcaagtctatgagctacaattgattaataacaataatgtaccaacaagctttactctgcggttttattcattagatattaaattcaattacatcattgtgatcaaaagaaaaaaaaaaaaaaagaagagggaaaaatttgtttttcatcaaagcttagttgaagtgatcccactacactaatgccatgttcgactaatagtgtatgggccataacttagcgatggacctccttaagatgtcattgtcccatcttgttggtttaggaggtgatcgattcacttgcacaaggtaaagtcaatctcatagtgaagcaaattgtttaaggagtcgctgctttatctgttatataatcttagatgctccccattcgagtaccttgctaacggcaatggattcaagttgtagtcataccaaactctaacccgtttgtcctagtttctaacacttctattatgatatatggtccatcattctctcaatgggagtctgtagtgtaactttcctggtcaataccattagaagactgataggacacatcttcactgcttctcccctattcctaatcatttttggtaaatagagggagaatctttgtcactgcccccgtctccttagttatcttaggaagtcgggggagattcctatcactgctttcatgctcgagatcttcttcagatattgcaggggactcatcactatcttcctactcaagttcatcctgggaaatagaagaggaatctggttcagttgaggtattagtagttaacttttctgagcttttcttggtcaatgtatatatgagtctcatgaaataaataagcagtgtaatcagttacttctgcttgagcaattcttctaaccttcgtgacatcttctttgagcttgataaaattgtcaactctatctagaaaatctataatggtgtaatatttgaaggtaatccattagaggtccgtcttcttgttattagtgcagcaaaatctttggctctagtcggtgtgtgccttgaaggagagaattagtcttagaaagcatttttaagcatctttcaggaatcaatagatcctgtggaatgcttgggatactattgatgtgttgttcctgatagtattcttagaaagactcaataactagaattttctcaaatgccttgcaggttagtttgtacttcaaagatgtggatgtgagagagagggtcttctttgccagtgtattaatgccacactgaatttctaaacttttacgggatctccaaagccttgatttaatccgagagaggagaaaaccgctcttgatcaaatccgtacttagttggcttttcagtagccacacccttaaccagagcgacaagagggtcaaattcagccctacacactatggtgatgtgtgtatcagctgtcagcttcttattgatgttgttatgtaggctcttttgttttccaagtctattaatggaattaatcgacctaggccttttggtcgttgcctggtcgtgtggccatgattgtacatctagggatttatccttcatgatgatagggatatctttcgagcattttctttgtgaggaacttctcccaggtttatactaactatttccttcaaaatattcttccttaaagtgaaacgtgtcgggttttgtgccctaaataaaacccatttccatataattagatttactaaataataaagatcaaacactgcattttattttgcatggttcacatgatttatttaatgattgtttcatgtatatgttgacctcgcttttagcgaaagaaagtgagtgtaatttagtaagcaacaagtagtctataacgattgaaatataataaagcaatataaagacacataaattttatagaggttcagccccgagtagttcggtaatagcctaatcctcgttatttgtattaacaca

SEQ ID NO: 308939 - DNA, 1746 bp, Cannabis indica
atttttagttgcgatttaggttgatccgctagttgcaataagaatttctatataaaatttcgtaaaagtgcaaaaaaaaaaaaaaaaaactattttaaaatataaaaataaaaaaactcctacatacatatattaatagaacttttttcccagttgaaaccgtctctttctctatattgtatatattgtaattgtaattaatttcatattttttttcaatgtatgtgtggtgagtattttgtggttgtatctttttacaatttttttcaaaaataaatagtgttgacattatgattcaaaacaacttgttaaacagttattatactatttgaatcttgattttggtaccctatattttatgacactgccccatattttagtatactaatgttttaattaagtcaaaataggaggctttcataaagtttggtagttttcttttcataagatctcttgatgaagtcattattttcttcaatgcacatttatagtttactcctaaaggattgttttagtaatttttttttatttgtatttggcatcaagaaaaaaaaattagttgagttttttcttttttatgattttgtatgttgtagctatataattataccacttgtaaatttttagaaaaattctaatagtttagtgtatcaaaaataagatttaaataattatttactgcgcgtataaaataaaaagtcagttactcatgcaacaaaatatataaattttatttttggtattataaactactcaattttttaaaaaaaaatttacagatagtcccaaataactgtaacgtacatgatttaaaaaaaaaaaatcttaaaagttctttcatatgccgaaataaatatgtggtctaccaaaacatcactttagattaccctatagctctatatataggttatttaagattttcgtgcccgaactatgactcatatattgttgtgtcccatgaactttttaacctgttaaaaatggtcacttaattattcacaatgctataaattagtcattctgtcaagttttgtcacacgttataaataaaatgatgacatggctgcttagttgtcacgtcagtgccatgtcaatgcacatcagtacactctctaaagtgatgttttggtagatcccatatttgtttcggtatataaaagaactttttagtttcttagttttctttttataaatgtgatatagttatttaagattatttgtaaattttttaaacattttctgagtattttacaatatccaaaataaaatttacatattttgttgtacgtgagattattatttttttatatgtatggtaagtaattatttaaaccttaatactataaattattaaaaattttctaaatatctacaaataattttatatatatagctacaacatatacgtgataatatattaaagttagtctcacattgttaatgtatggaaatatataaattaaactacaattatttttataccaaataaaataaagaaatctaccgaaacaaccctttaagtccgctacacaaatttccagagctatatgtatatgatagagtacatatagtacttgaatagaagctagatgacccacaactatgatacatactaggcttatattattccatcaaatgtagctttcatttcctacgtaagctctctagtcttttataacttcatatttgtctagtatttttttttttttttatttttagcatatatttactgttgggttttatgcc

SEQ ID NO: 308940 - DNA, 628 bp, Cannabis indica
tttttttttttgaaaaaaaagcgcgattatattacttaaaagaaaccgttaaacctcacggtcattacataacagttcaagaggaatggaatcaacgggaataaccccaaacctgtcaactcttcaagcatccaacctatcaactcttcatatcataacccaatttcttttttgttcctaatttttaaacaatcagcagtatcgtagccttgtttaatcaatgtaatctttgctactcatcactatgtattttgatgtcaactgcttttctttaccttttttaatttttcatggagaaaattataatatttagtctataaaaattaagacttattttcgatcataaaatgattgaaaaatgatttattattccagaatatacttggtttatctcaaaaaataaaaaagaaagtcttgaaagagaatcaacaaaagaattctcaagcattattatgcttcaagcaaaccatagtagaaaacatttttcttttaattatgagggcatcagtagtaaaagaagcaagggaaattttattcaccccaaaaatttttaaaaacactttattttaataatttttattttataaaaatttatatctttaattgtacaaattttttttaacttttt

SEQ ID NO: 308941 - DNA, 1758 bp, Cannabis indica
cctatggcttttgcagctgaagagagctttgtgttggatttactgaagcgatgttcttataattattctttggttcctgaactgggctcgcacattctttttactctataggtcacattccccacgaaaaaaaatacagggtctcgatcatatgggatttgatatataattgattttataaaatggaagaacaaataagtgattattttcttttaaccaaaaaagagggaaacaattcactgtttttggtttcaagatgcagactgttaattttttttttttggatctcatcgatctttgtaaacatcttattccaactggtaagtgagagactgaaagaaaatgattcattcgggatgctagtttttactacacaacttcacaataattaattgattaatttccctggaaattcagaagtgggagtaccaaatttatacaaattcatattttgttctgtatcattattatctacacgtcctgtctaaatccgggttttcgtatatgattaaatttgtatccgattcaaaattgtgttcatttgccaaaatcttggtttgtattgtaataggaaaataatagtgtatactaattaatgtttaaaattaatcgttttggttttggaagggattttaaattgatcttgagtaacaaatatttaaaattattttagggaaaaaaaattaaattgagagattgaataaaaaaaattattctagaaagcacaaaatttatgtcagaaaacaaatatttttttattaatatatatgtatttttgtatccaataacattaattaaaacacaaatcgagtaagatacatgtcctcacaatttagccgacccaaggactaaatgaattatgagtttcttcacccaaatgtgtttatatactcacaatacatagagtacgtcaaaagagacttgtggcctaacagaagaaaagagttgtagaattttgtgttaagccttcaaaagtacaacgatcgttaccttgttggcatcattgatgtgatatgtttattatttcagctttcatttattaaaactaaatgaattgaatttgtatttgaatgcctatatagtatacacacattatattgatacataccttgaaaatgaatccctgaatttcatgtaaacatctttctttattgtaacatgtggggtgagttagtgagtgagggttgcaacaactacatccgccccagaagagtagtaagtagttggtcattataattaataataactccaactggtttatgctctactattactactactatttctgtccctcaatttatttctagtgtctctcaaccaaactcgtacgattgcataatctttaccgacacaaatatggtaacaacaataaatgaataattaacattattactttggttgggttgctgctatcataactcaaaatcaaaataacaacatatgagagaggagaattttctgcttttgcgacgttgaacagcacatataagacaaaaacgacaacgatttttatattgtaatagaatttattttttttgggtttcaccttttgtacttgtatcgtgtttaatttgttttacgataatttaaaatatgaaaaagctgatccaaacgctttatttcacgcatatagaataaaagagaatgcaatatactatttgaaatatcttaaataacacattatataatattatatataggttaaatactattatgaacttgtaaaacttattaattggaccatttattttgttaaat

SEQ ID NO: 308942 - DNA, 1066 bp, Cannabis indica
cattattataccttattctataataataataataataataataataataataataataataataaatagatgaaattttcaaagcccgaagatttttttttttttactagataattaatttttattaactttcaaattttgctactaaacagaaaagtgtaatttaattgatgaatgagtatactaatgtttaataaaagaatggaacatttcaaacaagcaaggatttacactttaataatttgacaaaataaagaaatcatattaatgaggctttatatcgcttgtacgtaccacgaccaaacagtcagtttcaagggtcacaaactagtaactactatctttttttgttttgatctaacttagcgcctcccaaactttaattacctcaacgagctcagatcgggggcaaccctacggaagaagcgagtgatgccttcaaacaagaaaccaagctagctcatttctagctatcaaagaatttgaacaaagtatatatatatatatatgtacaattacaaatgcacattacataattaatcaatataataaagtaaattaatgactgatccttcatgaaagccttgtaataaattacatgtagtcctatatgatataaaagagtttaatacgaaaattgaatcaattatagcatatattttcaggtgtattaatattcaaattttactatatataatattcgtaaatgtatatatatattatggcggtgattgtgaatgagacatttcgtacgtacactgaattaatattaatatctatacatcaagtatatagttgtaaatatttggcaaaacgtattatcgtgttgtgtttgtgttatattttatgtaattcatttctatatttcgtgttaagcatatgtcgaactgttttttgacccatatctagtttctcaatccaaactcaacttgtaaaaaattatatcgtgtttgtgttgacccactttaactatttcgctattataaagttaaaggagaaaaaaaaaatgataaattatgtctattaaaaaacttacatacaatatatataattttttatatatata

SEQ ID NO: 308943 - DNA, 725 bp, Cannabis indica
aaaaaaaaaaaaaattagattggttggtaggcattggtgtgagagaatcattataagcttcaattttgtcaggttttgggtttagacggcagaaaagaaaaaagggccaaaaacagtagaatccggcgaagaatttaggaataaaatatagtgataggggtagtggggtatacaagactttgatgggtaatctaatctggatctgggtcaacattaattaacgaattaatgcagtttagatcgtggcagactagagcctccaaaatcaatagcaaacctcggtgtggtgttctaccaccattaatatcatcgctgattacaattattgtggtttgactatcaagcttaggggtgagtcgttggagtctacaactacaagttgagagaatgagtttctggtgctggttaaaagaagggaaaggtccaagggaggtgtccctgaagataagggaccttgatagaaggagtggtggtgaaccaaatgtcgtcttttgtcggtattagattgatggtggactgtgatgggtatggtgatgcccattatcttttccaacaaagtgccctacaaaacaaagttatatttagagataatttttattcaagatataaatttgttgtgagtaaataatttttaatcacaatataaaattacttgtaactaaaacatagtattaaatataagggaatatttcacaaaaacattaaaacaaccaaaaaattacaaa

SEQ ID NO: 308944 - DNA, 1294 bp, Cannabis indica
ggctaaccctggtattagcaaatttcttttatattttgtattacactttataatagcttatatattatatcaccctgcaaataagataggatttcaatccaacatattaacacttattggctaaaatgaatactaaattacactaatatcattgtcatgttttaaggtgacttataacaacaagaaaattgattgcaagataagccattaaatgctaaaataggttagaaataaaataagaaaaactaaaatcatactctatatatttatatatataatatatatttcaaagtcagaatttgattttatattaaatcttactataatggtattctatcttttgcacgaaagataaagtaatgtatattgtttggccagcttgtattcttatgttttaataatcataatgtttttatcattttaagagtgacatttatgagtgttttttttagataagaaaatagtttatatatattagggttacatattgaaattttcaacttttttttattatgggacaaatttttttaaaaaaatactgtgttttttttataaaaaattccgtataaattttataatgtgtattgtgttaagctttcattattattccacgattattttttagttgttctactattatatttaattgttctattttattgttttacggttattttataaaaaaattgtatttttataaaaattctgtatgacagtaaaattgtaaacttttatcaaaaatctaatatttttataaaaacccatatatattatagtttatagtatttttatataaaattggattaaaatttagcctacctcttattataacaactttttataattgttttctttgtattgggaacctcaagaatgaccatatcatattaaaaaataaacaaaaaataaacaaaaaatgtgagagagattgagtacctactctctctatcccaaagaatcaaagatggagccacatggttccaaaaagccatcttaaattttatttttcagtttttttattatttattattattgtatgtttttatatattaacatatttggtatattaattagttttattaaaataattgtataagaatctttcaccaaaagaaataaaaaataagaggagtagctaattaggatttaggataaattatttttaatgttgtttagtaaaataatttttaagtgtaggtgtccattattttttatatatatatatatactaggtgaatgtacgtgtcgagccacgtattctagttttatttaagattttggtatttttaagatt

SEQ ID NO: 308945 - DNA, 2614 bp, Cannabis indica
aaaatagaaggtctaatcagtaatttttataaaacacaagatccaaaatagtatgaaccataaataaataatatttcaatccaatttatttatacctggataagtaggtgcatttttgatgacatgaggtaagtcaaaattaatagccttaatttgaggatattttgaaacaattaagctaactgtgactccaaagcctccaccaacatctactaatgtcttaatattattctcaaaccccttgtaagactcaattattttcttggtaacaattttggcttgattgtacattgctgagttaaatacttcaccaaatcttggatctgattttccatactcaaacacattcattccgtgagcccttttgaatgctgtccctccttcaagaactgcgtttttcaactcgaacctaaaaaatatattattttattattatcataaaatcctcactctaactctatttgtcaaggataaaacaatacaaaatacgagtagaaatatagaattttataccaactttccaaggaaatcttatcgagtcccaatttcattaaggcatgagatgaaacgccatcttctttaggtaaaaaatgttttgagactggagataggctatagagttttcgcatacttgagccctcaccaaccacaacacaatcgagcacagagtggctagccagaagtgtgaggatgcggtccaacatcattggtgcatctgggttttcggttggcaaatgactagcaatgtctgaagatgagagcttagctccatcgccggcttttgctagtatttcgaaaacaccaagctcaattgtggcatacaaggacattggcaacacaactgagcttcttagttcaactgcatagaagaaactttcatcttcttcaacattgtttctttcaattgacattggaatttgattaatttggcaatccttttggccttttggcatgtagaaagtaaattttaataagagtatttatttgagtatgaataaaaatagattctatacttataggcagagtgttgtggacttttttcattagagtatgaaaagtaatataatatttccattgaaacaaaaggtccctcaattaatattccggtccctcaattaatattctggttctcttacaaggcttattgggaaatgaaaagataagaaagaagataaacatcaaattttcctattgattttgtatagtgaatgcccatatgccataatgcttagaaaggcaagcaaaaataatatagcaccaagattaactgtttaatgattctaaaactgtgtaagtataaaattacacaatcaaataggacttaaatagattaattggtactatttatatcaacaaggtgcatcttattttctgatagctcatctttggtctgtaggatcagtcgtcattccaagaagcagctagagtgacatacttatatataagaaccatcattccgtgaatgtaaaagcccaataaaaacttgaagggagaacattataacagttctttcatttctcacttttaaacgtagaaaaatcaacattaagcaattcaaaaagaatcatcacaacaattaacaaaatctaaaaaagagagtaattacacaatacacaccaatgttggagagccatcaagtaacaatgctaataaggcaacatgaagaccaacaatagataaaaatgtgagataaaaattaagattcaagatttgagatttaagacttaagcttactcttttgatagtataaaatgtgagatattttaagcaaaatatatttatttgatatgagttatttgatttgttaaaccatctctaatgaatgatgtaaattttgtgttaaatttggctcaaaaaataagtttatattatatttggtcaaaattttacaattatactctaatacactaagagtaaaattaactttattttaatataaatgtgtaaaaaatcaacaaaaatattactttttttccacgtggtgaacagagtcacacatgattaacaaagcaacaaactacaattggcgatggaacctcctcgaaccaggatagcttattatttaattgaaaggcatattttgcgaaaccatgagctgcataaaactaatcgcgagccacatgaaacaaaactaccctcgaaaatttagacaataaagctataacgtcttcaacaacaccccatcacactgagcaaacaccttcccattattaaaagttgtcagcacaactaacaaaattgaaaaaaaaaatatctaaacataatttaaaagtctagtttctttcgaaataacttttgagaagctattttcaaaactaaaataaattacataatttttaatttactcacaaaaaattgtttttcaatgatatctaaacattttaaaaatataaaaatgactattttcctaattaaaagtattttttacaaaattaatatttttacaataattatccaaacagtaaaaataaattaaaatttatacttctaattctcgctataagtaaaagtagaaatttaactaaacgagatctaagtggcatttagttgggaggaatgaaaatataagaatagtaataggagtgggaattgaaataggaatggaatggaataa

SEQ ID NO: 308946 - DNA, 1625 bp, Cannabis indica
ttaaaacaaattttttagactaaattttattgtagattaaaaggctatgtttagaccctaaactaacacatagtttaataaatatacattattttttttaataatattttaaaatattatttactttagtaaaaaaaaatccaaaaaaattattttttagggcctaaattaactcaggccggccctactaaaaggcacataagtgggacctatcaaatttatttacaacataatattaagaataataattgtaggtaaagatctttctccacagtccaatattaacaattataaattatctgtttatttgtaggtaatctatttacttaccttaagcttctaaaatttacacttacaatacaattggtatagtaaagagctcattttctttttgtcgtttttgtgagatttgtacaatctaatctttgcaagacctataaaaaaaaacatgtactttctcttttttctattgaatgatatttatccctaaaaaacttttaaagaagaagaagaagaagaagagtaccgtcaacacaaattaaatatattcagttttttttttttataaaatataattttttttggtggaatgaataaaaattataaaatatagttacttatcttaaacacttaaactagttgaataagatttgtgccgtcgtactttaataaataccatttgaacgtacaatttttaaattttacacaacaatatcaataaatttggattgaaataatttttttgttgcaatataattcatactcaattcattctaatagagactattcaaataaaacttaatctttaaaatttacaaggaatgatagtttttaaaattttcttttcctagaaattttttaaatctaaaagactaagtactacttactgttttatgaaaacttgataatgtatttatcacagtatatctataaaatttagattgtttttttttttttacactttcaaaatatatattttttttttgtattttttacaaaatttcacaaaaaaaattcctatagcaactaacaatgcgacctaaatcgatctcaatcaaaattcgtataacaacccacatagaaactaccgtagaaactagcagagcaacccaaattgtaaattaaaaaaaaaatagtatgtatggtaatttttccaaaatttaactttttaaattgaattgtttgttataatatatattttaatttttaatttaaatttagaagcattttataaaatcataaaaactaataaataattcttcacaaataaactaaattaaaaaaaattgtgtttgataatatatgtaatattggacattttacaaaagacaagaaatgaattaaaaaaaagtatagtgtaatagaatacttagttgcttgatattgtatactaaagtaattgatgcacatttatggcttttgaattttttaatcaaattttttttttgtggtcgtgtaaactataattatgtaagataatttataaaattttaacaaatttaaaattttaatatgttaaaaaataaattcaaaaatttaatctatttttttattttttttaaattactaaaataataaaaagtgtatcaatacatatttttttggctaattagaaattttttccc

SEQ ID NO: 308947 - DNA, 1500 bp, Cannabis indica
ctggaaccatatgctgcaattatgtatatagatatttacatcataatatatcaatcaaaagtaaatcaattttctacacctcctcaatgagtatttcggtagaccccttatttattttggattttttttttcatgatcatgtattttgtagaaccaccttgtaaattttcagaaaatttcgagtaatttataatgccaaaaataagatttatatattttattacataaacaactatttatcttatacgcatggtacataactatttagatctaatttttggcactgtaaactatttacaatatttttgaaaatttacaaattatcttaaatagctacaacatacgcgatcataaagaaaaaattaaattaatttcttttttgctttgttttgagtttttttttttttaaatgccaaaacagataaagatctacaaaaacaaccttttagggatcaagtgtaaattttttctatatatattatagggtaaatcttcattggagacccttcaaaagctatttagatacaccctcaaataaagaatttgtattggctaaaaagtgagtccatattattatgatgagtgttagagtcaacttcatatattacaacttcttagttaacatacattctcgaaaatatatggcagaatatttttttttaaataattttttttttcacggcgatgttcgttatagatacaacatcttttctgtatatttttgaaaattttcgaatagtttacaataacgaaataatatttgattttttttttaatatgagtgatgaactagaatatcaagaactctcttttcgatattgtaaattatttagaattttttaaaaatttacagagatgatattataactataaagaatgtcattataatttttttttttaaaaatatttcaacatgtgatttcagacgtggaagttctaacaagttgtaattagtactcttctaatattatttggtggagtgttgcgtagggaatatatatatttgtaatttttttactgagttagtataaacgcgaagtaagtaattatttgaattttacttttagcactgtaaactattcagaattttttaaaaatttaaatgtgattctaattatatgtacaatgtacacgattatgatgaaaaaaaattagactagaaaaaattctgaatgttgaagcatatagggggtctacaaaacacacctttagggggtgtactagacagtacaattcctaaagggttgtttcgatagacaacttatttatttcaatattcatgaaatttttttagtatattttttttatgatcgtgtatattataattatttaggattaattacttgtaaattttcaaaaaatttctagtaatttataatgtcgaaaataaaatttaaatattttattgcaatcacgacttatttttttttttttatactagtagtaaataattgtttgaattttatttttgtactataaactatttaaaaaaattttaaa

SEQ ID NO: 308948 - DNA, 1836 bp, Cannabis indica
aaattaagaaaaagtcactctacaaaaaatttcaaatctaattttttttcttaatcaatattttggattctgaccctaacctgaactttcggacccgaaccccgatccagatctgaacccagacccagcatggccccagaccatggccacagccccaaaccccatacttggactaggacttggacccgaattttggccccagctctgaacctggaaccaaactcggcccctaaacccggaccctagcctcgatcctggaccgacttatataaaatcaacaaataaaaataaaaattatttttatttttattttaaaattaaaaataaaatagttataaataattttatttcaaaattaaaatttactttttttatgataaaaaaatttagaaacaaaatattttactaaatccaacctataatataatactggaagttgcccctacagcaaggaaacaaatatttgacattttggggacatatatgtcggttgtgatggttttctttctcttagcaaagtaacaaatttaaagacataaagacaaattagccgtctcacacttaaattctcactagtaacttgtattatacatattaatactcatttctcattcctatctttgaccaatagtagtgggttttcttatgagattaaaagatttgaggataaaaggttttatgaaagaaggttttattattttgtttacttctccacttttgttaaaaaaaatgacaatgaaatatgtgatctcacactaatttgtgattaacaaaaatggattggcaatttttgaaaaggtgttgtcaatctcattctttattattaattatcatttttattattatttaattattattattgcatttctaactaaataaaaaaaattaatacatacattttttttttaatgtgagaacatataatttttaatttctcatttcatcatcttcaccctcattgtttccgcctaactccgaaaacctacgaaagccagcagttcccacctaaccctgaaaaccctacgaaaccaccgaccaccttgacctcgaaccacgaaaccatctcaactacaactaaagtacaaagtaacagaaggatacaaccgttgaggataaaggaatatccaagcttattcttctacatacaactaaaattaaaagaatcttactcactaggtatccattgtgtgaacatggtcaacaaaataataacaactagcaacacatccttctttgaaaggagcaactcattagttgcataacagtttttcttaaggttgtatgtcatatctaaaatattagcggaaatataaagcattatcaatatcatatttgacacattaatgtgaagttcttaaatttttcttattagattaactattctgttaaatcttcaaaagtttcttatgactaaaataaaataatttttaaggcccaagataagtgttacaatgggaaatcgaactccgaagaacaaccaaatgaggaaccttatgcaaagcattgcagtcaactacacacactcagtggtacaattaatcattcatttaaaaaaaaataaaataatctactttttgtaaaaaaaaaaaaaaaaaaaaaaaaaaaaaaccttaatcatccttagagatatttaaatataaataagattattgtctcttaaagaaagtagtaataagaaaagatatggcaatgttagggcaaaacgataaagaaactagaaagaaatcttcgaactctcatcagcttggttcttccctttcttaacttcagggagagaaatattttcagcaacattaaccttcaatttttctttaacaggctgacaatcactttttt

SEQ ID NO: 308949 - DNA, 2483 bp, Cannabis indica
attatatcaatggacactacagtaaaactcagtaaatataattctataattactaagaattcaattccatatttatagtggagtaatcatggaattaataaacgaggaattatttggttgatgagactaaataaatgtatagtctagtttattggagcttaaaattatatgtccacggtccctgaatcgccaccttgaaatactgtcaagggtaggaataaagagttgtataaatatgttcggaaaaatttattttgaattgacaaaatagtaattatttatttttacgataaataaataattttttcaaattaattaaatatgaaatagacaaaaattattaagacaaaatttatcgagataagatttgtcaggacaatagacaccaatcttatcctaaagacaatggtaggcacctatgcttattcctatccctatgagatttatatttttgggttaattaattatttaattaatttaattaggtaaatatctaatttgaaaagtggttatacatatttcaaggttgttgagatattctctcaagtggctgagagattccctcataaatatcagtaaccgaattcagttatagatatttatttatttaaataattaataaacatgatttaattaaagagatttaactactataaatacaagtctgatttgaggaatcaaaaaacacttctcactcccagaacattgctattttttgaaatatagagagctgaaaaaattattttctctctcaaatcattctttctcatgtgttgagaactcaacaagaacaaatgttatatacttaattctaataacctacactattctttgtgtgtggtagattgatttggaacacactgatgtgagttcatttgcaattttctcatcatttgaattaagggatacaacggcaacatacgagaaatttcgaggataccctatagatttgaagaggtacactctaaacttattatttttattgttttgatttaatgtacaaaattctagagatccaatgggatatggtacgatgataattagataatacgaaactcttctactaagtacctaatttagtaccataaaaccaacactcttaggtttccaggtgtctgcacgctaagatttatcaccattggatcgactatatcagtttgattcgccctttgagtttgcacaaccatcttgtttcttgtaaaagacttaagacaaaaaaattgggtgtctttgctctcaatgaaagcaccaaaatattaacctcgtttttagccaacaatagggagtcttaattaaagcgatgagaataaataattgaaagcaaagagcataaagtaaagaaaacaccaaatttatagaggtttggccccttatagttggtaatagcctacttccttttttgctgtattaacttgtgagaaagaatgaactatcctttctcgaaagttcttacaatgatctttgggtaattcacttttagttcgagattaatgcaaagaatcaaggcaattagcttagattttccaatctctttatttgtaattatggaaatatactaactagtttctttttttatttgttacagattaaggaaaactatttttcatgtaattagcccctataaatagtcgtctcatcttactattcagtgacacaaattaattcaaagagaaaacactcaagagtgaaatcattcctatttgtggataacgatattcctattaaaacaccactttatacaaccgagagtaacattactgataaaaccaagttcatggtggtggagcaagtcacgtcgaggaaaatctacaacatcaattttcgaaaagaggagggtagagtttataaactcaatgttatagagaagagtcatgcagttgctgataaccctgataatgtacatagcactatgaggttgacacttgagtttaataaaacaaggtcagtttctattcgcaacagtgtttcgcttacatcagatgttaaaacaacctttgaaattgattctattccattaatagttaataaggaaaagatcaaattgtcggctgatgaggttactaccgtagggcaatggggcacaaccaaaaattttgaagctttaaccaagactgactacacccttagagtgcctcctaagactagagcaagagttagtcttgaagtgacacaagggacgtgtgaagttccattctcttatgctcaaaaggacagtttttacgatggtacctctaaaatcctcgagatggatgatgggatgtatacgggggtcaatatattcaacattaacatcaaaaccagccatgaaacactgccttagctaatagaaatataacactactgcatttttcaatatttatgttttctttttccttttatcatcagcaaataaaatgtaatatgatgaggcaataacattgactcgtacacaactcaacaaataataagttttcttttcctttattatttttcttttctatttt

SEQ ID NO: 308950 - DNA, 2662 bp, Cannabis indica
gttgttgatgaagtctgattcgatagtgaactccctttgatccataaagagaatctaattgagattcagtctgaggtgtttcatgacccgtgtgatgaacttgaagttgattatgaacttagtctattacttcacatcagacgaaatctgcaaagatttctcgttgggctgaagaagctaagattgatgaaccagttttccagtcctctgccaaagaaatttggagtaaatttaaggttaatcaagttcgtactccatctactcaacttgattatatagagcttatgaaagtgggcgatcgtctggtagcgaagcttgatattgaggagattgaagttgaggcttcaatgtggaagacatctattgtatgcatagttctgggtgctaatcccccattccgtgtgtttgaaggttttgttaaaagaatatggggcaatctgggtattgaaaaaataatgaggatgcacttgggtttcacacttgtgagcgcttgagatgaaactacaagggatttggttctggaaataggtgtggtgcactttgacaagaagctagtggttcttcgtccctggtcattggacatggattcagttcaaatggtaaaatcagttctcatttggattagattaaatggcctcggtctttaatactggggacgcaacaaccttagtgctatggtgagcacaaatggtaagcctattatgattaataaggttaccaaagaaagatctatggttaaattttctagaattcttgttgatatagaaattttagataatccttcgaagactctttcgttcattaatgagaaaaattaattggtcgatcaagctatagaatatgaatggttgccctctaagtgctctgcgtgtgaattgttgggacatactgttgccaattgctcgaaagatcaaggcctagtttgggtcaagaaaaagcaggttgtgctaaataaatcagagataggagtagataattccgttaaggataaaccagtagaaactgagcctaaaaaacaacttcaatttctaatgaagttgtatctaatgcttctgatgtgcaggttaaagactcgatggctgtgaaagtttctgtaccaattgaaatagttactgatattgggggtgattggatcacttctagaaggaaaggagttaaaaattttggttcacaaccatctaatgccacaactagtaatgtttatgcagcgcttcaagtgcctgattgagggaatttggtcactacttctatgactttacgtcatggagtagtgtaacatgatcaggtggaatgtccagggtttaaaataaaggtagtaaataaaaaaactatccttgatatatatagattgtataagattggttttagtaccttttttgaaaccaaaatctgtcatgaaaaggttgttgatataattttgaataatttccctaattgggatttctactctagtactattgtctctagtagaattttacttctttagcagagatgctttgtccaagttcaggttatttgtgaagatattcaatttgtgcactgtaaggttaaagtagttgggcataactctattctctttattactgctgtgtatggttctaattctgctacggtaaggaatatgctctaagaaaagttggctagttttgggtgtttgagtcatccttggcttgattttggcaatttcaacgctatgttcagcaataatgatagagttgggggaagacagatcacgactaatgacattctggatgcttaaaattggttggctcaaggtcaagtggaagagcttaagtgctccaattttagcttcacctggaccaacaaatatgaaatgggaaataggatctattctaagttagacagagtttttatgaatgagctctggtgtgatcgtttccccaatacaaaggctatttacaagtaggatgatatttttgaccacagttacttcattataaaaaaataatgatgtttttattgttggtgtcaaactttaggttttataattggtggatgcttaacagtaactacaaagccaacgttttagagaaatggtacttacctatggataaaaaaggtcttggaggcatcatatacatataatacaagctgaaacatgctcttaaggataattttcaaaaggttttggggaaaattcttgctatgtttcaagaggccaaagagaatcttagcttggcttaaggaaatcttgctaataacccttcttgtttgctgctgcaacatgaggaaaggttaaagcatcatgagtttaatctagccaaattgaaatatgcaagctatgttcaacaactcagtaaagttacttggttacaatttggagatgaaaattctcattttttccatgctttgctgaaaaaagagaaagcttgagaatagaatcactacttttgtcaagaatggtgaagttattgatgactataattatgttattaatcactacttcaaccacttcaaaaattttttaggcaagaagagcaatgctacttgttgatcgaggttttcggcaaccaaataaataatgtaataatgagagcttagggataaataatgcatgtaattttaacgtagttcaggcattaatgagccgtagtccacaagtctttgttataaatgagagagtatttcttacagagaatat

SEQ ID NO: 308951 - DNA, 985 bp, Cannabis indica
tttgttttttttttgttagagaagaactagggcccaatattgactcgaacagttgtatattggagtcttgtggtgcacagtactctgtattgtctaatcatttgctgattggggttcgggattggtggtgaaattattttcgtacggaattttatgtttttattgatatttatttatttgatgagcacgaagaagaagaaaaaattgatccattatttggagataattcatccacacggggctagcttttggttttgtgaattaattaatattgttccaactgaaactcaaatgagtgcacatgttcgttagaaatatggatttgtaaattggtttttagtttcttttcttcctctactttttattatatttattcaatttcttctttaggtttccgatgtcagattggacaccacatcttttttctggagaaacttttcagctgaataatttgatagatttagcactcataagaaagagtgtatttctttttaaaaaaaaaaaacaaacaaacaaataaacctgtactgttccaccaccattacttaataattcatgtatatagaaacatatattgatatataggttatatttcgagccacattaatatagaaacatatgtatatatagtgcgtagaaataattgattagtacttgtggcatgcatttcttctctttaatgtgttgatcatcaaatacttaattaacaaatttctcagtacgaaaataaattgcatatttgaaccctattattagagcaatttgatatacaacaacaatatatggtacaatacataacatgataacctcaatacatcatcaataatatatatgacttaacactgcagatcagttttattgtaaccatggttacatttcttttaacctattatataaggaaaacttacaaaaatactgaaattttggttaacttttacaaaaatactgtcacacggaattttttcaaaagtactgtatttttata

SEQ ID NO: 308952 - DNA, 2326 bp, Cannabis indica
tgacgaatccattaggtttcatgccaatgcaaggattgaaacttctcatgtatcctctcgttaaggacttctcttcctccttcaaagcttttcatccaaagtggctcttctgtttgagccattttaactagttcgtccattgccgccaaggctagctctagatacatcgatctctcgatcgaccggtcgagaacttggacgccgccttgagaccttgactgaggaggaagggcagccaaagtgttcgacgaaattccaaaatcaggcattgtggtactgactgaggttaatccaccaaagccattactcccaacaccgagctcaagagctgaactgggcaatggaggagccatggacgtcgccaaggctgaaatgggtcgaccgagaaacttaccggcaagagaacaaacccgctcgagctcgtctttgaggcgggcgttttcaattctgagatgctgttcttcgagcgaaatttcgcctatgattgctgggccaccacagtttgtgcacatggggtttctcatggcgtctctgatggacatattctccgctcggagcttgtcgttttctgcctaagcagcgagttttcgtgtcgttcgagttgggtctggttaacaatcccaaaaaacaagaaaaaaagtacttgttgagaaagacaactcaattggtttcttaacaaaatgaacatgttaatcaagtaaatcaccttcatttgggttcgccgattttggaaccaaaatttgacttgcctagtctctagacaaagccttttgcttagctcaagtctttgcttctcatccggatgaggacactccttgaacagactaagaaaatcaaaacaaacaaagagatcaatgaaaacaaagagcaaaatcaaaacaacatacaacttgaaaaaaaaaaaggggaaacaaatcagtacgcttcgagttcttggatttgctgaggagtgtgtcggtggtagcgttttttcctcggaggcttgtcggttgcgtcctgatcgtctccagagccaccgtccatgttatcactcccagatctgctttcgtgttcttcgtctcggctcctacggccactacctggctcgaaactctcggccatgtttctgatcatatctccttgtccatctatattagtttgctgcctccccaaaaaaattaaccccatatcagtttttaaccccaaaaaggtaaccaataatagtaaaattaagaagaaaaaggaaaaatcttagtacaagagcgagagaaagtccgggagagttgaacattgatttggttagagactgagtaatgagtcttggctgagcgatagcagtagagggcatgatgtggttgttgtcgttgttgcttgtactactgtaaggaatttctgcaactaatcttgcaccaccaccactagtactagtactattgtcaaggaatcctccaaaactcatcaaagaaagcccccaccttaatttcttccttcctgttttactcttaaaattttctcacttgccaaacacacttttttatgtttcctttttctctattgcttcctctttgatatactacaactctttactcactcactcactcactcactcgacttgagtatctagattttcttttctcgttctctctttacaaaatgtacagataaacacactattattgactgactggttttaaactctattcccgagccataactcggccttcgaccacgtaaatggctcaaaatttcaactacccagaatgggtttctccattatttttgtttttttggaacaaagaaaaaaaaattaaaaaacaaaaaaaaaagtcggagagaggatagaggagacaaatggttcggaccccaaatgtctccaactccctctcagaggatgaaaaataaaaaaaaaaaaaaaagtttagaatttggagagaaagaaagagaaagaaggcaagcaagcaaaattttcttcaattttttttagtaaatgaaaaatcttgtgcttagctcttcgttctctatccctctctctctctcttcccctttagatttctctctctagatagagcctgaaaaacaggtagaacagcgtaagggagttgaaaaaacgggaaccctagtttttgggcaagtgttatctcgttgtctgcatgcttggactttgctcaagaagaaaaagcttctatgagttgaagagacttttgagaaaaacccaaaatttataaataaaagaaaaaaggaaaaatatatgataagacagagaaagagatagagagagaaaggcttttccaagatttgcacagagtgagagattaaataaaataaaataaaataagagagagaaaaa

SEQ ID NO: 308953 - DNA, 2022 bp, Cannabis indica
aaacataggcacattgctgaaagtggtcttacattgttggctcaagcttctttacccttaaaattttgggatgaagcttatagagctgctgtttttctaatcagcagaatgcttactcctcaactaaaatatctctcacttattgaagtgccatttcacattaaacctgattataatctcctcaatgtatttggctgtctttgttatcctaatttgaggccttacaacagaaataaaatccaatataggtcccaaccatttacatttattgggtacagccttgcacacaaaggatacaagtgtttagctcaagatgggagagtgtatatttctcgggatgtcttatttgatgagcatatttttccatacttacctcaacattctcaacctgtttcaaactcaaaatcttctactgttaatacctctgcaactccccttgtcattcctccacaaaccacccaacctgtcatatctaaccctttaccaacatcccctgaatatatgcagaccattccctcttcttccactatctcctctcaatctgatactcgaccaatagagtctaataatgctcctgcttctcatacctgtaacatttctactgctgttggcactaatgttttaaatgcaggaactataccatgtagcatacttgttacagatttgccttcaacaacagctagtactgctactccaggcaaccaagcttctacttcccaactgccatccgacactccagccaatattcaccctatgaagacaagagccaagtccagcattcgaaaacctaaagttctaatggcatctctcacaccaaaatccattatttctgcactaaaagataccaaatggttctttgcaaaggactgtgagttcactgccttaaagagaaacaacaattggattttggttgatcttcctcccaacagaattcctatagggtgtaaatgggtttacaggattaaagaaaacccagatggtagtgtaagccaatacaaagccagacttgtagccaagggttttcatcagcaacttcgctttgatttcaatgaaacctttagctctgttgtgaagcctacaactattcgagttatgctaactcttgcagtgacaaaaaggttggccaataaggcagttggatgttaacaatgcctttttaaatggagacctacatgaggagatttacatggttcaaccgcctggattcattgatccaaaatatccaaacaaggtatgcaaacttaacaaggctctatatgggttgaagcaagcaccacgggcttggtttgaaaagttgtcatctgctctactcaccctggggtttcaatcagtaaaatcagatcattctttatttactaagatcaccaattcaagatgcctttatattcttgtatacgtggatgatatcttgattactggttctgatagtgctcaagtgtcttccctaattgcagcactcagttccaactttacacttaaagaccttggtctcatctcctttttcttgggaatacaagtgcttcccactactgaaggtgtcgtcttatctcagcaaaaatatattcaggatctgatatgcaaagctgaactccaaggagccaaaccacaaagtaccccaatgaatagtgggctgagattgtccaattatgacagcgaccctgttgaagatccttctgcatataggtcattggttggtgctcttcaatatgcaacgataactatagacccgacattgcttttagtgtcaacaaggtctgccaatttatgcagaatcctcttcagtcacaccttgttgctgtcaaaagaattatccgttatcttgctggcacaacagactacggtcttcatatcaaaagatctccacacttgcgtcttgaagcatactgtgatgctgactgggccgctgatcccgatgatcgacgctcgactactggctactgcattttctggggtgaaaatctgatagttggcagtccagaaacagaacactatctctcgatcatccacagaagctgaatttcg

SEQ ID NO: 308954 - DNA, 968 bp, Cannabis indica
tctctctctctctctccttatttgttcctaatttgctttgaaagcttctcacaactactccaacattaagaacaagttggaaactttagtggtttctcactcaccagatggccagcctctatttctcacttgttttttatggatgacagtctgctattttaaaatcaaaattcatttcttgtcgttatacgagttcttgatacctatcattaggcttcaggtcaagtcctcaagctgacaaatccgttatttctttctctcccaacataagtttagcatcacaaatctactttcataggtagcttgacatgccaatttatgagtgtcatgagacatatcttgtgataccttcttactctgaaagagataaaaagattctcttagtagaatcagagaaaaaaatttatgccttatgcacaaatagaacgagaagctcttcttagcaggggtaaggaagtgctcttaaaagcagtggtacaatttattcccacctatgccacgaccttttttcggttaccggtaactttttgtacgaacctaaaatatattatgtcaaaattttggtgggcatccaatgagaatggcacgaagatacattggcacaatatgaatctaatatgtaaattcaaagcttcaggtggtatgggatttcactcttttgtacactttaatcaagctcttttgggaaagtaagcttgatggatttcagaatccaaattatcttctcaacaagctattaaagagtcgatataactcacacaatgctttcctagaagcacaatcgggaaactctccccactacaacattaaggaccaatagcggtgggcccctcggccgctattggtccctaatctggccgctaaagggcaatagcggcggacctcggccgctattggtccgccgctattgcttggccgctattactagtattagcggccaaaaacagggtccgccgctaatactatta

SEQ ID NO: 308955 - DNA, 537 bp, Cannabis indica
ccatcattgggcccaaaataacgaaaattgggccgagcctaattgttatctagctttctgagaaagcaatcacattgctcgcttaggtgagcttccgccaaggctagtccgtatttggaaggatcctagctctatgtatccggaagaaccttttggcgtgcatttggaagccagctgtagtttttcgtttactattacgtacagaataagaaaatcactttcctcagatcttagacagaaaataatatcaagttaaaattgaagattaaataattagtatcgtattaactatccacaatcagagaacacggtatgaacaactatcatcgtgattaaaatcttcacctagctcattatacatgcatggcttcatgggttgactttatcagataagtccaaaattgtatattatttgtaaactctctattagtgggaaatagtaactaatcatgacctcaattactctataaaaataaattgaatgcttcatgcaaataagggttagaatttcttaactcacaagcttgagaagagaat

SEQ ID NO: 308956 - DNA, 1306 bp, Cannabis indica
caatcaataatttttacagaatacatgcttcaaaaatatattaatcccatatatatttataaaataaaaatatttttttctagcctctgaatgaatgaactctaagtgtaggcataatttaccttagtccaggctttgccctagtgcctaataacattgttaacatttttccattataaattttaagttagaatatgttagacttgataaaatataggctgtctaagaaaatttctacttttgtgcccatttaggggtggactcagaaattttgtacaatgagggcaaaaatatttaaagggggattaaatctaaaaattatgacatgataaaaaataatttacaaaaagaaaatataatatagaagaaaaatacaaaaaagagagtataaatataaaaatatctgcaaaattaaattataattttaattttttttttaaaaaagggaatgataaataaaaagtttaatggttaaaaaaagaaaagttaaatattaaaattttaagataggcatatgtcactcctagtcttatgcattgtatgtatctattttttttattttttcttttgagggaattatgcattgtatgtatctaagctgatacaaattcatgacaaatggcatgtgtgaataaatgcttatccattataattaatgaatgtcaagggcatgcaattctttgaaatatgtttagtactataaatttatgttatatttaattgtgtatatatattttgtgaaaaacataataaatttgttaaatcaaaataaaacaaaattagatacacatttatataataagtaagatatatattgaaacaaaaataaacttgcctatcaaattgaatataattataccattatacactgataaaagaaattatcaaacaaactaatgaaacaaaatattcatgaaattggcacgtttataataagaaatacatatatattagaataattggcggcgaaattctcttatattttaattttatacccttaatttttagattatttttcttttatggcaaaattctcttaatttcacttttttttgcaaatttgaagcgcccactactaaaaaattaggtttttttgaaatttttaagcagtcggctagctattgtatattgttatcggtctcaataactgtcgcctattcagccgttgcaaaaccaggtagaataggcaatagtagaaatcgtcgacaaaaaaatttaccgacgagttaaaattataggttatagtacaggatcggccctaggcataggcgggctatataggcccatgcctagggcccacactttc

SEQ ID NO: 308957 - DNA, 1719 bp, Cannabis indica
aaaaagaaaaagagttatatctagtaagactcttatgcctgagttaaaggaaacatattataattaatcttattctaacataatataaaatatgtaatgaatcttttgattgatttgaaatgtattgtacatggatatttgtgagaattatatatatgtgatgatcatagattattggcactacacattttattctaataaatttctgattattaatataatttttgtttaataatcacatctaacgttctttgatttaatgatcagtggttaattaatgttaattagctgggacatattctttttttccaaatattaatatgcatgttcttcgcactacatgatcgtgttgttgttgaattctcttgttgatcacgtcatgcaatacatgtcatgcaagaatatctacatatattcatgtaaaataatgtgcggatatattaagataatatataatccctgatgtttataattggctggcaataacataaaatctattaaataaaattaacatgtaaagtaaagactaattaggttggggttttctaatttttttattattttctaaacacattccttctttcaacaaacttaacattacataagagttggcacattgagttgtgcaacccaacgagcacaaaattggggtttctaaattagattagagtatttccctattttttcaaatgtaaggttgggtttcgattctaaaagtttttgtgtagcttacataagcaaaaaaacaactttttaattaactcactaacaacttccaaagagaatcaagtcaacaaatactcagaaatagtgcaccgctcaaccttattgattctccacttctcctcactttttgactttgagtacttcttactatattaaattgtgaaacttttttaaaagtgtaatataactctccatattatccaaaaaaaaaattatatatattttattttatctttcttatacaagtatacttttttaaaaaaaaaaaaatctaataataaacaccctttaaatttgttcaaatagatgcatatattatttaattttatttcttttaagaaaaagtatgaaatcaatgccaagttttgatacattaattttacttataacccaaacatatataatggaacaccctaactagcatagacgtgttaacgtgatttgaaacatgctgtacacgttgctaatcaacgagtttaataaaaatcgtgattaattaaaattttcttatttaattaaaacttataatattacatacaaaatattttgaaatcccgtttacaaaatactttacaaaagatttctattcatttacaaaaatatttgtcgcccagcgactaacaacaaaagccctaatgtcccgaggatcgtacgctccaggcctaactgccccgacatgtacaatcttcatctgctcatcctcacggctcctgaactttagccttgcccttacctatacataaacatagcactgtgagtcgacagactcagtaagaaaagcataaatcatataacatacatatatcccggattatgatcagacgcccatacccctgcccataaccctaatccccgtgtcccacacggtactgagtctagaacgttcgtacgatgatactattgaccataatatcagtgctagtcatactctagccgtatcgatgtgatactgtcaaatagcatgaaagccaacatacatatctaatgtaatct

SEQ ID NO: 308958 - DNA, 3444 bp, Cannabis indica
aaactcaatcccttaaaatgttcctttgaggtcagctcaggtaattttcttggacttattattaatgctcgaggaaaagaagccaacccagagaaaatacaagccctccttgatatgaagtcaccaacaaaaacaaaggaagtacaaagcttaactggtgagagccgcactcagcagattcgtttcaaagtcgacgaacaagtgcgttcccttcttcaacatcctctgaggcaacaagaagtttgaatggatagaggaatgcaaaaattctttccaagaactaaaaagacaacttgcaaaatgtctcgtactctcgaaacccttagacggagaagaattagggatatacttggcaatcaccaaatacgctgtgagtgccgtgctgataagagaagaaaaataatgtccaacatcaagtctactatattagcaaatgacttgttgaagcagaaggtcagtatatcctgtaattgaaaagcttacttactgtttgatcttagccagaaggaagttaaggccctatttctaagctcaccctgttcgggtttataccaaccaacccttatgccaagttttgcaaaagcctgatgccttttgatggttactcaagtgggccatagagttgggtctatatgaaataatcttttaaccccgcacagtagttaaagggcaggctttggtagactttgtggtgaaatatacgtacaggcaaagaagaagatagttcaaaggatagccccaagtcagtatgggagtccttactagaagagaataaagaaaaacatatctagaaattacatgtggacagatcaactatcgatcagctttttggtgcgagaatcactctcatcacacctggaaggcaacctctacacaaagtaatcaaatttgggtttagagtctccaacaacaaagcagagtatgaagcactcatagctcggctaaatcttgctcgagaggtacacgttgaatacattgaagtctacagtgattcacagctggtggtaaatcaagtctcaggggagtacatggctcgtgcagagaagatgatggcttattttagcaagatctaggacttgcttgcacaattcaagggttacaccctcaagaaaattctgagggaagaaaacacaactgttgatgtcctggcacgccttgcgagcagcatagtgatagataagttcaacctagtcccaatccaattcttggaggaacccagcatcacctgtgcggaagaagtcaaaatgatagacacgatgccgaactggatgacacccatagcagcttacctcaatactagagaacttccaaacaattaaaaaaaaagactcgaaaaatgatgagaaaacttgcacgacacatcatagtagataatgtaatgtatagaaaagacttctccatgccactgctaagatatgtaacaaaagaagaagctacacggctcttgtccaaagtacacgaaggattttgtggtaatcatgttgtagggaaaattttatcaaagaaaatactaaggtaaggatatttttggcccactatatatgaaggaagatttaaagaaccacgtaaagaagtttgataagtgccagagattttcaaagatcccccgcggaccccccaatgagctaattcagattcaaagtccatggccctttgccatatgaggaatagacctgatcagatagttacccaagggcaaaggcggagtagtacatgcgcaatggattacttcactaagtggacagaagtcgagcccttggcaaccataacatctaagaaagtactagattttgtagtaaaaaatatcatatggattacttccgcacaagattgtctcggataacggtaagtaatttgatagccagatgttcatagatttatatacgacacatggaatcatcaagagtttctctacagtagcgcacaccctcaaacaaatgggcaagttgaagtagtcaacaagacactcaaagacaccataaaaaagcggcttgaatattttgttacacgtgtgactattgttttacacataataagtagatatttgaactttatttccagtataaactatttaaaatttttaaaatattacaagtgatcctaaataattacaatgtatataatattattgattaaaaaaatattaaaaaactctccttaatatcataatagatagaaaatgtaccgaaataattcttttagactatatataagttaaattttagtaacgaaagaaaaaaaggaaaactttagaaaataaaaaaataataaaaaaaaaaaaaaattatcatatttggtatagaaaaaaaaaaattatatagaaaaactacactttattaaaaaaaagtcatttcaacattaaaaaattatttttttttcaccaaaatttaactttcaaatgtaatattagggtgtactaatttacactataaattttcctcaatatatatgcaaaatgaattaccataaggatttatccgtagtcggccgttgaatattataagtagcaacatcttgagttgaaaagagccaccaaaaaggtttgtggtccaacttggcagcttgctatccataatatctttatacaaacaacaaacatatatatatatggagaagaagaaccttcctaggaagcagcttctcaaaatatgttcatttaatctggacacaaacaatcccccaaattataattttaattagtagtaccacttgcactatagtgacagtgacgcttttcaggatcattcattcacacctttttctattattatatatattatataataaattaaatatctatttatatattgtaagttaatccacttcacttgatctatagttataaatagatttatgtattatgtaacggcggcgattatgcactgagtttatatatacgacaatgactattgctatgtgttgactaattaattataagattcatatatgtctcattcttaagtttgaagtaatatataattaatttgataatatttcttgtatgatagttattaatatacaatgcgttacgttgaatataatattgcaatatatggactagcattgcatgcatttttatggatttaatttttaatgtgaaggtcgttttcgttgaaatcttgctaccaatccgaaaaagactaggaaaattattctcgatctaatcaatgtgtgttttttctaatttctaatatatgccaatgtatatgaaagaatattcagtctgagtcgggttggatgtgaatcgggttgttagggtttgatttgatatataataaatatgaggaacccaccacaagaattagcatttggtagggagagaacaagtaaaaatatttatttcatagaagaccatgattattttttttatatattagtaattaaataaaaaagtgtaaatctcatgttaatagggttttttttttttaattattttttacattt

SEQ ID NO: 308959 - DNA, 1750 bp, Cannabis indica
tttgttataatatgtgtggattggattggatcggttacttttacatgtcaatcaacatcaaatccgcacaagtgcggattttgaattttccaatccaatccaatccgcacaagtgcgaatatccgcactttgcggattggattggattggatcgtgcggattggattggatcggctattttatgaacacccctactgaaaataccaaaactcaaaatattcaagatagagataaaatctctctctctttatctttctttttaaatttaaatttaaatctattcgtggttaacctaagaatagaggagatcaattgctgtaaatagagaactcctccattctcttttctcatctggtccacacaaccaaaacagagaatggagagtctgaaaactttgctttcatcaatccttcaagtgttctccaagtgttctttaaatttaagttaatttcaaaaaatttcaaattttgtaaagttcaatttaaggattctagatctttttgaaaatcctttaactccattgatatgccctccaaaaatcaaaaataagactttcatatgagctatttgagttgaaattattcattccagcaaagtacagtttgtctaaattttgaggaaagatatcttaagatgaattaagttgatatttagcttatcaaagttgaggaaaactgagttgagagtaaatattcctagcgtgagaatatgaccgacacacaacccaattcattcatgcaaggctcacgatgccaaaatctaaagatctagacaaggcccgtggaggaaatattatagccactgagttactcactattactattgaaagcaaggacccaagagatcgagccttcgaactgtgacctcttgtctttagttccaatactcagaatcatgatgaactaatttgagatgagtattcactacctgacattgttgttagaaaacccagaattggatgtcctagtggttctcaaaatccttgttgtagcgcttggtcaagatttcatatgaatgtgtgtgcattcatgactctccaatcgtggtttgtcgattgctcattactttagggttttcccttattagataaatctgagtggttaccggattttttttacaatctttatcttttatcaactacagaattggcctattctaactcctcatgagatcaattttttgtgtgatctaaaaaggagtcccacccataaaaagaaaggcttctacgatctccattaacttagagtgtatattgaaaatatcactaagagtaactgtagactttcccacaacaagtaattctatacacccaaaattccctcaagacatgtcacgtttcaaaaggttgtccctttcaaaagacatcctccatttatcgacatgaaatagagaacaaatgttatgttgactagtattaacatatgggagagacatggaaagatgttatttactaatgataacctccatcgtgtatgtctgatagcgacttttcagcaagtgtatcttgatgctcactttgctaatgactcttggaaaattccccttgaagatgaagagagtgggcagagtggcactatcatcaggtccaaagagatgtcagaagatgatggagttggttttggtgatgaggctgaaattgaacctttgggtcacactaaagattgtgcacccagggataaaaattggctaaaattttaagtggtcggccataatatgtgggccccactagttacaattttgcaattttatt

SEQ ID NO: 308960 - DNA, 1174 bp, Cannabis indica
gtcggttttatacggttataatttctaaacggtcggttacggttttcataaaataaaaaccgtaaccgaccggtcggttataaaattttaaaaaccgaccataaccgaccgattttcacccctaatatatagcaataatataataatgatattttggaatatatatatgggggcgtgagaatgaaacagttcgagttatggttgttatattggagagactatatatctatatatctatctatataaatatatatagagagagtgatatatatatggaccagtgccgtacagcaatagactactactatagtttttctttcggcaatatttatataacacagatctgatttattccccatacccatcacatgattatgattatgatcatatgtatatctttttgagatttatatagtatcaatatatatgcaatattgttagttggtggtctctatctttattatattattgttattattattacttttctccttttcgaaaaatcccaacttatttcgtccacgttagctactttttctttttctttgtttcccataaaaggaaaacatcttcacccaaaagtcatatacagaatatgtgtttgggttattactcatctttctttggatcactacttcaccactacacacgttcataaaatgtagagataagtgcacatcatatatatatatacacattattgtatattaattgtgaatatgtatacctactaccaaactcaccacatatcattaattatagcttacatgactactatatattatatttatctaatcataattaacatttatggtcagttctcttatgtatctacatatatatcgaaaattctatagtacaatcctatgtatatatatatctgtcattttatacggtgttaatactatagttaacgtacattcataaatctaagataatttatattgttgaatcagttaaacgtaacaaaaaatcttacttttaattataataaaattagtgcgtgactaattatgtataatcaaatcataatttattataaataaatatatttttagtcataatatttattttaactaaaactaaattagttacaatttatatttaaatgaatattttagtcacaaataattttttattgtgattaaaaatcacatttagtaacaaaaaattt

SEQ ID NO: 308961 - DNA, 1181 bp, Cannabis indica
taaatatttttttacaaataacgttgatattgtaattaagaaagtatattaaaataagtcatttatgctaaatgacaataatgtaaattaaaaatgtgtattaattgtgtgtcaaatttaacacaatataacatatgtcaaatttagtaatacgtaagtaattggatgaagattacaaaaatatcaaatataagagatattcttaaaccccgactcaaccctatataaaattgaaaactaatgataaataataataaaaaaaataatatttatttcattattaccttcagaataaaggtagggggaatttattatttttggtgagaaggaaaaaaaagttggagacattttctacatatataattaagttgaaaaaaaacttaataaaagaaactaaaaaaaaattattcaagttgatacgattaccgaatttgtatgtgtttcttaagcaatgctctgattttgtttgttgttcttttatttttattttgtgacgacattgtttgactttatttagcaggatcatataaaacaaacataaacccaataataattataataattaattaatattatcatagaaaattattatgtttttaatgaatattataatagtattattagtttaagtattagtattaggttgtgagtgaggttagcttagctagatagctagacaaaaggtaatgccaacctctcaaattgatttaattaggtatataattacgcccccagtttctaactctggttttccacaattaatacaccgaccattttatttattattatttagttttggctttattattttaattcattacaacaatgaagaggagaccaaataaaggtatcttgtatgtttaaatttaattaattgatcattattttgaagaaacaaaaaaaaaaagaataaaaaaggatcactacagccatcttatatgatcaccttcaaaattacttaaactatcttcttttatttatacttcaattgtatagatttacaatttttcatatatttattattttaataatctttgctttatattgatgatgtttgatataagtgtatattaattaacattcgattcgaaatgtaatacgtacgtacacactacaatattttatttagtttattttttctttttttttttagttaaaaacttactataatttcttctcta

SEQ ID NO: 308962 - DNA, 1451 bp, Cannabis indica
acaacagtttttctaaaatagagaaactttaaaaaatttaaagaactgcactaaaaacgcgctataacaaatgctctaaatttcttctttattttaaaattctttaaaatatactatctatgttctatatttataaaatattattcattgctttaaatatattttattatttgttttgaattttaataattatttttatatattattacatatattaatattatatatttgaaattaataaattataacaaaattttaaaaaaaaattaagttttgatgatatattttaaaaaaattaatatataatgtaatataaagatgtgttgcaaaataaaaaaattaaaattttaataatatattttaaaaaataaaataaaaaattattaagagtgctctaacatctaccaaaatgcaaaacacttattttatttagttttataataaataaataaaaatagaaaataaataagacaattatgtcacgtggacaattaaccaattataataaaacacgtgtgtgaatctatgtattaaaagtgtacattaatgatgtttgtctttttctaaaaatataaatagtgttgctgttggatgataagttgatatgattatataatgtccaattcacattttgtctttttgactacttttttgtcttttattattattattattatttattaattaaaaaaaaaagtcaaagccgactaagtcgacattagttactgttttttctatttttttgttttgtttttttattattttctttctggaatgtcaatataataataattattataacaagttcaacttttttctactaaaaaatataataatagcttaaaaattgcattacggcatcatcataatcatcatctccttagagagctactccagattaaccaaagcgatactaatataactaacattttactatggatactaagtttttgtaaaatcatgaggagtacgttattttttttttttgtgttatgtagcaacaaaattattgggttatttattaaaaaaatgtgatatttttgaacaattattaaaatatgtgtatttttaattgttgcttttgttttaaggttttaggccattgcttaggctatcttagtaaagactcgaccctatttagtatgaagaatgaagaatggatggatagagtgagtaacatatgtattattattatttaagatcacttctttatttaatttgacattcctaagagctttataattaaattttatttgatttgacatttgtaagagcattaaaaattatatataaaaatattaaataatttataatattgaaaataaaatttaaatattttattacacgagtaattatttttttaatgtgtaataagcaattatttgaattaaaataccattttagaccctgtgttttgtaaaagttacagattggaccctgtgttttgttaa

SEQ ID NO: 308963 - DNA, 856 bp, Cannabis indica
aaaagaattgttttaaattaatgaaaaatgtgcacctaatttattgctatttttttaaaaaatgtacacctaattagtataacggttagagaagatgatatttgttagatatctaaaggcataattatgtaatattctttttcaagaaataaaaattaaaaaatcaaaacacaaaaagagagaaaaactacatttgttgtatttatttatcaaaataaaaataaaaatagtgagcgattaaagccaaaagcaatagccaacgccgaacgagttacagcccgtttcaaaatctgggtgcgtttttttacggtacaaacaatttatataacgggaaaaggacgagactttctctctctctaggcctctttctggcctggtctctcttctctatctaaagctcttactaatggatgccatggattcctatacctccaattcctatatttctgatgcttatcgccaattctgtggtaaatttcacttttttcttaagaaattttgtattttgtgttttgggattttggattttagatgagtggtttataactcttgttggttttataattatgggttgtttcgttgatcagggaacataggttagtgtggaaatttttgttcttattttgtgaaaaatggggtagtataattgttggttttaacaattttcaatgtcttggcttggatataggggttttagtctgtctgagtattagagagacatgaaatggggaatgggactgcatttttagcttttttttttatcaagaataataatctttctattaatcaaacaagccatttacaaccaaatagggactacacccacaaatttatatcaaaacttacaaacttttag

SEQ ID NO: 308964 - DNA, 1425 bp, Cannabis indica
agagagagagagagttgtcgttctcatacaaatttgtatgtgtgtgtactgcattgtgttaggtgtatatgtttgctagggttagggtaaaggtaagagtgaaagtagcagcccaatatttaaagcccatattgatatatatatatagattttttagttataaggccgtcccgggttaggtttattgggttgtaatttgcccaggccgtttccgacccattactcacgggttgttaattttttcaaaccaaataaacttcggcccataattatatgggctgatcggcccattttcggtctgggttggccgggttagtcggcccagcgcgttaaatgctcagccctaaaagccacatttagtcacaaaaaaaattatgttgtgactaaaatattgttctaaaagtagcagttttttgtagtgagactcaattaattgattttgtaaataaattagaattcaaaagtaggctatattttatttgagaattttcaccaagcttgggcaattttgaaaagaaaagagaaatagatgagataaatatatttaaattatattttatttgataattatctacaattattaaaatgaaattggtggtatttagataactagatgagataagtgctaaaatagaaaaatacactttagttttattagttcaaataaagtgacaaaaatctaactctaaagctgagggtttaggctttctaaaagttttagattggaatatagctactcttatcaaacatgtataggtaattgcttcaaagaaagacgatttatgggtcaaagtgtgagtcaaggctttaactaatccagtacaattttctctggatacgtacactatagcagaaggttatgaaatgatgctgaaacaagatgaacaaacatgctattggagcaaagaagtatggggaaggctaaatgtccctaaacatagctttgatgttgattgccatgttagataggctggaaaaaagggagaggctccacatgttcaacatagtgactgataatacttgtgtaagtgtaatatagggactgaaacatctcagcacctatttttcacttgcaacttctcacagcagtgtttacaatagataaaggattggctgggatggaatgttgtcaccttctccttccagaatatagcaagatggatagaaagagcaaaaagcaggtttaaaaaggatatgtttatgcagctgctactgcaggtctggtgtacatgatatggcagtgcaggaatgggaaaatttggaatgctgaaacagtaaaagctgaaagagtagtgtaacaagtctaggcagtagttaaaacaagaatctcttgtgtaaagccaaagaaaatagttcacatatactgtacatagagaatttgaggcctgctattcaggtggtcttaaattgtaaaaagttgtttgg

SEQ ID NO: 308965 - DNA, 949 bp, Cannabis indica
atttgttaaaaaataataataattatttatggacacataaatataaatcaagtcattttttataagtaggacacattttaaataaaaataattaattaaaattacttattgcataaaaaatatatcaaatttgtactatataaattatgtgtgcacattattactaaaaaaattatatatttttcatttaataaatataaaatatgttagaaactcgacttatacataaattatattgaataaataggattattatttgtcatttaaatctatatcaaatttgagtaaattaaatattttgatcttttcttaaatttttaaatgatactttgaacataagatagatgaatcttacaagtttaaaatagttgtgtggcacacattaattggtgactaacataaaagtttatctagaacaaaatttaatttaccatatcttaggtcattaaacatttatttacatttaaaacgttaacttttatggaaaattttggctcaaaattaagtatattaaccatccaataagtttggcaacataatgatatcattatataggggaatattctcatgatgattaggtacaatgatcaaaattacataacaaaaacatctaatgtgaataaaaataaaaataaagttttaccaaattaatataaggttaatgtcgattctttaaaaaatcagtcactatttggattgaatttatatggcgagttaagtataaactatacatcatcaaaatatgtataaatttatatttgtataaatgtaatgaaaaacgattaaatgattaaactatattcttttaaaaagaaaaataatctttttaaacaagagattaatatttttatattttttagaaagatccatttaaccgtttcaaaaaaaaaaaaaaaaaaaagaaaagaatacacttaaattaagataataattcttattatttttcctt

SEQ ID NO: 308966 - DNA, 1117 bp, Cannabis indica
atcatatacaataacctataactctactatcttattatttattgattttgtttaaaccacgtgaaataaacttcacctacttaaagtaaaaaagcaataaccctaatgaagctttcgctataaaaacgttgttcatctctcattgatttctcgtaccaaaaccaattaagcattaatagccagccatggcttctctctccctcgctctcactcacccgctggttataaccactactccatttgccccatttcctaaaaaacagaaccaattagttggctttgtacgtagattttcatgcaaagccagtagtccctccgagggtggcagtagcaaatttgataggagagacatgctgataggtcttggaggactgtacggggtagctggccttgcctcagatccgttggcctccgcaaccccaattgtagcacctgacttatcaaaatgccacaaactgaaggatccgcccgaatttccacctgttgatccagctgacgtcaagtgttgtgccccgtttagcaccaaaggggctattgacttcacaccatctcggccaagtggaaaatcacgaattcgcccagcggctcagtggcttcaccatgatgagttagccaagtacaagaaagccgtagagctcatgaaagccctccctgaggacgacccgagaaatttcattcaacaagccaaagttcactgtgcttattgtaatggagcttatgatcaagtcaaatctccgagcgatcagtacattcaagtccacaactcatggctcttctttccattccaccgttggtatttatactttcacgagaagatcttgggaaagcttataggcgatcccactttctctttaccattctggaactgggacgacccttctggctacaccattccaaccatattcgatgaccctacctcttctctttacgatgagaaccgaaaccaaactcacttgcctccaaccataatcgaccttaactacgcagaaactgacgatgggcacccctctaagcctccactaccagacccagaacagatagcctctaatcattataccatgtaccgccagatggtccattgcaaaatcggtacgctatttttcggcaacccttatcg

SEQ ID NO: 308967 - DNA, 1637 bp, Cannabis indica
aaaaaaaaattcttaaaaaaaattagatcctaagttatagttcttaggcacaggcttagcccaccttaactcaaactcgattctcttgttatattgcacaatctaaagtgcgatcccaagaactcacacacactttcccataactccatagccacttgtactcattgtcattcctacttattttattttaataaatagaacacaatacaaaaaaattagcatttgaagtctaaaattatcatttaactattattttatcaacatttttatgttttggttctatcatttatgttaacgatatttcataatagttattaaattaaaatttataacaccgaatacttaattatacgaatagtgttttatcttattttatttttcaaaaacaaatgcaggttttgtaagagaacaaattgggatcaatatcaatgaagaaggaacagaaatctctattagtggggagaggccagttaaggagttggtaatgtctggatggatgatgcagaagaaggaagtggagttgaaaggattcatcaaagtttttcgcataccggatggcgtaattttggatcgaatcaaagcgaaattcaacaaccaagaatctgttttaacaatagtaattccaaaatcaagtaaaggaattagaggtgttgggattgaagaagtgaaagaagaagaggttgttaataaagatgagactgatcatgccactactagtgaagaacaaactcataagatcatgccaagaactgaagaattgaaagttgaagaaaaaatagagggagcacatgatgtgtttgatgaaatgtctaaaagaaatgagacaagaattgaacctgagattataacaaatgaagaaacatttcaagaaattaagccaacacaaccattaccaagtgaagaagaagcaaagagaaaagagttacctgataaaagaggagacttgtgaagagggtttggaacctgttcatgtaatagaagaaaacaaagatgaagataaggaatgtagtagtagttgtggtggtgatgatgatgagtctgccatggtggaaaaacaggaagcaattgaagaaaagggtaaggataaagcaagtggtggaagttcaagaaggattaagttgtgtgttccttgtgtcatagcaggttctaccattattgtctccattgttgtgtttgcagttcattggatcagaaccaagaaaagagaggttcactaaacttagaattttaacttctttttttttcatctatttgagttgtgttaatttgaagcacatagttcttcatttgcaagtgatgaaatcaaattctcttatcaaaacttttggtacacaaataaatgtcaaggctaaaatatgaagaagggttgtacaccaaaactataatccaaggtttttttgccaggaaaagataatataataagttactaatttagtgtatagtttgtaactagttaccctttatatgttcttgttaataattatataattaattattataacatatacaatataatctctacataagaagaataccttattcaaaaataatttttaattttttataaaaaaataggtgtcaaattagttataaataagaataacctccaaattctaattagttatataatttttaag

SEQ ID NO: 308968 - DNA, 626 bp, Cannabis indica
gcttttttcacaattctattacaactatttttccccacagcacagttacaacttctttttcctacaacacagctacaactattttttcccacagcacagatgtattaattaaactggctctaaaatgagcacaaaaatattttataattttgtagaaataagagtttcaaaaagtggtaccgtgaaaatgaaatcagagagggtgagaatgtattgccacttatagggcacaataagtggagacgcatcgccacatggcccagtgaaatatgttctaatacatttgaacatttggtgatcaatttcttttagtttatacccattaataccaaaatggttttctaatagtaaattattattcgatgaacaatgattcatttcttttggccggatcggccagaatacctttgacttgttattcatgaatcaggcggtttggagaggactctcaactgttagttatgggatgtgtatgagtttgaattttaaggcacggtcttcaaaatattataaatagatccttaaggttcatttgtggataatatttttctatcaagaaagcgtacattgttaaaaaactgggaaaaaaaaaccttgataattctcaaagctatttccatgagagt

SEQ ID NO: 308969 - DNA, 2000 bp, Cannabis indica
gtgttctttataacttcatctaatgatgatgatttttttttaacatttatcattttaaaagaaaaaaaaaacatcataataataaacgttatatgtgattaagtttgctaatatgttggttttttttttagaaatgttcattaattaattattttcataagtttatttatttatttccttaaaaaaataaagtacttatttattttcttttaatttatgaatagtaaaaagtagacacagcagcattcgtttttggcaattatggccatgatcatgataagctcggcctcataatttttctttttctacttttgcttttaggtatcaactttcttaatgtttagtttttctttgaaatacttttttaatactgtcgagttttgcgttggactacaatattaagttgtgacataacattttgaacttttgaacttgagcttttttaacagtccaccaaccaaaagcaagtggtatattattactattattatagcagacaattaaaactgcttataatgatttcattttaaccgaaagacttgcttaatcaattacataaatttgcatggagccatgaagtaacagataaaattaaaagagtgagattccacctactaaaaagaagatactaataatactaagttatgtttacactaagttatggctcaaaaccagtcggtagagaagtaactcgaagagagaatgaatccaccaattgacacattttaatttcaatcatttcatcaattatgcagtgaaaaatgtttgaataaattatacatcgcttttgacttttttttttttcactttatttgacaataatcacaaagtatttgaactaatatatatattaatgaaaaataaacatgcatgcaatgatgaatgaccttaaagtagccgttcacattgtatccctaaccactcaatctttgtaactctctcttattacatctttatgatttttgttgtttgaatattagaaaattaagatgttgtttggtaatatgtttatttttaaattttttaattatgaaattaaaagattttttttttttgaaaaactaaaatctcttctataacaacttttacttttaattttaaaaataaaaaataaaagtagtattctctaaattttgtttttattttttgaatatatttatgtcaagttcgggtccaggctcgggcctggggcccgaagctcgggtgtgggtctagatttgggcccgcgatcggggtccgactcggaggcctagtctaggtttggggcagggttcaggtttggggtcaggtgcggggcgagggtcgaggcccacattcaagtcaggctctaagtcgggagccgaggcaagagccggagtgcaagttcggtttagcgtcagggtccgagagtgacggtcatggtccgggtccgggtctgaatcaagttttaggtctagggccttggtttgggatcggggcccgagctagggttgggtctgagtttggatccaggttcggatctgggttcgagttcggggttgggtccagggtcgaggttcgagtccgcatttgggtctgtgtccaaggctaaattagggtttgggtctggaattttggtccaggtgtcaatgtccaagttggggtcggattccaaaatattgatttgaaaaaaaaaattgtttaataaaattttgaaagtgattttttttgttttaatttttttttattctcaattaaaaattaaaaaatagaaatagtttacagaacatatttttagaaatattttcacttttctaattaaaaaaatattacgaaatgtatcctaaatgggaaagaaaactgataaaaaataattatctaaatcaaaaaatatatttcacgcaacaataaacatttaatatcttattaaattttctacattttctactctactttttcctaagttccatgaataaagaaacctacatgaagaaaataaaatgaagtaactgttagaattattttttttctaatattttgtc

SEQ ID NO: 308970 - DNA, 714 bp, Cannabis indica
aatattatttaaataaataataaatattaaaatattttaaaattattaaaacctaaaaatcttccatgcaagtataaataacatacaacaggttattaaagatagattaatcgtgattaggccattaatttggtactactaatttgtaaatgtatttagatgcaatatataaatctcactaatttagccaaataaaaaaaaacttaaaaatatgtttataagttttttaaatcaaactatgatacttaatcaaaattaaaccacaagatcatatttttttttttcaagaaccatattcttgctttcttctttgataaaaaaaataaaaacgtgaaatttcattgttttctaaactagattgtataacaaaaactatacaaatcattcaaactaccgatctaaaattaacctacccacaaaatcaaattacttaaactttcaaactcaaatttaaacaacaaaaataattagattcaaaataatattacacaataacaactaattagtcaaactaaattgaagaacactaaaaacaactcaagaacacaaaatatcagatctaagttctgaaattcaaaacacaaataaacattcttagatttgatgttaggatttataaaacacttaagaaatatataaatcacagatccaaatatattcctaaaagtgctttaatataaaaaaccctaaatcataaatctataaagcctttgc

SEQ ID NO: 308971 - DNA, 1629 bp, Cannabis indica
agagagagagagtatgatgtttgggaggttgtgggtggtgataaggacttgtcatgtttgtatcttagaccaccattttggtccatagttaaatcattatattttagactcctaaatcaatgtatgcatcgcatccatcctaatccaagccttaacattaatatttgcttttattaaagggataattaaaaaaaaaatacataaacaaccaaaaataaattacaaaaatacagtttgtacataattttttagattttatttgcacgaaatacgatcttttggtgtatttttatgttatactcttgttattttgttatttatatattattttttatgttgttttgatgtaattttcttattattttcatgtaattttcttcttgttttctcgtgtttatagaagtaaaaatgtaaaaaaaaattgaacctaaaaatataaaaaattagtgtaatatgtaattacccctttattaaatatatatgttcaataattttttgggggatctagttcaatagtataacactcctcaaaaataggtgtattgatacaatttcattgtgtttctaaatataaatattctcaattgttttatataatggtgtatattgtagttattcaaaatataaagttttgagaaatttaaaataatttactgttgacgctgaaaagcggccaactctatattgtttaataagcaatagtggccacagaaaaaaaaaaaaacaaaaaataaagaaaacactaccaaattatagtagttcacttttcatatcgcgattgtaatagagctacgtctacttcgagcttttatatcgcaaaaaacaaattagtctcacaaagagaactagagaaaaaatgactaagtctagcttaacctcacaatttctacagagcgaaacaataaggagagaggagctctgaccttgtagagagaatggagagtgaaaagggaattaggaaaaatttgcatgaaacttcccaaaaaatttctgcgattcgcatctgagctcgcgaactgattttgaggcccaaaacatcaaaatcatgggaagaacattagacaagcttagacccatcttgaaaagagctttccaatgccacttgaaccgcgtcatctaaaaaaattcagtgatttatggctaaaatattgagtggtgtgcagtgttgaaaaattggcaaaattgatttgcgggcaactaggttgccgcaaatgtcagcctggccacctaaaacttacaatttttggaatttttttgcatattttgagatgcaaaatgatgtgaaagcacttcttagttcattctttgactccggtgaagttgttcaccgtctcttggcaattttactcgatgcacggaagagatgtttgagtgatcactggtgacgactacgtgatgactgggtgatcactagtgtgcgtgggtgtcggtggacttgtgcatgatacatgtacatgagatattgacttgtgggagcatctaaatcttattttagtggtaaaacaagaccaatgctcgtgatggatctgtcgtatgatagacagaacattgagccccaagttgaatgtcaatttgggcgcccagtgttggaagttattttaccaggaacttagatctactcacaagtat

SEQ ID NO: 308972 - DNA, 589 bp, Cannabis indica
tttaatatgaaatagagaatcagacttttgattatttattgttaagagtgctctaagcttaaattaatatatttatgataagtaatgttcaaagcaactgagatatatttttcttattaacatgatagaaaatatgagtaaattaaaaaactgtcagattattaatcacaagattataaccgttattagaaatatatatatatatatatatttactcaatttatgtattggatttgtatagcttgttcaactagtggagtgatatatggattggtggcattttttatcggaataccttgcataatgtcgtgcacctatcgtacaaagctgaggaacaagtttgggttgctggagacacctgcacctgattgggttacccattttctttgtgattgttgtgctatatgccaagaatatagggagcttcaaatcagaggctttgacccttcaattggtaagtaattatacataatcatctatagactacaactctctcctatcaataatttgaattacaattcaccatatatgatcatactgtccttaaatgttcttctttataatctagaacaagtatctaagataataa

SEQ ID NO: 308973 - DNA, 1424 bp, Cannabis indica
ttttcaaaattgagatctcgctatatactgaaccctgttatcaaacatttctagtgaggaattcttcaagattgtctccgagacctaaatatggtaagttcctacttttttaattttaagttttctgcctatttttctttcttttgctcttgattcttgttttagacattttgtaatagtttaatttatgtaaattttgatctttcctagttttagaacctctgaattttagtttcatattttacagaacatagtagaattttttagggaaaaatttccttattttgcaaagaatatgaaacccaaaatttttggaacaagaggttctatttttaccaattttgccttttgaactaacacctaaaattttgaaaacaaaacttgaagaaaatgatcaataaaattaggggacatacaaatggcttaaatagggtaaacatgtctgctcagtataggtgttttattgacgaggttattagggaaataactgtattttgcgagagcagcttagctcgagttgcccttgcttattaagtatcccttagccaaacctttatttttaccctctgttaatgttgttttttcacatagtgttttaaacttctagattatggctcattcaaaacaacgtaattctaggataccccgaaattcatcaatcaaatttgaggttgatttttttcaatctaaagttacttctattgccccttatgttggtgagttccttagattatgcactataaattatggcaataactttgtatgttggtcaaaacccaatgagaggatttattatcctcctaatttttttaatgaggatgaagagtgtagcacgaatggttcttctaaaactagggcttggagtttagagtatatacgagtcgaggctatctttccactgaaggattatttcaaaaactactgtgattatgtatgtgttccccatttttaagtgatcctaaatgggtacaagattttttgcttctataaggtccatgtaccacatgatgggatgaaaaggacccgatcaatacaaaattacgagcttgtacaccaagaaagcgacttcaccagggaaaactgctgtgggggatcctttaatcttggcactttttttgatgagcataagattattgttaatcttcccaacaaaaaataattcaatgatcaattcctctggatcactaggctttacctgtgtaatgaccgcatactcataatatggactagtagggcaattagcattaattatttatattttatgattttatatgattatatatgttgtgggccctaatttaaagaaatatgcattagaattataatttctcaattttgagatttttattaaactataagtgtattatatatgctatatgtgactaaatgtatattcttgtttattgtgtcgtcagcacagtgga

SEQ ID NO: 308974 - DNA, 1446 bp, Cannabis indica
tttaataattattattgtaaaaaattactgatcatttgacatcatctcataataatattaagattaaatatattttagaaattgtgttttgtaaaaattatcgattggatcgtctgttttattaaataacaatttagaccttgttttttttttttaaataatggtacaaaataaatccagattttaatttttacaaaattaacttaataataacatgactccgaaggtattatgataagaatgattactattatgctcatatttcgaacaacaatatgatcacgatacgtgtacaagagttagaaaatgaaccagttcgaatattgaaaattaaatacgttatttatatcgccttagaaaatactagtcacgattataaattgaaatctttctttaggtgactaaggataagtcaaagtaatagctcactagtagaccaacgagattaataacagtcatctctgaaataataaagtacagaaaaaataagacaaagaactttattggtcgaacaaaacgatataaaggagttcgacctaaggagcataaacgatataatttgaaaaacttacttaaaagcttacataagaattatccaaaatttcatcatggatgaacaattcgagaagaatgtctaaatatttatcttgcatatgtcatgtcgtcactgtacaacgcgagacacatgacaaatacatcaatatgggctcagaaataatatggatatatgaaagaggaaaaatatatctattgcaccaaaagtgccatgaacgattttatatttaagtcttaccttaatggttattaaggttgagtcaaaagttaattgttagttggaaaggcaacgataacagaggtagtaaatatcatgattcatctcaagcgtaactaaatacaagataaatgtgttctaataaagaaatgcaaatatatgtgaagacgagacgagccattacaaattaagaacatgtataatgcgagactgagacaaattcgcatagaaatttatttaagtaatttacaagcaacaccttacaagtgggtatctaggtaaaataaccgtatatatgataaggtcaaataaatagttatttggtagttatacatattatcaatacgtggtaataaaataaaatgtggagattgaccacgttttatgaacagatgtgaagataagaacgagggaaataattatcacccttaaaacattataaataggagaagaattttcttccaaagggacgactaattttaaaaatacaaagatccttacgatcaatacttgtatgatacttgtactctatatatgttagagagtcccacattgtaaatgtgaggaaatataatagaatatataagaggaatgagctactcctagatggaatcccgttcaccttatatcccaaattctaacatgatatcagagcaaaaataaacaaaaaaaaa

SEQ ID NO: 308975 - DNA, 1085 bp, Cannabis indica
aagaatatgtaagcataaaaaatcaaatttccctaatgaattcatacaacgtggtcccaaattatattttcagaaaaaaaattgtaaacataaaaaaattctaagaaccttaattttatttttgtttttttaggggccacttcatttatggaaattgatgagtgtgacaagtgagaaattatttcagagacaaaattaacaatagtgcttacgcactccattacgtaagcaagttttaaatactactatgaaattgtgttttaaaataagtgttttttataatttttattaaaattagataagtgaaatttaaaattaaattaaaatatcttgttattcatctcgagtattttaactattttaattcacgtgatagatgtaggttagttgataaatctgtaattaaatctaccgaccaacccatattcatcacataaattgaatggtcgagatgcttagaatgaatgattttattgtaagttaaattacatactaggcaccataaataccatttttaacatttctcaacaaaaatacatttattacaaattgcgagtctttttttgaaagaaagcgttcattagatagataagaaattagatctctcagtcgttagataatcgactaaaccggttatggacaaaaacccatttagctacattatgagccataaagttgcaagatcttttaatattacaaaacaaacagctaacaaaggaaaaaatgattttttgatacaataaagaatagttctcaatttcctatctaaattcctcaccgttgatagaattaattaccatcttaaaatcactttccaacaaaataaacttgcagccgtagtccttcgcaacttcaagagccaacaaattacgagtcacaacaaactttttaaaacaataatctttcaatagttccatacaaatcataacatataaattggaaaaagtaggcaaaagtcatgcagtaaaaaatgtcaatcttcattttttttttgtagattaatgttagatgatgcagtatttataattataaaaaataaacacacattatctaaaaaaataatctttttttttttataatttttt

SEQ ID NO: 308976 - DNA, 1729 bp, Cannabis indica
tttttctaacataacattccttcgactctcctctcctctgacttctgcgaatacttcacttaattgaaggtaggtaggggctgccttccaataatccccccctcacctcatcaaactcaacattgagaccagccaagaacttatagattttgggttttctctaattgttttcttgtgatgtttgccatcttcaacaaatttccactcataggtatcgaaaagatctaagtcttgccggattctttttaaagaattaaagtacttcgtaactctggcctcctcttgctttattctccaagtttgatatttaacccgaaaatttgagattgattttcatggtttggatacatttcaattacgttgtcccatagttcctttgatgtgggatagcacatattattggagctgatctcttcttccatagagttaacaagccagaccatcaccatagttttttcaacatcccaagtttcatagattgaatcaggttctgctggagccttcttttcaccagtcaaatatttcatttttcctcaacctttcatatacatctttaccgattgatagcatcttacaaggttttctccattcaagtgaatggtagtgatatggacaaagtgagactaggtagatttggtagaaagtaaggtggaattggtttggatggtgttttttttgttgtacctgactcggagtctgacatggtgcgattagggttgagtacgattttttcttttctttttttggctctgataccgagtcgacagatttagggtaataattttctgtaatttttatttctactacccaacaatgtatataacatttacaataatccctataaagggaagcaaattaaataataattttcgtttttatttttgcttcctgttttgtttactatggttttccttcgccttaagtgaggcttgcaatatatttcagggggaggccagtctcagacaagtggcccctttctcttttttccaaaaaataaaataaaattaagacacattgaatctctcaacttattctctaaaaatatggtacaataaaatcagagttattattacaggtatacaatatattaataaaaaaactgattttccaacattgtaacatttcgaacaagattggcatttccctattcattaaacatctcctaagcttaaagttccagcttgtgtccatgctacttttatccctgtctctgatcatcaattccttaatgcaaacattttgaaccatggatattactgctaagtccgaaaatgaactcttcaaagaagaattcccattgcaaacatcttcccaaaatcgaattcgacccccctccctactttgaagtaaatcatttgcagaaactcatcatagaagtctaatatacctttccaaggtcctttagatgtcaatctctcaaccctttttatgtcccataagttgttcgcagtagcggtggcggcttctaataactttgtcccataaagaattgccttcgagcaggtatcttcataacacttcatgagcagtcctttatttctcatatccaaccttccaaccaatgccctaacctccctcaaatctaggtctacacacggcttcccatgctaccaaatggttgcctcccaaaaggtcaccgccatctcaaagaaagtctcgcatcaacttttccatataattaattaccacctttcatgctttgaaaagtgtgagttaataagtgggcagg

SEQ ID NO: 308977 - DNA, 3109 bp, Cannabis indica
agtcttcttgatccactagaggcgaagccaccctaggactgtgtctgtttacttgtttctgcttttactttgctgatgtggatatttgtgtgcataagggactggttataagtggaatttactcaacacctattaatctttttgactatagtatttacaacatacactttttgttcccaaaaacaaacattccttgcttcccatatatgtattctatacacagaagcattaatactaatagcagccacaccataacttccttacaaaaattcactacaaaaaacagttacttttagtaacaattttttagtcacaacataaattttttgttactaaatgtgacttttaatcacaataaaatattatttgtaactaaaatatagtatttagacacaaattgtcactaatttagttttagtcacattaataatttgtaatttttgtgattaatatttttagttacaaacattttagtcacaacatagaaatgatgatttgtaattagtcacaattattttatttttaaccacaaattttgttgtaattagtcacctattttggaaattctaactataacacctccgttctaagtttgtattggccatactcctacagattaatagctcttgtacacgagtacttcactttgattacttcttgaaatgaagactaacttgtaaatcaacacaagtatttctagcatattttttcttcactcgcatgcttcttaggaaaattttccaagagattacttatcttaagattactccaagtcagcaagcacgcttaattttggtgttcttaagtaatgagctctcgaaaacaagatgcaatattttgatataggtagtacccatcaattcatttaagctctcttaaaatgtagtctcattccaacacagttttaaaatcatcacacttgacattctctaaataatgtaatatcgcatagcttagataatatttctctttacagatcacaaaacttgctactgactgtcacacaaaccctacaagccctttgcattggttttgcagagacactaacatactatttgcatccattttctacctacacaagtgggttgcggtagacattcaagcaagatcaatatcacttccttttattttattttatttttatattttttcaatttaattgaataatcatttgtaattttataataaatataataattatttgtgtttcttggaaatggaataattatgtgttttcaaattattatcattactattttaattaaaaattagataaattccaccaaataaattggactccaacaccgaatactattaattattgggggcctacgtacttctacatgtacaaaatctagaatcgttctagctatctaaaattaattattacttgttcagtacatatagtcaatacaactcatcattttatttatttatttatttttgagagaaacaactcatcattttattgttagtatttttatataaattatatatttatatatataaattcaaagttgtactgtacaaaaaaaatcaggtataattaattactctatcatgaatcatgaaattcaaatatggttaaaaaattctttaacttagtgtttcatgtcgtccagcatgtacaatataagtacaatatacaaagactatttatagtatagaggtttataatgtgtgtacacagatcatgatgaagtttgtacaccaacaccacaaggactatagtctatatatatatatatatgtataattttgtatagtaatactacaaatgaatcactattgttttatttattttttaaaaaatataccatatagtattcaatatctaattcattagcatcaagactagaaccacaaaaaatgtgatttattttttaaaatattttgatgactatattaagagattaaaccaaataattaatggttataaaatttgaattatatagaacgaagatgcatgtattatataattgtgaccccaatatataaaagcacacaaagttacattattaatatatactcacacaattgagcataatgaattttcaagttacttcttccaagacaaccgtgaattgatatggaacaatcacttctttcttaggaaacagggaaaatagtgagagagataaactcaactattcttacactggtgctcaaggtcaaatgccccaatacagttaaagattttaggccaatagcttattgcaatgtcatttataagataaattactgtgttctagaatcaaaactatccttcctgatctggtttcaaagaatcaagaaggttttattcaagggaggttcataggacatgatattatgatatgccaagaccttgtgaggcattatgggagaaagtctaacaaagttagttgcatgatcaagctaaatctatagaaagcctaccatcgagtgagatttttttagaggagatgctttatggtctacattttcccattgcattcattaaactggttatgaattgtgtgagaactcctaaattctctctcatgtttaatggatccattcatggtttctttgaagctaagaggtgccttagacaatgggatccaatgtcccctttgctatttgtcttagggatggaatacttatccaggattttggggaaaattagagcaaaggaggatttttattttcatgatatgtgtactgagctcaagcttaaccatcttgcttttgcaggtgatatcctactgtcctgcaagggtgatttcagaagtgtgtattacttgctacaaggtctcaaactgttctcaatgacttcaggcctgcaaccaaacccacacaaatctacaatttattatagtaacatgctaaaggaagatgtaaatcgaatctttgaggcctctggtttcaccgtgcaggaaatgcaattcacttatgtgacagtcagtagtcccgtgatccgtaaagggaaacaccgggtaagctgtgcaatcccacaccgcctggggaaggtcaagtgggatgattctgagactgtgtaggtatgggactacacagttgaagagagcttaaatggattgattggtactacctatgtcaacaaggtgcatcttgtttttcggtagcccat

SEQ ID NO: 308978 - DNA, 702 bp, Cannabis indica
agttgttaatataagataaattaatctatttagataacatttatcttttagtagaaataatatatttttcttggggagtataaattgatacatatggctgatggctgtagttataggatgtgtttttgagtaactaaattcaggatttctttaaaaaaaacaaaaatcaggatattgtatgatacatatgattgtttgtttcgatatataaatttttaagaggattttcaattggtgttcaacattttttacaaatgaggctttacgattagttagtaatttttttaaaaaattatttttttaagttatataataatcgattcttaattacatatgataattaagaaaaaaataagacaacaataatatatgttaacaattctttatttttgacgtatatatatttggaattgatgcgtaccattcacatttataccaccttgatgaaaacttagttactctactgcaaatacttaaagttgctttaacttgtacggaaatactctacctaaataatgaaagaaatgtaaactaatagtgataatgtaaattaatgagcaattaatactccaatttgttaattagagtgtactgtaattgttatcagagaaatgctaaagggtactgttggtgcttagcactctcctacgtgtcaatatcgctattggtgcaattaaatatcaggtcccatatagttttata

SEQ ID NO: 308979 - DNA, 1420 bp, Cannabis indica
tcaaaaatattatagacattatataataaattttgtacctttaattaatcaatttatattatatttgtttgttaatttgctatttttcagaacatatatagacgagtcttgacttagggctaaagtcatcagacggacctaattaattaatagctagccacacacaatgatatatatacatatataatttgctaacagaaagctaataattatcaccatcatgtaatgttgtacaaagtattatcacacaaataaatatatttatgaactgtatatatataacgttctttagaatattcaagtgttataataataagatgtgtggactaattattattacttaggatgctttaaaaaatttctatgtacatattcccacaaatacaatatgcttttctagttatcagaaaaatcgatggaataataatcaacaatttgattgatttgttataataatataattatatatatatgcacacgcacaaatgcaggatcaaagataaaacaacattcgtggctcatgtttatgacaacggttatctaccaaaggaaggaagaacaagtaattaaatttatttacttaattaatgcatacatacattaattctttttcttttaacctttctttgtttatttatttataatatatattctattcaagttagaaacataataacaaactcttgtttttctctttgtttgcagtttatcttggtaagtagttttgcatgatcaaccttatatatatactatcaagcaaggaagtatatatatacatatatatatatttataatataaaggatgtatacttattttatatcaatatatatataattttatatattgtagatagtaaatttataataccaaaaaataaggttcaaatacttatgttagtttatacgtatatagaataaagtgttgtaaattaattatataatgaatttcttgaagaattataaaattttttaaatagatacaatatcatcaaaaaaaataaaattaaaaacttaatgccaaatatttatatatttataaatcataatctttaattacataaaaaattaactatttggagtggaatgagcagggagattcgacagggaagaaaatgcagccagagctcatgatttggtctctttgaagttttggggaacttcagtgcaaactaattttccggtatatatgttattaatttgaaccaatataaaaaaaatggtatgaattaatttatttaaattttcaataatcaatataattgaagaataaatagtaataataaaaaaatgatgaatccaattattattttttttaagaaaattatgccatatactgtttttttaatttttttcttttcagatttatggtttgaatttctaaagtggttgcagcgctagttgcaataggggtttctatacg

SEQ ID NO: 308980 - DNA, 705 bp, Cannabis indica
gccttcgcctttcctttacctacacatataaacaatatctattagttagcagtctcaataacaaaagaacaaaacatatcacatagtattaacatgtatgtagacgcacatacaactatttacaatgcttcaaatgcatcaagaatgttcctaacagaagtacgacccttctaccacctacactaagtactcctctcgcacaagttttggcaggattaaattgtacatcaagtaccaatgagtgttgtattacatgcactacgtactcgtcctgtactagtgttggtaacacaatattgtaacctttaaacatcatatactgtaccagtgcactcagtaccgcaaccatactagtttcagtagtatgcaaattacataatacaacatgcatatagtaaacatacgcatacacatatatgtatacatattttataataatcctacctcgtttcctgattcaagtgtttcgatcaacttaaatagaaattcacacgctacacacggaggccctgtgtcacatttatgttaaataattaagtgtttactctagactacttttttaatacccatacagaacctagtgtttttctacaaagctataacccccaatccagaagccccatttcgtaaactcccttctggaagctgttgggttttatgccttaaataaaactcatttcatataatcagatttacttgttaata

SEQ ID NO: 308981 - DNA, 1381 bp, Cannabis indica
taacattaataatgttatctttttatttttttcagtgctcaacattttcaatttaaacgaagaataagaaaaaaaaaaaaaaattctacataatctttacaaaataaagaaaagctcaaaacattagtttctcgactttatttttcaaaatatattaaaaaaaaaagaaagaaaaaaaaaactcacgtttttaacatcttccttgttgattaggccgtctatatctttgtccaccctgcatccattacatttatataatttatattcttttaaataaaacaattaaataaaaaattattctgccagtgacgaatttatagttatatggaccaaaaaaaagtatctataattctaaatttcttatataataatgtttaattatttagaatatgaaaaattaaaataatttttttttaaataacttactatactgatgaaaatatatatagtttaaaagacaatctgaaatacatgcagtacatgcatgcatgtgttgcctttctaaggaatgaactataattgtccagaatatatataattgcatttttttttcttgacaatattaaagaggatttatacatagagagaccttgaaaacaaaggacagtactattggattgaattcgttatatataaaagtagggtaaatacaattttggaccatttgttttgcaaaattattaattggactcttttaaatgacaaagtagactacgtattttcaaaattgcactcaattatttttttgtcaaaataaaacttaacaattatctaatttagaaattttataacaaaactggtcatattaatagtatctattcatattagaaattatcttaaaattggttatattaaaaaataaaattgttgaaaattaagctcaaggtcttatttgtacaattttggaaaatacatggtccattttatcatttaacaaaacagatagtccaattaataacttttacaaaataaaatgtccaaaatagtatttatcgttatgtttatatcaccgagaataaaaattaaagagataatattatatcaattacttaaaatgattttttttttttgggaaagaattacttaaaatgatcactatgtacaaatataaatttgaatgaggattatcaatgttgtaataaagtaataataataaattgataaatataattaatcataagttaaatatttgattaattatattatttcacaatatttaaagttattatttgaaaattttgatataaaaataatgagatattttcaaataagaacaatgataaaattattcaatcatgaaaatgaaataaagatatattaaaacaatgttactactcgaaaattaaaaacaatatattcttacaagtaaactatataccat

SEQ ID NO: 308982 - DNA, 2116 bp, Cannabis indica
gttgagagcataataggaaggactagcagccctcaaattttttcatctctaagtccacgaataactgcattccattttctgatgtgttgcgtagaaacaaaaaagtttgaaatgggactgaggaatgtgaggattccatctagaagttcaaggagcacttgactaaagctcctatcatgtagaagtcggtagaaggagaagcattatacctttattttgagtgtatggtgatgccataagtgcgaccttagtgcgagaagaaggaaaggtccagttgtcggtatgttatataagcaaaagaatacttggtgtggaatctaagtatccaatgatagagagattgacctttttcttattatttacctccagaaagttaagacattactttcaagctcatgccatcaaggtactgaccagccatcctctccgccaagagcttcaaaaattggagtcttttgatagataattaaaaggaataattacataaaaaatacaaaaattcaaaaatattatccatatacccttacaaggctacccctacatttttacgtttaatattattttaattacactaatacctcttacacatgttatactaacttcacacactatctatttttcctctttttctatcatttttattcagtttcatttcagcttttattgtacaagaaacagagtttttttatggaaaaaaaagtacatgaaacttagttggtcaacaatgttatataactataaagatatggatgtatacatcataataaaataatagaattataatgagcatatatagtacataggaaaacaaagatttatattaagaatatattaaagatcatattaagttacccaaaattataaaaataagatttattatccttttactaaataactaaaagttaactttcaacttcgtaagatttaattttcagctaaattaaatattttcatggatcagtatttattgtagttctctattaaacagtaaattttagtacatgcacaatttctatatttttttatttttattaacaacaaattttgagagatttaaatgaaaaacaaaaaaatccaaaaaatagtggagtttcaaaacccacgatcaaaatccttttttaataaaaaaaaaaaaactgtgatttcgtccatcttcctcaactgccttcctccatcatctaacaatatttttcaaattttttcttctttttcttttctataaattaccaatacttggtcttcgtcttccctatcaccattgtttaaaaaacataaaaacataaaaaaaaaaaaatgggtgttaaactctcttgctaaaaactctaaaggcaaatgacctattattgaagatgatgattcagactttgctccacctatccaaaaaagggaagaacaaagctaatgagagtctgaaggttttcttccagttcttttatcttcacatcactaactttgtcgtacaaaaagatttcccattaaatacgcgctccctacaagcgtgtgttgtctacgaactcattggaaaacatgacactcgtgcaatgccaatacaccctgtataagactttttgaactttcaattactaaaggccaaatataaaggatgcttctgtgttcacagaagtcgcctacgcgtcgtaggcacacctcaattttctagaagaagcctacaagcttctgccagtcctgaaagcttgggggtaaatgttatccatgtttcttgacaagggacatgtggcataaagtgaagagtatcggtgtaagccattgttaattaagtccccttaattagttaaggccaagacgggattaagctaaaaaattacttggagttttgtctcatgacataccatcatacagggttcgaaggccttactattccttcgaaagtcagaggtggccaagcataatatatgtctaagaggaatttagagggctcttgaggagtgtagcactaacaccattcacctagacaaagtcgaacgtctaccataaagagatatccagatcgcccaaacgataattatgctttttctgacacagaatcagatcttgtcccttgtgtcaggccatggtattgtgtccaccccacctctaaacatacctttttgcctga

SEQ ID NO: 308983 - DNA, 1463 bp, Cannabis indica
tatgttaaatttaatattaaaatgcataaagagagtagacacaattattgtaggaaattaataatataatagattcaaacgtggaaagctttataggtaagggcaaatgcatttagaggtacgtgaatctaaatcgatacccacattttgtctcaattagaataatacttctaattaagcttaattaagctcatcacactcttcattctacaaaattctagcatctatatataaatatataaagaaggcaaatcttttgttcaaaaaaaaagaaaccaaatcttcttatttgaaaataaattcataaataattaaatataaaataacaaatcatttctaaagattctatatacctttttgataattagtttgcttagggcctatgcaaatattaaagagttaaaattctagtattattgtttgttaaaaaaaaaagtagttaatacaatgaatgatggttaaaaaaagttaatacaatgataaatatatttttcttttcgtttaatattgagtatcagtgatatctagcactttttaaacatgtagtcttatgattggataatgcgtgttagacactactagcgctttttagtcatttttttagatttttttttttctaattaaataatatatttactaaataattttgatgttaattacttatctagaaaatgaaaatataatttaaattattgtgtaaaaatatattaagcttttctattataaatgtataattaattatcaataaagtgtttgggtttgtaagatagaaaatattggacacttccaaaatatttggaatcattatcacacagtactgcgtgctctcaatatatatatattttcccaaacaatttggaaattgattaaagtatatatgagagtgatataaattgcattattacaactaataatgactaaacattaaaataaataaataatatagttttgtaccaattctttaaaaaaaaaaaaaaaaactaatatgtgatgttatattggccaatttttatatttatgatgttataaaagaccagctcaataaatcataggtagatttaaatattaatcatctattctgtaaaaaaaatatctatacaatttgtaatttgtataattaatatttaaatcatgtattgcattatttaatagaaaataagtatagtcaccataaaacctatactttttacacttttttttttcttatgtttatttgaggtattgcttatgctttttatatataattattcttcaaaggaagaactccaagaatcaatctagaattggattcgtacaaagagaaaataaataataataaaatttttggtgggcaacatgtaatatttgtgattcgatctcttatttaaatttgtatctagctaggtcaccataaaaatatttacgatttcaaattacaagtatcaaaatgaacattactgaaaaacgtattaaaaatgtaaata

SEQ ID NO: 308984 - DNA, 1914 bp, Cannabis indica
gaagatttgcaggattttgcaactgacacaaggaaaatcgatataacccgttaaagaaacagaggcttgtacggtcccgcgttagaggcaacggcgaagccaaaccacacatgtccatcaaggaatctacgataacactttataggatatcatagccctggtggtgaggcaaggcatatgggaaagactcaaatgtgagttggttccttcagctccactaccacgcactatgttaagcttttgttagcctcaagcctttgatagagtttttggatggtaacaactcgtggcgtaaacgaattacagcacactgaatctgactcggctaagaataataaatttaggaatggaaatttgggcttttttcgcccgacacagaacggtctttggcccgtgacaatcggacttaattcgagtcattcacccgatccggcccggcccgattaaatccctaaataaaaaatctgagaatttcatatacagattttcatggtctttctttctctctgttacttgcatcgtagataaattttctgcttgtattgcggttgctgtaagctcaaaatctctttctctctattccaaactttagatccataaatatatttcattgattcatgatttttttctaaagactccggcgttccaagggtctccaatggcgattaaagactgaactcgtacagaacaaaatccgtgagttctattggcaacattacttgttttactaataatatttatatgctattattagggtttgaagtaagttttcgattgcattaattttaatagattagttcataagttgtcaagatttatcgaacaatagttttactttttccatttctctgattatattttatcaaatattgtggctatattgtgtttttacaatttcgaatgtatgtaatcgattagggttatatgctaatgatttttttttttttttgaaaagtaactattcatgtgtttttatggggctgatacaaattaacttgggttttctattttgttctaaaacatagctaaaacatagctgttgtttttgtttatagtagtgaaaatggttgctattgactagagtaggttttagtacagtattatattaggccttaccattagtaaggacttttttttttgcgtttatatattacaacataatttgtgatttgaactcaggacctctaacacacactctcgtatggccacttgagttagccttaagtgattagtaatgattttgctaatgggggagattagtatatttcaatatcgggtctcgtaaattttgatttaataaataatatgaaaagccgctatttatatatataaatatatattaataacaattaactaaatatatagacagtataaataagacaaaaaaaaaaaaaattaaaaaacttataaatttatgtataattgaacaaagttaaaattctaataaaataaataaaaatgatctcaaattttgtccacctgatatgacatgtccatgtaagctaaagatagagtacgggtggagtacaaccctgttaatagcagaatagggcctccatgcaagatatagcaaaaccgtcaagcagcaactgaatggagtgaagcgagtcctcaaggagttgtaccaacatccttgaccagccaagaaaagcctataggtcggccagggtgagcttataggccggtcatgatctgtgcacaagcgggtcggccaagaagtgactttcggactaagggagctttcgtttgacaaagggaatctgacctctataaggaaatggtgtacaaagttgtcctcaacttgcaaaaggctggcctcctcttggtggagctatagtgacctgccaaatccatacgaccccgctgtcgattgatcactttttgaggtcaacagatatgtacttaataaaaaaa

SEQ ID NO: 308985 - DNA, 675 bp, Cannabis indica
tttaatatataaagatatataaacgtgaatttataacatacaaaagattttaatatatctaacattaactcatgaagtacctagttttcaaatatttcttcttgtaaaaagaaaaacgaattacatgatatacttacacacaccaagtgtataaatatatatatatatatatatatatattaaaacaacatttattctgctgtgtatagtgtatagcacatgcttgtaagttgtacatatatatccattacataatagtaccaaaacgaaagtagataatgatacaatgaatacatacatataaatcccagacttggtaatattagatagttaaatatttacagtgaaaaattaagatatataatagagttacagaattattgggactagggtgtgatgagttctagtcataaaagtcacaagtaagaagagaaattggccaatagaaatcctccaaatgtataaccccacgtgattagggcaacccttttctgggccactgcacgtgatggtgcacgtgacagtccacatggagtatatttaactctattgatattgttcatatattattacatgtttcatctatataacacgtactttctaataagatcttcctcgtaaatgttggtgtgcagacactattatatactagcaaaaactacgtgcgaggcacgt

SEQ ID NO: 308986 - DNA, 1166 bp, Cannabis indica
gggcaaccgaattccaggcatgaacaaccaccagcttacttctagcatctctcgtccaaccttcctcaaacttaaaagatcttttaaaattggtgtccaacccgccagtaaaaagacacaagggtctgtgattagagttgctcgtctaatacgaacaaataatagctctcaggaataaattgatccaagccccattaactaaacctttatcaagaacatacttgacatgattcgtacataatcggtggttgtccaaagtcatcttatctccatgaataggcatgttaataagcccccgagaatccaccagattagatatgacagggataaactggtctctaccaaaagacccctcacgttctgaagcactgagaacaaaattagtatcacccagaatcaaccaagcccccccaaacttatctccaatcttcatgaattcagtccaaaagtttttcttggcatggaaatagggtgggccatacacacaagagagaagccaggggtgggaaggaggatccgaatagacaataccagagatatgatgtcgagagtaggagatacactcaaaaataaagccattcttccaagccaaaattataccactagcagcaccaactcccgaacataaatagtaaaataaaagtggaaggatttaagggtacgtaccagagaagttgcatccactttgagctcagacagaaaaataaaatctagggaccttggaacatgagtttccctattatattctaatttttttatatgacactataaatcataactgtaataagtaatttgtacatcttttttaaaaaaataaataatatacgatattaaaaataaatttcaaaatattttcttatgttaaacaattaaaaaaattattctctatctcgcttcctaacctagcgctgcccggagagtttgatcgttacatttcttcctactggacaggacttcaccgacctctatttgggtttggtcagtgactttatgggaagggcttgctgttattttgtgtccaagattgaattcttgaagtctttcttgttgcatgtcgtcgttccgcccatcaagggatatgcatgatctcatcttcctttcagtgattaaccatggaggtcctcgggattttctttctatatgcatctatctgttggaattatttt

SEQ ID NO: 308987 - DNA, 777 bp, Cannabis indica
aggtttaagttgaagatgacaaagatcttgtgttttcagatctcctaaaggatattgaggctaagagtaatgaagagaaggatgttaaaagcggtgaagagatggacatggcgataaaagaacacaaacgagcgtttgctagactggacagcttcagggataatgtcactggttctcaaacctacaaacagcgagttaggggagtagcaccaccgatttcaagtgtgacacagtgggtgtcaaatgttaatggtgatgaggcagttatacgatcgaagcttttaactgataatgaggcggaggttgatgcggttgtagattttgttcaataggagccatcctttgctgacgaggaactgtcgcagaaggaagatgaggagatctcagaagattgggaaccagttcgctcatgttcatccgtgatggagctccttgaggaggtccagcgggtataccgaaaggaaatagaagtaaaagattccactccatcagtgacgttgtctggaatgtttgaagctgtgaagatcaccttcgatggagaagaagacaaatggccaaagaaaaaaatgccattgaatacggtgccggagaagaaccagcaagggaaaacgtcccgggccaagaaatatctacaggagttgacatcggaggtgttggcggcggaggagaaaatatcgctagcagcggtaccaccaccggcgtcgaatgggaagagtcagaaatggtcaaggtaccccacggttcaggcagaagagatgatgttgaagatggtgcctg

SEQ ID NO: 308988 - DNA, 2434 bp, Cannabis indica
tggtaaaataatttccaactggtcagccacatgcaagtaacaccatggcttgccaaattatagaatgctaagaagatgaacaaaactgaaaatacaactcaccagagaaaggtcccatggtttggtagagtacagcatgtcaggcacactgtcacccaactcctggaaagcctcatccaagaaagggataccctctctatacaccgagtggctgactcagcagcctttctaccaacagctgaccccgctcctctgttaggcctccgtgtacctgggaagacaggttgaactataggtaggccagcaggtgcaggccctggtagagggggaggcagcgagaggtcctggccactttagccctcactcgtctgctaggctcatccgaaggcccacctgcgagacctcttagcctggaagacatgtctgcaaaaagaaagtagtaaagtcaaaatgcattcaaaaatattcaatacaagaataaaaggatggtgttataaactatttaataccatcagcatctgaagaagatatgtcagagctcacaactacagctttgcccttgtccctaaatgtaggcacatggcgtgtaggtctatcaaaagctaggcctctaggcccaatatgaagagaggcgtcacctacttgacccccacgggccaggcgcctatggagagccctctctctcctctctagattctgtacaatacgagacaaaggtgcttcttcatcatccaagtcagggccttgcccatctctagggcaggacacaccagcagttggcattctcgcaacctcaggagcagatggtacaagccatacatccagaagttgtccacactagtgaactggataatgtttctttgttcatccgacaaagaaaggatgcgattcgctctatcccttatttccaaagtagggatgtaacatctgaagagcggcactagctaaaattcatggtgcacaattacgtgaaggccttgtgccatagagtattttttggcatacttgccaacttttaacatggctttgaagtggtgtcgcccagccattggtgactaagctagctaatataaaaatagtcggttttgctctgcttcagcccagaatttaacttaaaatagtacccaatctcgttaggggtaggcgaaggccaaccaagctccttgtacaagacaaacatcatcgatagatatttaatgctctttggcatgagctgtgtcggacacatcccaaagtaagcttcgacatccaaaaagtatgatgaagttgcaacactgcgccataaactatgtggcacccgaccatgccaaccagcccgaagggggcctgtgcgccctccaattcttggaaggaatctcacaatggacaccccttactaggccactagtaatgagcttatcgaaggcctcaacagggagagcagaagccagtgaaacccaccttgtcttaggttgttttgcacctaatatctttggcactagagactgtactagcacatgatctagtcctactactgaaggcgcgccaagcccattcagtggattgcctcgggcatcataatggcccaaagagcggtcagggaggatagaaaatgtcctatctctcctccccctcactagaatgacctcctctagttcgaattctacatcgaagctctagtctctgagtcctcctctcgcatagcttcgataagaggctaggcaggctcttcctccactctaatccaaccccttgtggccaccatggccacatgaggatcatacaggggtgccttacgcaaagtctatttcgtccttgccataagtacgaggtgaacagaacacctacacagctgtcacctccccaattcaacacgaagcactacctacatggaagaaataagagaggtgagcaacctgactaagctacaaatatattcaagtcaacaactctcaacgacatctttcaggtaaaacaaagggtacaattaccaagacacatagtaagtcctaagttgcacaattaaccataatggacttattatctggccttatacaaagtttctaagagaaaccacgcataaggccatagttctatatgtctccaatgtcgtcacaaggccctaactgtggtccaaagagggagaaaactggctgcctgcttggagcctttgccttggccggccagggttctaggtcctagtggccggccaaaccccaagacccagcttagaggtcggccagcctagggacacagtccacatggccgaccagaccccatgaaagccacccatggccggccaagcttcaaataaagcctccttggccggccagcacatgcatggatcaaaacacgtgatttttcaagaactcaaacatgttcttcgtgttctttgtgattcaaagagccaagaatcacaacgaaggttagattcagttctttttcatctagaaat

SEQ ID NO: 308989 - DNA, 1146 bp, Cannabis indica
aaagtaggttaaagatatttcaagttggtggaggtattccctcaaagttggttgagagattctctcatctgaaatatcagtaaccaaactcagttatagatattttttacaataattaaatatgatttaattaatgtagaattaattactataaataaaagctagatttgagaaatcatgagataattttcactgcttttttcgaaatacaaaggagaaaaggaaaattatttttctctctcaaatagttcttgttcatgtattgagaattaatcaagaacaaattatacactttatcctaatagcccacactattccttgtatgtgatagatcgatttggaagactacagtgtgagtttctaatcaactaaaaagatacaacttacgagaagttttgaggataccttgatagtcatgaagaggtatatatattattttattgtaatttaagtttttgatttaatttttatacttctggagattcatagggctatggtacaacgataatctattatatacgagttcttacgatgcgtacctgatttaataccataaaactaataggtatattatccacttgtggaccctcatgggagtataacaatacatatttattattactttattttttataaaatttgggtataacaacaacagtatgaaacaatagtctaatccataaaaatatttaaagatcctacaattatattttttttttacatttttggttatatatgaaataattcattctataaaagcattgctattgggcatcatttgtaggtggcaccttgcgattatttagtgatattccctaaagggaaattatagtaaatggcctcaaatcatagtactatattagtaaatgtcctcatttcaaaacttttagagaaatgacccttttagactatttattatttatattgtcttttgcaacataaaaaaaaaaatcaataattttttttcataattttttttttaaaaaaaaaataagaagcaaattacttaaagattaatcgtatatctatattagttttattaatttttttttattttaaaagttaatgtcaattttttaatttagttatgagttgttgtgggttgttagtatatagattttactgttacaatatatttttattttg

SEQ ID NO: 308990 - DNA, 599 bp, Cannabis indica
ttttcaaattagtttttttgttacacaaaatatttagggagtctgcacaaacaggatgtgtttgcagattgtcatgcttgaatgttgagattttaactgttaatgcaatgaagataatttgttttctttctgacccaacacaagtattatgtacattagactgtttttgtatgttaatgcaaattgtgatttttgatatgaaaagcatgtaaaatatgcaaattgtggagtttaataggaattacttgcttatcattattttgtgaacactttttgtttgaacacttactttctaaccataaagagttctttccaactcttaaacttacagatttcatagtcatttgatagaagttgaacaaaaatatgaatatactgacatagtagttaaacatctatatcacaaagcattctttctaattatgatcatcaatcttacagatttcatataactgttgaatttgatcatcttcacacaatgaaaatcaaattgtgagcgttgaattcgaatttatgttcttgccttttaatataagtttttgtttgatttgtgagatgaacttttaattagtcttcaagtctcgttgaacttctcagtg

SEQ ID NO: 308991 - DNA, 1449 bp, Cannabis indica
agtatatgggataattcccttgtattttttacggaaatccacataggaactcacatagcaatcaatagagcaacttaaatcgcaaccaaaattcacatagcaagtcacgtagaaataaccgaagcaacctaaaagcataaatttgagaaaataaaataaaaattaatatatggagcaattttttttaataaaaaggtacaattttattaactcaaatcattcaaaagtgcatcacgtaaactactcaaaatcatagaatgtgaataagtacaattaacatttatccacgaagctctagccaaatggtgagcaacacgattagcggatcgcttgacaaaattaaaaagatattattcaaactataagaaattcctctacactcaaaaatgcagaactcaagaatagaagtcatatctaacgaacttcagatagcttggatcatgaacaaactgtccgactccaccactacattatgtcgtcctatctcttacaaccaactcaacacctcgttaaccctgataacttcagcaagaacaatatcaaccacccccatccggcttattgttcgagccataataagctgactgaaagagtttcacgccacccaaccatacccatacttattctgattgttaaagaaagttgcatcaatattaattttgatcatattacctacatgtgtaatctagtgctcatgcattttgccgtcttgtaaagaaaacaatgaggaaccaaattttttatcttgagcataactccattgatcaaaactacccttagccaacgaaaccacctctttaatagtcttgttcttaccatttcacaccttgtcattgcgcacataccacaacgcccagcaaagcataacaactatacgtttcattccaggatctcataactaaaatctatcatgaaaccatccattaaaaaaattgtcaccaatctctatcattaaaatacctgccatatgctagaaagaaaaagcaaacgaacaccccacaagacaatgagaaatagactgtccaattcgcaagcaccttgaacacaacaacgaggagaggggaacatgtttcacgcctaattggacacgagtaggaagacaattggaagcatccctccaaactaaatctttgactttaggaggcactctcaaatctcacaactctttttaaaagaccaagttaccaactccaactaactcacctttaagctcttgaagaagcctatacccactcttgaccgaatatacatcaaaactctcaccattctactgccaaatatcgtcaaacattgaggaaaacatggatcattcttctttatactatgttgatgttatgtgtaatacacgtaaaattaattttttttaattagattcaattaggtgatgttaagtgcaatatatgtatgtttattttttttaattaggaaatgtatttttttttaattttt

SEQ ID NO: 308992 - DNA, 4433 bp, Cannabis indica
acttgtaaatgttttgtaaaataatttttgggatcccgacacatgtaacttttagtttgtaaagtttaaattattacaagtttattttctttccgtttgttattaaagtttaatttccacgctaattttattagtaatcccgttaaggggattagggtttcttttgtgtcttggatagcgtgcctaatgaattagggcgttataatgagtcagaggtctcccaacgatgtacatatcttccatggggtcttggcttctaagaagcaggatcatccctttttctatgtttggaaatgtaaccctacttttgtagtaccagttttgtaacttgttgtaaaagaattttataaacaggggatcctcatattatagtggtattttatatgatagttttatcctaatttaatcaaaaagtttttaattaaaccacacttttcctaaactaaaagattagtcagaaataagtttgtaaaagtacacacgtggcgtccctgcaagtcagggtgttacatttttttgagaattttacactcaattctcatccaccagactgacactatcgtagttggaagaccttgtcaaggtcaaacaatgacaaggaaaacctttgaaggattacatccaaaggttcatggctgaggccaccaaggtcaaaggcctaacagaagaagccaggtatacgtccatactgagaggcatccttttgttgagtgaattctagaaagatatccggaggatctcaaacaacaacatgaaggagttcctcgaatgaaaacagttttagatggaatagtggcaaaaaagggaagtaaaatacttctcccacgccacaaaactaaaaggagaaggaggagaagtacaggtcatcctcgtaacggagaaccctgagaccatttacatggccactcagggcactgtcccatacaagaaggccctcctatcaaaagggagatgagcaagagggacatgtcaaagttaggttgatttcacaatgacttcagccatgacaccaacatgtgtcagaacctaaagagggagattgaattccttataaagatgaacaatccccacttgcatcattatgtgtagaacgaccaaactcaagcacaagctgcctagaaaggagaccatatgccaccttccatgacgggtcatttaggggtcataattggtggacaccacattgcagtcaaaactagcaaggctagggaatgctatgctcgaacacttcgtcacaagcctaaaagcgatatccttacggttgaagaaagaggccccaagcaactcaagcttggggagcctgccatcttttttacagaggaagatgttgcccaactcaacatcttgcataattaccccttgtcattactagaaagatcgagaatatgatggttgttaggtgcatggcaaaaaatggagcctcgttcaacattcttttcaaatatacatatgaaaatatggggcaccaactgatcaagttagcaccttgcacacaagtaatgtatggcttttttggacaaggcattgcacttatggggtacatttgattgcctctgacggttggagaaaacccaataacaagaatgatgatggcatagttcatagtaattgacgagccatcagcattcagcgttatgataagttaactagtcctgcattacctaaaggcagtaacatccatctaccaccgatgcctaaagttcccaacaaggcatggggtaggatgtttgaggggagaccaataatttgcctgtcactgttataacttggttttgtccaaagccaagaaagagaagattccaaataagacctctgatgaagagcccagcaaagggcaatgaagtctagcccaaagcgtggaggaagacatagatcctcgttttgtggatcatacaaaagctttggacctgtaaaagaactggaagaagtgaacattgatcccacctttctagccagggaactgaagaattgggaaggtttagcaccaaaaataaaatcagtattgataaaatttctaagagcaaaccttgacatctttgcatggtcatatggagacatggatgcttattcaggttacaaaccaaatatgcaaccaccatatcaagaacacacaagcttcatgatagatctagacctatactcctatactactacaaggtcatgcccttcgggttgaaaaatggagaggccacctaccagaggtttgtgaacaaaatgttcaaagatctcattggtcgcaatatggaggtgtacgtggacgacatgctagtcaagtttaaaaaggttgggggcatgtggaggatctagacgaatgcttcaagatcctctaagagtataacataaaaatcaaccccctctaatgttcattcgaagtaggctcgaatagaagcaaactcagacaagatctaagccctttcagacatgaattcgcacacaacaatcaaagaagtacaaagcttgacaagacatattgttacacaaaccaaatttttgtccatatccatggacaaaggtgtgcccttctttgacatactcagaggaaacaaaaactttaagtggacaagagagtgtgaaaaagcattccaagagctgaaaaaatggttggctcaacctcctgtcctatcataacctttggataatgaagagtgggtgtgtacatggctattatagagcaagcaatgagtgtcgtcttaataagagaagaagaagaaggtatacaacatccaatatactacatcaacaaaagactgatcgatgttgaaattcgatacccactcatggggaagcttacatacaacttactcttagcatcaagaaagttaaggtcatacttctaacctcacccaataagggtgtacactaattacccattgcaacaggtttcgcaaaaacctaaagcatctggcagactactcaagtgggccatcgaaatcagccaatttgatatcacatatcaaccaagagtggccataaaaggtcaagcccttacaaacttcatggctaaatgtacaaacctatctaccaaaatctctcgagatttgggagaagagcaagatccaaagaagaagtgagagtaagagtagcagtaagaacttgaagaatcagcatggaaatcgcatgttgatggaagctgcactgaccaatttccattgcaggcattgccgtcattacacctgggggcaacaacttcacagggcaatcaagtttggcttcaaagcctctaacaaggaggctaaatatgaagccctaattcttgcctcaagctagcacatgaagtacgagctgattacctaggcatatacagtgactctcaatgagacgtaaattaagtcttgggtgaatacacagctcgaggtgaaagaatgttagtttatttgagccagatccaagacttgttaagtcagctcaaaggctatacaataaggcagatctctagagaggagaatgcaacaattgatgcacttgctcgtctgacaagcaacatcattaccgacaaggcaaacttcgtgccaatacaattcttgaaagaatgtagcattaccatccctgaagaagtcaacatgtaggacgacagtccaacctggatgacacctattgcccaaaagtaaaaatgagaaaaaaagatgagaagaaaagttgctaggtatctaatcctaaacagagtaatgtatagacgaggcttcttaatgtcgctcctaaggtgtgtcactaagatagaagtccagtgtttgttgatagaattgcatgaaggcttctgcaataatcatgtcgggggcaaagcctatccaaaaagatactatgacacttctgggcaacctgttgggcttcgtgccctatataaaactcaatttcaatgtattttttctattcaatcatcaattacttgtttaatgtgttatttggttcatatgatcatttatttatttatttgatttataaattcatccaaatccttatcacactgatattcttgtttattgtgttgtcaacacagtggaaagtaatcaaaattgtgtgattaaatgtattcctatgatttatcagtacacaggatttaactaataggataatctacagcgtagtttacttgcaccttggataagtgttatgtcctttccaaggcattggttaaagtaagcttgggttgaatgtatggagtatgcaccggaagggaccgatattaaatgtgaactagatatgataaacttaccataatatctattcaattcaatatcacctagttgatcttagatcaaatcatctcaatcctgagatggttaggttctaattcaattgtattatttgtgttcttcaatctattcattaaagtcgaccaatggatcttctcgtgacatatagttaaggacatggtagttcaattgagtgggaccgctaatcatagatacggaatctataacttctatccagacata

SEQ ID NO: 308993 - DNA, 851 bp, Cannabis indica
tgtaaattttcctattttttttttttaaaaaaacaaatgaaaccacagtaatcgtcggagttatcactggtgccggaaaactcgccacagtttgctacggacgaccgaaaagtcgtcggagtagttgttggagccagaaaagtcgccagagttgttgacgttgccgaaaaagtcatcagaattggcattgtcaccggaaaaatcacccaaaaatactaagaatctggtttctttgtgatttttttcgataccggcagctactccgattcagcaccaacaacaaacttcggaaaattcatcagaattgacattatcgccagaaaaatcaccgaaaaaatcaccaagaaactggtttctgatttttccagcgtcaattttaatttcaacgaattttctggtgtcagcagtaacttcatagactttttcgatgaatttcgatgacaatgccaattctgatgaattttttgaagtttgctgtcggtgtcagaaaagtcactggagtagttgcaggtgtcagaaaaatcactggaaaaatcaccaagaaatcggtttttgatttttcggtaatttttccagcgtcaatgtcaattctgacaaattttctggtgccagcagcaactccataaattttttcgatgccggcagctactttagtgacttttccggtgctaacaacaaactccagcgactttttcccagcaccagtaacaaataaaactgcataaacaaataaaaacattaattgtgagctttgaaaacttaatttacatatatatagtatatcaaatattataaaaatacataaaaacaaaaaaataacatataaattagtcaaacttaaaaatgttata

SEQ ID NO: 308994 - DNA, 4137 bp, Cannabis indica
cttctttgaatgtcccgctgattgactactacatctagggacgggactgatcccgaaagagaggtctttctttctggttatgaaatcgcttaggttgaaaagcaagtcgatgatgccataagtcaaaggggcgggtgaggcgagagtccttcactgcacttactggagagaagggatcatctctaatctagttgtaaggtcttgcccccttattagtagccgaagtgtaggccgggtaatttacgagaaaacttttaacatgtgcatcggaatagtcgaacatgtttaataagcgttagtcgacctccggaggacaacaatttgcttttccaacctgagattctctttttcattttctccagtagaggaaggcaatgctctctctttattctcttgggggacaagggaacatccaggtacttttttataggaaaactaccttttttgattcctcttcaatgatctggaatttctgcgaggagcgaagccactcgaacgaatgtgagaggagcgaaagtcgcatgacgcaagcctccgtctatgtatcgactatcgggcccataacaacactcaaaatcaaaaaggagcccgtgccactcatcgcggactttttgatcaattaggtgcgggaaggtatttcaccaagttggactggcgagcggggccgtgaaggaaacggcaaaacgagggttccaaacctttattgaagaaagagctcttgcctccaactcaaaacagaacagaacgttccttccgcaacgcaaggccgatatgtttcgtagcagccaaggatgagttcgatccattaggttcttcgatttgttcagaaaaaaaacgagagacaagaaaacatctttgattacgattaaaaggaacaatctcaaatagacaaagacccaatttcgggtcatttcttggtgaacataatctgccataatctcttcgatcccttcatttatgtgccagaataaagagagatttagtaggaaagtggaagagacttttttgtatatgataatcaaagggagtaggaaagcagcagtaattctttggaaaagcccggttctctttgtcttcgagctttcattactcaatccactgtttcgttccttcatatacctccccaccaatagatagagacaaataggaataaccaaaccacgtctacaaaatgccagtaccatgcagctgcttcaaagccaacgtgatgctccttggtcagatgaccaagatattggcgaataccacatatgatcaagaaaagagtaccgataatcacatgaaaaccatgaaagccagttgctaagaaaaaggtagaaccataaatactatccgaaatagtgaagggtgcttgataatattccattccttgaaagcctgtgaatactagagccagtaaaacggtagctactaaagcgtaaactgctcgtttttccttccccgcgagtatagcatgatgagcccaagttacggcagctccggatgaaaggagaattagggtattaagaaaagggatttcccaaggatctaaaaccccaatcccttttgggggccaaatacctccgatctctaccgtagtgccaaagaagaatgaaaaaaagcccaaaaaaaagcaaaaaagaacataacctccgatacgatgaacagaagaaaaccatatcgaagtcctaattgtactactttggtatgatgtccttccaacgtggattcacgtagaacatcgcgccaccatacgaacattgtatataagataaatatgatgcccaaactgagaagtgttgcacccccttgaaatgagtgcatgtacatcacacctcctacggtggttgccaaagctccgagtgaacccgaaataggccatggacttggatctaccaaatgataagaatgcctttgagattcaatcataaaccacttttgcctcggttgtatgtaaacccccccttcacccccaccccctaaagtggtaaagaagggcttctaattttttttctatctgacaggacaaacaaataggaagggatggttctttcattgcattgatagaagtctaactagaaaaagatctctctattactttgagaagagaatcgttggtttgaccgacgaactacgtgggaaaatggaccttctttgattttcagcggaaagtaacaattctattcagttcggtttcggaaaacttgcaggtcgcggattagtgcgttctgcgccgccggcggcctaaaatcaaaggcgcaggtttctctctctggttaagactgcattcatttattcaacttgacacgtgtaggaagacatgggcctttcacccatcccagaaaaaaaaatccgaaaacgcctatcacggacgttcgttctcgaattcctttataaattaaaagtaagaacgaattcttctgtttctcagtcaaaaactttttcatttgttagaaagttttattgtagtttccgcttcataatgagattaaaaaacgatgcttccttggccgtgtagaacatggattagtattatgtcattcctacaagtgatcccccatccaggattggaagaagtgctatatgaggacttcgagatcaaatataatatgtttctttccattcctcgtgagccacttatttctccgaaacaggagatcaaagttcttttcctcctttttcccaataagtcgacggcgttacaccattgggatacttcgaataaactagagtacatataggatacaccggtgctaaaaccttttatcaagagatcttccaaacggttagggtcgttgctctggatgttgttcccccggtgtgaaaccagttggttccgtagttttagaattctgctgatcccaagtattccatctccatcattgcatatgaaaatatagaaagtaaagaagaaaaggcataaccagaagaattgtgtaaaataagtgaatttatccagttgaggcattcttgttgattgagaaaaaatgaatccctccagactccgtaaagcctgtaggagtagtgaagaattatagtgagttgtggttggttgttgaccaacggaaagatgcacaaacgaaaaagggctacttcataaaaagcaatcaaagcgctcagaaaacagcggacctgtctgtatagggcgaccccctataaaaaagggagagagcgccagaacggcgtcaagggtatcccctatttctttttctctctagaaaagagtgaaagtagggttccaaacctcgctctcaagactgtcgaagactaataaaatttttcaaaatgaaaattatcattgaaaaacaagttccagaggcatcttccattcatatcgatttgggtttttccgcaccatattttgatctgcctcttcttcgatccggaattcccagcaaatctttgactcctcgaatacaatgggatttcacacctggcaaatctttcactctacctcctcttattaacaccatagaatgttcctgcgaattatgaccttcgcccggaatgtgagcaaatatatcatgtcgattgctcaaccgtactttggctatcttacgtggagctgaattaggttttttcggtgttctcgttgaaacacgcgggcgtactccttgcttctggggacattgatccgaagctcgagtacggtccgtgcgccgtttttcttctctaccatgacgaatcaattgatttaatgtaggcatcgctctttcctttgtccttccccccgattttagccctatcactagtgattactcccgatccgaagcaccccttttccattcatagagagatccaatcgtcaaaatcaataaaaaggccatcatggaccaagatccaaacggatcaatcttgttgagaggtactgcccaaggaaaggaaaaggttacttccggatcaaggataataaataaaattgaaacaagataaaatcgtatatcgaaacgacttctggcatcaccgaaaggatcgaaaccacattcgtaggccgacaatttttctggataggttgaactattggaagcaaatggaaaaggaacaccgagtgggatcaaagaaactagcagactgatcactaaatagatacaaataggtgcaaattctgacatcaacacagcccacttggttctttcgctccttgctcgcggagcggca

SEQ ID NO: 308995 - DNA, 1829 bp, Cannabis indica
gacatatacacatcttcatggaggtcaccatgtagaatggcattattgacatccaactgatgtaaatgccatcctttaatggcagcaagggatagaacaaacttgacagtgactagctttgtgactggtgcaaaagtgtttgtgtagtcaatcccttcttgttgattgtaacccttagctatcaacctagctttagacctttctacactcccatctgcattaagtttgattttgtaaacccatttagaaccaataacatgatgtccttcaggtagagacacaatgatccatgtatggttcttctcaagagcttcaatctctgtgtccattgcattgtcctaaatagagatcccatgagcttcatgaaagaactctgtctcaaagtgactagaaatggccagaacagcagctagaaatgttggagacaacccgtggtatccaataacctgagacaaagggtgagttgtgacaaaagacacctgagtagagttagacaaattatgagaatctaaatagtagtgatactcattaagatatgatggttttgagactatcctgcctgatctggtgtggggaaaaacattagaagacacaccagtttcaggtatgttaacagaattagatggcacagtagactcaccagtaccaggttcagtaaactcacctggatcaggaacagtagaagattgagacaaattataattaggattagaagaaggagtacctgatatggaagaatcatgcgattctgtaatagaaggagatgcaatcaaatatgtctcatgtgtgggtggaatacctccagtagaaacaaaaggaaatatgtgctcataaaagtaaaaatctcgagaaatgaatgtgacatttttgtttaaatcaagcaacttataacctttcatgcctggagggtaccctaaaaagatgcatggaacagacctaggtgagaattttgatctagattgactcaaagtagaggcataggctagacaccaaaaagcatttaaatgttcataggcaggagctttagaatgaagaatggaaaaaggtgatttgtttttgagattaggtgtatgttgtaaagagattggctacattccggcaccaccaagatgtatgaagatcttaaaccttacttctggtggaacggaatgaagaagaatgtggtagaattcgtatcgagatgcctaacctgtcagcagattaaggttgaacatcagagaccagtagggttgttgcaccctttaactctacctgggtagaagtgggaagatatcacaatggactttatggttggattacctagaaccacgggtttatttgattcaatttaggttgtagtagattgatttacgaagtctgctcattttctaccagttaagacaaccttctcagtggatcaatatgtagatttgtatgtttgagagattgtaagattgcatggtgtgccaaagtccatagtttcggatagagatcgaaagtttacctctaaattctggcagagtttacaacgggctatgggtaccaaactgcacttcagtacagcgttatgttacgagcctgtgttatggatttcgaaggctcctggggtaagtacctaccgttgatagagttctcatacaatagcagttatcaaagtacgataaatggctccctatgagttgttatacggtagaaagtgtagatttcccatttcactaggatgagacatgggagaagaaatactcaagtccgaaatcagtgcaacggactaacgaagcaatttagaagattaaagttagaatgcttgcatctcaaagcaggcaaaaaagttatgcaaattcgaaacgcag

SEQ ID NO: 308996 - DNA, 1086 bp, Cannabis indica
tttacctacttggagagaaatcttcctcaccctttgattcagctctgcaatgtcatcttgcctacacaattcctaatgccaataattttcctacttctattccttgtactgatcactgtgatcatgtaataaacacttgtaatgatttgactatcaataaaacatcttttacttcacattgtgtttctatcccgcctgttatttttaagtcctttgttagcaatgatgttaatacatggcataacaaattagggcatattccaacaactagtaccttggctagattacttcctcaactacctcacactggttccataaaagatttactcttttgtattgcctgtgttcaagggaagagccacactctaccctttcctacatctagcagtagagcttcccaacctttagcccttatccatactgatttatggggatcccctcatgctctatctaaaaaagggtataggtactatgttcacttcttagatgactacactaagtatacatggatctttcctcttgtccaaaaatctcaagcctttaatgtctttctaaaatggaaaattcatatagaaaaacaatttaatttgcccataaatatgtccaagctgattggggtggtgagtataggccattcaaaagattcctagaagaccaaggcattcatttctaacacccttgtccccacacacatgaacaaaataggagggatgaaagaaaatataggcacatcaatgaaagtggtcacactattttagctcaatctggtttggatcttacctattggttgtatgccttcattactgctgtcttcactattaacagattacctaagtgttatttgacagcaaacctgaatatagcatccttaaaccttttggtcgtgcatgttatccacatttgagaccatacaatcagcataaacttgatttcatatccaagcaatgtctatactgttggaattattttaccaggatctagatttactaacaagtatgttataacatcctaaatatgaatttctaaaatggtatgaaataaacacatataaagtattagaaaccttacagtggttgcagctaaata

SEQ ID NO: 308997 - DNA, 4400 bp, Cannabis indica
agagtttctaggtttattttttttttcctttctttgttgtctctgcttgaagcttccttccatggcgtcatctaccaatgctggttccagacctcaaggtgcctcctctgccaccacagatgctcctccaacacaggcgatgcaagtaataccaaatcacattgtgccactcaccttacgcctcgatcgaaataatttcttctattggcgatctcaggtcctctccactgtccgagcacatcaacttgaaggttttctcactggaaccagaatcagacccccggccaccattgtagatccctccgatgcatcaagaactctacccaatcaagaattcgctgactggttacgtctggatcaattcttactcagctggttgttcaactcgatctctgaaggcatgttgggacacgttgctcgttgtggttcatctgcagatttatggaatgtcctgctgcaacttttctcaaacacctctcgtgcgcgagttctgcagcttcgtggattgcttcaatcaacaaagaaaggtgctactccgattgatgagtacatactcaagatgagatgtcttggtgatgctttaatggccgctggtcacaacattactgatgatgaactcatcatctatattcttggaggacttggaagtgagtatgatcctgcgatcgtcactctcacctcaaaagaatctgtcactatgcaagatgttcaattcttgctacaaactcaagaaatgagaatcgaacagcaaactacagttgctacattggatctgcataatccaacagcaaattatgctgcagcaaccaagaaaggccctcctccatcaccctccacaggttacaacaacaacaacaataaccgtggacgtggctcaaacagaggcagaggaggacgaaactctaataatagaacaggcaatcgacctatttgccaggtttgtggcagatctggccacacagcactaaaatgctatcatcgattcgacttaagctttcaaggagaaagcagctcgaatacttctgatcaaactaatgaggcgccccaggctatgcttgctacagccaacaccgttgctgaccctcaatggtacttggacagtggagcgtccaaccatgttacatctgatggtgcctcacttagcaacacaatcgactacaacggaaagggtaaattgactgtaggtaatggaaactccctctctatattagctactggtcaaatagctcttccatgttccaaaactctttatttgaatcgagttttatatgtccctggtattcacaaaaatttaatcagcatttcccaactttcttgtgataacaatgtatccattttgtttgacactaacacttgccttgtgattgataagaaaacgaagcaggtccttctacaaggcacccttagtcaaggcctctacaaaatctcacatcctttgccaagacctcccaacctatcctactgccaaggccgatatcaagcccagcagccaagacctcactccagcacaactactaccctatttcccaatgctgattgtaatctttctgctgttaagcaatctttgtgtaatacttcttgtaattctagtctttggcacaatagattaggacatccctctcatgtaattcttgcaaaagtcttaaactcaatcaatgcaacaattactaataaagatttgtccttttgtgatgcttgccaatttggtaaaaatcatctcatgcattttagtagttctcccatcaaaaccaatgcgcctcttcaaataatccattcggatgtgtggggtccctccccttatcccactcatgaaggatataagtactacatcctctttgttgatgatttcaccaagtatagttggatataccccatgagaactaaattagatgcctatcctatcttcacaaccttcaaaactatggtagaaaaccaatttgatcttaaaatcaaaagtctacaaacggattggggtggggaatatagaaaattacagccctttcttcaacaattaggcattctctttagacatccttgtccccacactcatccacaaaatggtagagtggaaaggaaacataggcatgtcactgaaatgggattaactctccttgcacaagccaaaatgccactgcacttttggtgggatgcatttgtttcagctgtctatttgattaatagactccctaccatagttaataaatacaaatctccatttgagtgtctctttcactataaacctgattatacattccttaaaacgtttgggtgtgcttgcttcccctttcttaggccctataatcaacacaagtttcaattcaaaacctccaaatgtgtgtttcttggctacagtccgtttcacaaagggtatagatgtttacatacatcgggtcgaatttacatagcaagaagtgtaaatttcaatgaaaatgagtatccttacagcaccttattcccccaacaaattaccaaagagtgtcatcaaaaccttcttgctccagcctttattatacctgacataccctcttcgagtcacactactcccatccaatttggcactgtcaatatcgagccaactgagacacaaagtgttcacaacccctcacaccagataacccacaccagtactgaattccctgctccccacaccagcaatacagccacaaacagagaaccaacactgcctgaagacatcaccataccagcacctaatatacccaaccaccctcccccattacctactggccaccctatgcaaaccaggtcaaaatcagggatatataaacctaaagtttttcttgttacagcttctcaacaacaagtttatgaagagcctcggacagtcaaacaagccatgagcattccacattggaaaaaggccatggaccatgaaaaacatgctttgattaaaaagaaaacatgggtgatggttccaagaacctcagatatgaatgttctctccaacaaatggctttttcgaaccaaatataataaagatggcagtctcaacaaattcaaagctcgattagtggtaagggggttcgaacaagcacctggtttagatttcaaaaacaccttcagtccggttataaaggcttccacaatcagaataatatttgcattagctgtgacctttggctgggatatacaacaaatagacattaataatgccttcttgaatggggaattacaagaaaaggtgttcatggaacaacccaagggatacgaagaccctactaaaccagattttgtatgtcaattaaccaagtctctttatggcttgaaacaagccccacgggcttggtttgacactctcaaaagcaccttactcacatggggattcacatcatctatatctgattcttctctcttttacagaaatcatcaaggtgcactcttgctcattttggtgtatgttgatgatttgctcataactggagaaaacaatgcagccatttctgctcttattgctgcactcaatccgaaatttgccctcaaatccttagggtctgtcaactatttcttgggatttgaggcttacaggaacagttctggtttatacttaacacaatcaaagtatgctgctgatctactagctagaactcagtttgaagactcaaaagaatgtgacactccaatgataatggccaacaaattgtctctggatgacagttccctgttcgaccaacctgaactctatcgaagcaccataggcgctctgcaataccttaccatgacacggccagaccttgcttattcggtcaataagttgagtcaatatcttaaaaatccaacaattcaacactggaatgcttgcaagagaatgcttcggtatatcaaaggaaccacacaccttggtcttcatttcaaaccctccacactcctcaacttggaagcttattcggatgctgactgggcatccagtcttgatgacagaaaatccaccagcgggttctgcttatttcttggtggtaatttaatcaactggagctccaggaaacagaaggcagtcgcccgatccagcactgagtccgaatatcgcgccctggcctctgctgccacagagatcatctggattagttccctgcttagtgaacttggtgtcaaacttcagaagacaccaccaattctctggtgtgacaaccaaagtgcccaagctcttgccttaaatccggtgtttcacacccgaaccaaacacatcgagctcgatgtacactatatcagagaacaaatcacagaaaaacgacttgaaatttgttacattcctacacaagaacagactgcagatctattcaccaaaccattgtcttcacctagatttcaatttctatgtaacaagcttaatttggttaataccaaacatagcttgagggggggtgttagaccagacagttagagtt

SEQ ID NO: 308998 - DNA, 1833 bp, Cannabis indica
ggagaacgacataccctcttcacgtcttcaggcaagatgagagccttcatgtatagagtaaatgcacaaaattatcaaatataaagtacatagactaataatataaacttgaaacaacacataatcaaataagataagtaataaacatacctcagctgatccaacatgtaggtgcaccctattccacgaacaattcagattcaaaaaaaaattcatcaaattaataaaccatatgatgtcatagtccctatgctgtatcggaattatgaatgttccagtcaacgaattcgatgactccgccattgatatactaaatttgatattacctttatagcaaattgatgctaattttggagctgattcaattctaacagtcatttcataatccaaacggttattcaaagttaaactttccaagctctcacttgagatttcaatgtgcttcaacatccctttataacagttgttcaaagtcaaatgctgaaggagactaaggtttgagatgagatattccaataatgacaactcttcctcaccccattcacaagtcaatgtaagatttctaatttccttgcatgcacagggatttattttgtcaaaggaaacatattttagtattaaagattcaagatttatgagttcaattttctccactagagcctctgtttgttcaatttccaagaccttgagagttgaattacgtacgtggatgtgtagctgatcatcagtttccaaacaacaatctcttaaccttaattcctcaagggaaggagaacccaacaacagattatctagcatatcactatcagcaaaacgaacagcagacaaagacaatgatttcaaggatgaaaaactaaatgattggcaagaagaatcaaactctaccagacacaatttcaaatctgtcaaaaaatttccattgaccactagtgtttcaggtaagcagtagtagtaataatcattattcttcctgtgtaaccagttcaaacgaacttctatgttcttgatttgattcttaactgcaaaagctaaccatctatttaagcggctatccatcctactttcatacaaataatgaagcttaaaactagttatgactgaatcggggataaatttcatacctctctttcggtatttcaaacaattgtccacaaatttgcagttaccataatacttcgaacagtaattacagaaaatgagtttggggactaaataccacatgagtttccaacgctttgaaaggatgcatgtcttaatcacattgcgggttttaagaaatgacaagatatgtgtgattattgcatcaggtagttttgaaattctgtcctccttatcatcctcacccatcaatgatgtacttttaactcttttttcagccatgaatgacctgcaacagctaacagcaaaaaaaccctttgatccctttaaaaaaaagacatagaatcgtttgttttgttgtcccttacctgtagaagtagttgcagatactattgtcttaggggaaaacagagtgaattgggcaagtgaagacggtggctttcgattcagagagattagggtttgtgactgattccgaagttttttaagaactgcagaaagaagaagacttttaagatagattataatctaactaaatattaactaaggaccactctagctaaaggcattttgatggataataaattaattactcgttttgtcttgtttggtatttttaaggatggagttgaaatgattatgagtaaaataaagggataattgcggcaaaagtccccaaaaacttgaggttgatgccgattagtcctcaacctcaaaaattggcggtgaaaatac

SEQ ID NO: 308999 - DNA, 874 bp, Cannabis indica
taatatttttattttaatatttaagtccatatttttagcaagatctttctcggcgtgatagggattcagacaacccatgtctgaggaacctcggacaggcttcttgtttgaagctcgcttatgcttgaccgagcggtttcttagctctgcgcgcgtaggtgttgcaccctttagatattttgttttcaaaattcaaaaaatcataactaatttctgtaaaagcttaaattcattaatttcttatctacttttcaaaaaagatactattaggacaaaaataaaaatatttttcatcgaaaaatcgtaatttacatacattcatcaaataagcatctaaaccaacatgaacatatccaaatcatcataatcattgttttaaatccatatttcgtgaaagtaaattattaacatggctctgaggccagttgttggggattattttaccaggatctagatttactaacatgtatattgattaacaccctaaatatgaattctctaaaacaatagaattatacacatataaagttaagaaaatcttgcattagttgtagcggaataatatgtctccttccacttttcccagtgcgtaaatgcactgataaaaactagatttttccaacgcaaatgtatactgagaaaagtcttacttttaccagcgcattaatgccctgggaaaaatctaacatttaccagcaaaaatatgcacttgaaaaagtcttacttttaccaaattaataattttgtgctggtaaaattttgagttcctaaacaatctatcaagttttcgatataataaccctttttgttttagtaaaaaatgaaactcagttgtctatgctgcaactatatgcaaccagcacaaacccaaatt

SEQ ID NO: 309000 - DNA, 665 bp, Cannabis indica
tttagggcataaaccctaacatgagcaactcgtccaggcgagatcccatccagcatggtcagcatccggaagacatgtaaccgtgtattcggaagaagccttcaacatatatttgcaatcccagtgtagttttccattccctatcagatcacacaagatcagggattgtctcccaataatctcgaatagaagattgtatctttctaaattaagaaagataataatagacaatcaagtaattaatatgtcattaattcctataaagatagaacacgattttgacaaccagcatcgtgatgtgaaatccacgtcagcatacacaaggcgctccatggaccgagttttaccagataagccataagttaatatttcatttgtaaactattaaagagaaaaagagaaacaagtatgatctctctgccaggggcagatgcacacttgaggctatagtggccatgcctccccaagaaaatagacatttacatattttttaacaaatttatattatgtaaactttttttttggtatttattatatggtgtccccattgataaagaagtcaaactaaaatttcaaactgtttttttattcatcataatgttgaatgctaaattaaatacaatttcttcctttattttttttaaaaaaattaaaaatctaatatg

SEQ ID NO: 309001 - DNA, 696 bp, Cannabis indica
acttaacctttgaagtttgattaggggaaatggtcattttgttaggaataaagcaataggctagaagaaacctagaactctattctctctctctttagaaccatctagggccagtaagaattgagggttttaactgattcaattcaaggagttcatcgaggttttaaaatctcaacccaaggtataattctctagtactctttttattgttttgtttggttataagatgaattgttgttgaatatttgtgagctaggttgctgtgttgattggggtcattaaattttgtattctggagctaggatgagattatttgggatgttttaagctgaattggtaagttttagtgtggtttgaggaaagttggagtgttggggacatttttggggttccctgtactgaaccagaatttcggtttagggggacctgtagcaaccggtcgactggttggtcctcaagaaactccatcgaaccaaaattccagttgggaaactggtctatttgttgagtcatttttggaaccttagttttttctgttaagtgaaatttatggtattatcatgttatccattgatagggatatttctagttttgattttaagtccccagaaagtgttttagcgtgtttctcatcaaaattttgactattgtgatttagggccctgtaaagcgtcgagttgcagttccactcaggct

SEQ ID NO: 309002 - DNA, 853 bp, Cannabis indica
gaagcagctgatggggatgctctaatgttagagtagttggtcgaatagtttataccaaaagaatctattattttacaaatttattaagtaagaaaagcaaaacatcattaattatattgtactatgatgctgaaagggaaccatgatgaaagagaagtatgtggaacactttataaaaaactaatagttcatttagataattattagcaaagagaaatacaatattataacttaaattgtctcaacaataaatctcctcactaatttgcgtgatgagcacaattttattgcaacgcattatctaagaaaagacaaagataaaagcacgtttgtgagttatcggttcaaattagtttatacttgataattttaataactctgtgtagactatgtttttggtgtagttcttatcatgctgtccagtggtcacaagtcgaattatacacacactgtagacgatatttttgcccatgacaaagctacatataattgactctgtgaaaaaatatgttgtggcaaataaactccaacataatccaacgtttggccttgagatttgtttattgtcatagcaaaacttaatcttataagaaattgtgttcgtttaaatgggaagccgctatcttcatccacatttggtaagaatggtattcttggtatgaagattctttttcctctgtggtatcctacaacaattttagcatctatcacagttgatttgaatgcttgacaaatcaaacgggttccattgaataacccatttgaaggattaatgtttctaagcaacattataggacatgtaacaccctaactagcataggcgtgttacgagatttttaaacatactgtgcag

SEQ ID NO: 309003 - DNA, 913 bp, Cannabis indica
aatactgtcttcatttattgagtaattttagatttattgatggtaaaaatactgggttttcttctttctagtctttggatatttgtgggtgtgttttagatttagttttaattttaattattgagtaattttgtgtgtttttttatcagaaaaatataatacgtttgaataaaatagtgggaaaattggcagtgaagaacagcaagggtggtactatatgtatttcttgctttctcttgttattaatcatcttttcttttaatttgttattaatcatcatagaatccttgtgcaagttatttttttatttggttttgttttcgtgtactagaatcaaaaaactggaaaattcactgttgagtcggcacaaaaccaatgtttgttaatgtattcaattaatatgcaccgctcatatatatatataaatattctcttaaatagtttcaattaatattggagattcataagcacatatataacaaaacccctttctctgtttgtaattataagtgagtgagagttaaatatccattccatggtaattactcatattaatttacatactccttaaatatatatatagtaacttatttggttacgtacgttcatcatctgcatatatagtaaagaaacagacaatgcgtacatacgacataataaaactatataaattcaaaagggccagctatatagcagagagagttctgatcaaacaaaagcaatgatctttatgttgaaaacatatatatataatataatatatatatatagagagagagaggtgaattgatcaatcaaaagtttctctctatttgctttatgtcaattttctacttcaaattccgaaagcatgttaattatagtacatctttttatatgttagcagcctaagactataaagaggttgcccaca

SEQ ID NO: 309004 - DNA, 2730 bp, Cannabis indica
ttccaattagattttgagggttttgatgaaaatggtctaatttttataaaattatagatttgagagttgtaatggatcttagtctgtttaattttgtttccatttagaatttaagggttcaatcccaaagaaaactgagcagctctttattatgccctatgttattcatattgttgtatggaaattataaatatttgttactgcaatacatcaactaaaggaggagcaactaaaattgccattctttcatttaactcctatttattcgtactttgaagctgcacttcattagtcaatagtcagtactttcaagatttgcaaattttgtcaagtattgtacgtttgttaattatatttcaaaataatcatctttttttttcatcagtttattttatatttaattatgaagaaagttagtttggtataagtattatttacggagcaaaaattttctctcctgaaaagttcaaactcttggagaaagtcttcatagtttcattctattttaatttttgatgctacttctaattactactaggttctttgtatgaacaactcaagaaaagatcaagaacaacctaatcaaggcaaggctcttctctgtttaccaataccaataattcacattacttaagttttttttttccaaaaaaactaataaatcctaactgcagcagttgcaaagtcagccaccataacaatatttgctgcctatgctgaggacgaggcacaaatactgactatgcatttcctccactaaaccactattttttacctttgactttgggagtttttttcttggttattcctccaccaaaccaaaccactattttctaccttatcaaggctaatggtgttggtgattgtgatgacgaccatggagggctcttcttctccaccatttgtttaaaatccatcaagtatttgtttattgggtttctgtttgtttcagtgttgcttctgtttgttttgctctgattttgctattactctgtttaccctttatgcattatggaattgttctgtgaccattttgtatcatagatagaatagaactagtacacccaaatatataacacattaatttgaatatatagacagaataaaattagtatacccaaatgaccaaataatatgccaataagattattattgagctcatgggtttgagaggcttcggttttgtgggtttagaaccgtcttcgtctgtgagtgatggtcagaagaagaaaaagttatgaattacggtaaaagagaagaaaccatgtagtggtggagctgtgagaaggaagaaaaagataggcggttcaagtactcattaggattttacaaattaatatggtatagattagagttatagcaaagtaattgattcggctgatctcatcacttcggccgaactaattgagtaggctgatcatatcttttgtgatggaactttacattaatatacttgtaggaaataattataacaaacatattactaaaaatataataagcccatttataaaatttattattatatatagctaaccaaccacaacattcatatcttataattaatataaccgttacattatcttaagagaaggattgtaattagatatgtactatttggtagttataaactcaaatttagacattatttagtaagatttagatcaaataaatgagaaaaataaaaagaaataagggtatgcagtagataataatctatcttcagtctatatttttacgacaaaaaaagaagtcttattattcggacatattattaactttgtacttttatactttgtcagtttatgttaatcaaactaaattaagttatattgatcacgaaaggattccaagtgttgactgatttcaattttatagcaggatgtatacaaactttaatgctactaaatgaggatcaagatcaatttcttactgtacagatagtaagtggttctttcatttacaaaatgaaacgaaaacgagattcacttgaagccaatagaaaacatgcaatttataaaagacgaagagagctttatgcattatgaaaacaatctaataatatgaataccacaaaaattaatgcttctgaaaaattgattgagatgaatagtcaaattaagaatggtgaacaacatgaggattataagagagcaacagttaacaagcgtaggagagaaaattatgctttgagaaaaaaggaaaaggaaacaaatgtagataaaggtcctgggaaaatgagttctgcggaaaaagcatgtatatcgaaaaaaaaaattcgagaatgaaaaatcttcttcaactgtgggtacaataactattcatgaaaatagtgctattctacgaaacaccaagcataaaaggaattatgaaattataaatcgaggaataataatcaatgaaaatgttataggtatgatatgaatctaaatttttccattataatattaacatcatcttatttgtatctttttgataaattaatttatgtttataggtgttggaaatggtggtaatgaagttgtgttagaagtaaataataggagagggaaagagcatttatttatttttggcatatttgaagttggtaatacacatattttattaataatagttgtttctcactttatataaatggtttagattaaatttgtataacttcttacagggtcaacatctacacatcaaacgagtagaaaaaatttccaaggtatattttgttggaaattattt

SEQ ID NO: 309005 - DNA, 665 bp, Cannabis indica
aaaaaaaaacattttaaataaatcttggataattttttttgcaacttttcgtaattatttagtgtcataaggttaattaacgatctgatttctttataagacaaaaacataagttggtattgtttcattcataatttcccatttaaaattttcttgatctatcaaaaaaaaaaggtatatatatgaatatgattgtccatgtcctagcaaacaatggctcaagttctattcttgttattagagaggcttgagattctagtggtgattgtattcatgatattatttattttgactttaattaaaaagaaaagaaaaatatattatctatttgatagtattaatcctttgagtaaccttttcattttcgttttgtttagtgagatggttaaattatacttttaagaccaatgtttacaaactaataaataaaaatgacaagtgatcattttatgataaggttttagtaattggataaataatatatttgatgtgattaaaaaaaaaaaaaccttgtgaatgtgtgtttgtctcacaatgctcatgtgtgagaaatttgtagtgtttataaattttatattatatttagtagggaaaaaaacaaaaaaatacaaaaaaggaaaaaaaattacaaaatactttgggccggcccattaaacatttataca

SEQ ID NO: 309006 - DNA, 1539 bp, Cannabis indica
aaggagtcattatattctgctgtacccaatgtaaggtttcctaaactttatatgtgtttacttcattgttttagaattcatatgaggatgttaattaaatatacatggtagtaaatctagatcctggtaaaatatttccaacatgagcatagtactgattatgacttatatttaattccaaaagtattaattgacgctatcatttttttacgatcatagtaccgagtcagaagtatgagcatagtattggttaagagtgatattatggtaaaatgtacttttgggtatagattgatggaatcatagtgatatggtcttagtgcttgttaagactaatataatggtaaatcttaccaaacgtaagagcgttcttgattcatctgttaagacttgtatataggtttatggtagcatagctccagttcgattatatgtttttatgttttaagcttttcttacgagtctgtcgactcacaattattatttttatttgcaggtaagagccaaaactaaatcgtagcgagtcaagagctttatgaagattgtacatgtaaagacctagagtgtttatgtcttcggggctatttaggctcacattttgttagtctttgggctactgtttttgtacaaaacatattttgaaaagagttgtgaaattttcacaagatcctgtaattttgtgaattatgtttaattattaaagtttaagtttatttaaaaagttttaatttaatcatattttttagtaaaccctttgattagtaaaagagtgcgaagtggttaagaaaatattgtagcacgtctaaactagtaggtcgttaaaactaagttgccgcagttctcctttcttatgttgtcaatatggtgcgcttccttctcagccttatgggttgcctcctcagtcttcctacactgcagctaaagaattggttaaatctttgttctaaccatccactgagttaagcaaagtttgaaggccctacctctcatctaccagctcagtgacttagttagcttttccaactccttctctaagtcctccactttttcctggtcgagcagttacttcttcaacgagatcacctctttggcctccttggcagctttgtttgcctcgccagcatcataaatggctatttttagttccttggagaggtcatccagttgagaagtagctgaattaatttgactataaaagtgggagaacttgatgttaagctgaaagaaggacaataaagagtcaaaacaaaatagtcaatatatttgctgaacaaaattattaatccctttaccttattagtatcgtagaaaaaaccgctcttaaacatgtccaaccaagccgattgagcattcctcatcccctcattaacatcatacatgacacggtcttgatacactttcaccatctccttaccctttttcaccttgagacatagggcgccataattagccatagaggcctggggagtggaagttattgtaacgccctaatgctaaggcacgctatagtgcttcttcaattacagtgcagtctttgct

SEQ ID NO: 309007 - DNA, 2789 bp, Cannabis indica
tagaatcaatgtttatgatgtatttgttaattatactacaatgaaatgtacaattctaatttctttttatatctcttctaatatttaaataaaatcatagtagctaatttatataaagattgtattttcaaaaatgaggtataaccaccacaaccactacctctacctttggtttaccctaaaagatgaggaaaaatatgatctttttagatatatagttttagctatgaaaaatagaagatttagaaacaaaaatgagctaaaaaataatggtgaaaaaatggtgatagaggggtgattttctatggtggttggtgaagagggtttggggtttctctagtttgggggtttctgggttggctgatcaaatgaggaagacgaagggctgggctagagttataaacccttttggcgtcaattattttgaaataaccaacggcatagggggcacaccctatgccgtcggttatttccaaataactgacgccataagtggcgtaaaattctcttctaaaaaattttcaaccctatgccgtcggttatttattattatgctgaaaaaagaacctctaaaggcttgttttgtagtagtggttcttcccctaaacttttcccaatatatacacacttaataggattgtttgggtctaagtttaccttttctaactcttcaattggcttgagttggttattatcattatggatcctaggatccaagttttctgtttctttctcaattttttcagttagaattaccattagttgatgactggctcttctatttttaagttccactctgtaacattctcaagctaacagttagtcacctcttactatccctactccagaatgtgtagggaactttaaggacaaatattttatcgaacttattgcccccaatccaattaaagttggaagacccatcaacacattgcagacagaagggatatcaacaattaagaactcttgcatttgagtcatagacaacggtggttcccccatagttaagggaagttcaattatgccaaggcttgcaacactgtcgcctatgaacccacacaaatttaccaagcaaggtcttaattttacttcctctaatcccattttctttaatgtttccttataaagaatgttgacattgtccacgagaaccctctttattcttttattggcgagttgaattgttatcacgagaggatccgcatgtggatatcgcacatgctttgagtattcttcagaaaagatgatgggtggttcgtatgactttgctttctccaaaggttctggagcaaatgttgataattcattctttacctcgttaatgtacctcttttgtgtactattgctgtttcctacgaggtgtggccctccagaaataaccaagatatcctcgccctttacgggggaaggttgtaatcttaggttattaggctgattaggctcatttctttgtgtcctcatgcactgcctaaaatacccttgcgagactagacttttaatttcatcttttaattgacagaattcttcggttgtatgcccaatatctttgtggaaacgacaatacttagttgattctcacttattcctcacatgtctcatcagttttggtctgcaaaatgcgacctaattctcattggcgagataaatatttttgcgagtctcatttaattcactatacactgaataaataggcacatacttctcatgcttcttttgttttttcttatcctttgaaaagtctcttgactcatcctttctcttggtatttgaagcatttagattttttacttttgtagtcgcggtgctcgctattgctatgctagtgctgggtttgtctctcgagcctgattttaacaactttatttcattctgtgcttcttctttccacacaaaatttatgctctttcattgaattcattgatattccttataggacgcccttgcaaatcatcccataattctccccttgtagtgtaaatcagtcgtaatcccagcctgtagggccgttaattgaatgctatcattcaaatttctaactttagctgcagctgtactgaagcgactcaagtatgctttgagggactctcctagttgttgtttaatataagtcaacgaggatgcttctagtcgacgatctctcgcagcctgaaattgcttttgaaatccctcgataattattcccaggaggttatggaatggttggtgaatttatcaaatcaactacttgcagctcctgttaatgaagtcggaaataatatgtatcacaagttgtttgaaaatgttacttgctcgcattatggtgttaaaatcatttaaatgggcgacaagatcagtggtaccatcatataattgcgagacatgcaaatttttaaattcttgaggaaattgtgaatttaggatatcagggtgaaatggttctgtttcttcatcagaatcataccctggtaatttttcatactctctatcttggtattttctaaatttatcctccagttgtattacccacaattgaatgggatctacaggctgttgatccgtattttgatgaagttggttacgcaggttaggtgcatttcaatttaagtgttcacgaagatctggttgccttcgatttaattgttcacgaaacctcagggtcttccatgtggttgcctcacagatggatcaggttgcgtttgaggagtggccctctgtgcagccctggctgctgtggcttctcgcttcaacttaatgttgggttttatgccttaaataaaactccatttcaatgtaatccattttattcaaca

SEQ ID NO: 309008 - DNA, 2991 bp, Cannabis indica
tatgtgaatgtccaactcaaagtccactaattattgtattattgaaatttaattttttttatatttattttcaagccttatggtatttttgacaagtgttgctcaaactttgttgtatttgtgatagtttaattattggtgatagtccaaaccgcaaaaattgcactccatcgcaccattttttgcaattttttagtttcgcggtgcgggtgtggtttgggaaattggaaaaaccgcatgtgtggattggtttaaaaaatggtcaaaaatcgcactacccgcaccgcgaacacctctaaattttttttagcacacttaaaaatataaaaatacaaacaaatacatttataaaagttttgattaatatttatttataattatttagttttttaaaaaaaaaaaaaattagtgatgcctacagtgcccacctaaatatggtgggacactgtagacaaacccaaaattgatattacaaatatcgtgcagttgggcttgctttttgtgtaatatcacactataatagggtttttgcaggcccattggagttggccttagtgacaacaagcatgagaaccactctaattatttctggtttaacaactactaaggtttcattaaaatcaaatccacattgttgatgaaaacctttagcaacaagcctgaccttatattgtactgtgctgccatctgcattttctttaattttgaaaacccatttgcaaccaatggagtacgtaccatgaggtaacaaaataagatcccagcttttgttttcactaaggctctattttccgagttcatagcagcattccatttgggatcttcaagagctttcttaactgtagtaggcagagagatgctatgaacacttttggcttatgaatgccgaatttggctctagttttcataggatgttggttggtgacaaggggagaagatgtagtggatgatgaagaagagagatctggggaagatatatgagagggaagagcaacaatatgggaagaggaaggctaagtttctattgaagagcttgacagagggagaaaagaattttaagaggaggatgatgaagacgactcaattggtatttcaggtgttgtagggaatggcacaataagtggggatgcagtaggtggcactgaggccgtgggggtaggtttgagagatgatatagtatgatttttatagggaaaagcattttcattaaagactacatctattgacatgtaaactctaccatatgtagataggcatttgtagcctttttgagtaaagctatatcctaaaaaggtgcatggtgtagacctataactcattttaattttgttgtaaagtctgaggttgggaaaacataggcatccaaaggtcttgagagctgaataattaggtttggaatgaaataatatttcatgtggagttagattatgcagcactcgagtagggagtctatttatgaggtaggcaacaactctatatgcctcatcccaaaattttaaaggtagacttgagtgagctaagagtgttaaactagtttttaccaagtgcttatgttttctttcaactacaccattttgctcatgggaatgtggacatgtgactctatgaattatgtcactgctctctaagagatttgtaaatgaactgaactcccctcctcagtcaaattgtaactctttaatttttaaattaagttgaagttcaatttgtgttttgaactttatgaatgtaggaagagcctcatccttagttataagtagataaatccatgtatacctagaatatgcatccataaaatttatgtaatatctataaccataaaaagagtctataggagcaggcccccatagatcagtgtacatcactggaagtggtgcagtgtaaactgtttttgaactagggtaaggaagtttgtggggtttaccaagacaacaagttgtacataggtcaaaaatagttttattgttattagagatgttacaattttccattatagacataacagtggctctagctggatgacctaacctgttatgccacaatgtaaagttgaaaataggtacattggaatagaatgaaaacattgaaaactattgttattaggacgaggagatgattgttgaaatggcatagtagcagaattgtggcttgactgagaggagacagtgggttgatcaaactgtaaaggccattttcaatattcccaaccaacaaagtcttcacattgacctaatctttgacacaacaatggttaggatggaattcaaaaaagacacgattatctttagcaaattgatttatactgattagatttttagtgattggaggaacatgaagaagattgtttaaataaaatggttgagaactaaaaggagaattaatagtggaaaagccagtgtgtttgatgtgcaaacctgatccatttcccatgtaaatctggtctaagccttggaattcttgagtattctacagattggtaacatctgaagtaaggtgatgagttgcccctgagtcagggtagtaactcgagtcattcacagtccctggagtatcaagcatagcttgcattttagccatatttactaatccaccattgaatgattgaaaatactcaagacctgtaaaagttttatcaaattgatcgaatcatttgttgactgtatgcccttgtttgtgacatagttggcactgaggttttgtggtagaagagcctcgaccacctagactaggtccacgatagccaccttaagagggtctaaatgattgagagaatggtggatacagtggtggaggaagtaatccatagctattgtgcagaagagtaggataggatccaaataagggatagctagcacgaggattaaatgacatagctctaccagaatttgatgcaaatgctagtgaatagtgagattcaagtctaggcgatgaggtttttgttgggattttatgccctaaataaaacccgttacaatacaatctgatttgtta

SEQ ID NO: 309009 - DNA, 1081 bp, Cannabis indica
ttggcaactataaatgttgtcccatattacacctaagagtttctctggttgtataactccttgtacctctcagcatgatccctctccgtcttggcatctgctttataattggccacagtagcattaagggaagcctcaaccctttgcttgacaaaagcatcaaattgagccttggcctcattcagagccttgacgatctcttctctttttcgctttgagttagcaccttcggccttcaagatttccatcttgtaggttagtttgttcactaaagaagaacacctctttgccatcagactcgcctatggaaaaaattactcatggttaaatacaaattaaaataactgagatcacaattggaacaaagatcgacaaacttactacaatagcttggctcttaaggcagtcgagcatgaaagttggatctccattggtcatggaagcaaatttatcagaacccaacctactacaagttactcgaatttggtccaataaatctgccacgaacggagaaggatctaaacccactctaggcctaagattctcagtgacagctggacggtcaaaaattgggggaagaggctcagtctttcttgttgaatttgtgaactctgcccctcgtctagtttagagctttgtggttctcctcttcgcatcgtcaaactctccattgaacctcttcacaaagaacttattagctatatccaactgaacaagattttattctagcaacgaggagggcaaacatgcaagatgacccttagaggtggaaagggaggaaagttggtcctgtctctgggcagttgaggaggaggagcattgaatggttttggtggcagaggttgagagcttgtgatctccctaccagaacaagtagttcgcctacttagtctctcagtttcctgagattctccttccttctgcccagatgactttgagctttgtctcctagaagtagcaagctgaagaagcttgtctttggcttccgccttacttcttttacagtctttgcccagggcggggacaaaccttttacaatgagattaaacaaggccctcacttcctttctcctcctcctctc

SEQ ID NO: 309010 - DNA, 597 bp, Cannabis indica
ctatattctataataattataaaattgaattatgtgaaatctgatattatacttaaaaagatattaggcgctctcttttatgcatttcaatcttttttcttgaaatgaagtagcgcaacttcatagtgttctaatctcgattttcaacaatgctaataatacattgttattaatatattattccttttttcttttcaatcatgttgactatttttgaacatagctcttatgtcattgttatgaaactataaaagcttagaaaaagttacattgcttgctggagtctttagcagtgctgtaattgcagattgaaaatttttgacatgtcggaaaaccggcacgagcacaattcgtctaaaaataaatattaatttaggtacaatacggtaagatgctacaaattgacacagcacaacattaagaaatagacttaaacacaacacgatatacccaaaagtacaacacgtaagcatgaatagactgaaaaaacaaattatatacgtatttactaatgaatattcaaaacaggatggactggcattactatggctgctgaattaatagtggaaaagggtattgatggagtcatcctttatt

SEQ ID NO: 309011 - DNA, 1800 bp, Cannabis indica
atttcttattaatttgtatttgcttatttattttgttgtgtgtttcgttgggcataatagctctctacgtgtttatggatgtacatgtacatgcatgcacctttgcttaataaaatcaaagtgtgatcatctttattattattattatatgttggattgtattgtatagttggattatatgtgggatagaaccatgctaaccactcgtcccagcttgaagtcgttagagaatcagtccgtacttgccacaaacagccgaaccaaattgctctcgcgaatgcacagctccaaagtaaatgaatcgaattctcatcatccaagttacagagggggcatagaaccgagtccatgttaaataccatacccagtctgactctagtgagaagactgttagataaaattttccaccagagcatcttgagtcggttgtggatccgtgcaccccaaagagttttccatttagcatagtcaggcctgcttgtgtcaatattcagggacagtctataggctgacttaatagaaaaattaccactcggttctggtaaccaaagccaggaatctttggtctggttgtttggaagcgatatgttgagtatccttctggagtcatcttcattaaaccactttctaactaaggcatgatcccattcattattgtggatgaaggtgcttaccatgctgatacaacctgtggcatccagtcgaggggctggttggagacatccccctggtacccatgggtcgaaccatatggaagtgtttctaccgtctccaatccttttacagaggccttttgtgagtgatgatctctccctgagaattgccttccacatcatctgaatcttggcttttgatttccaagtccaaaaaactctggttctgtaagtatctttccttcattagtttcccccacagactgttttcatccataagaattttccatgcccatttctgtagaaacgctttgttcgtagcaatggttgatcggaatccaagacctccagccactttaggtgtgcatagttttgtccaagataccgtgtgtagcgttcgcttatcatccgtatctccccaccaaaagtccctaaggactctatcaattttgttggccattgacacagggataacgtccgaggaagtcacgtaatttgctaacgttgaacctacggatttgattaagcatgtcttaccagtgctagaaagaagcttcgccttccatccttgaacacatttgaggaccctttccactaagtggttcgtatcctcagtttttttgattgatcggaagaggggtaggccgagatatgtagctttgttgttcattcttttcatgcccaacagttgggaaatagcttgagcttttcttgggctaacacctttggagaagaaaatggacgacttgagaccatttactgcttgtcctgaccaatcgcagtaagagcttaggcagtcgctaaatgatttagcttcttttatggaggcttgtccgaaaaggataatgtcgtccgcgaacatgagatgagtgatggccgaacctcttctcgtaagtttgaacccttttagcaacccagcctcctcttttgagagtagcagccttgataaggtttccgctgcaagtatgaacaaagatggggagagcgggtctccttgtcttaaaccttgctctggagagaatttttgaaacttcatttggacgaagtcaagaacgttgtgcattactttcttatttgacagattaacagaaaaagtaattttcaaacactaaaaatcatttttatcaaaatagtgaaaatctcacat

SEQ ID NO: 309012 - DNA, 1273 bp, Cannabis indica
tttatgccctaaataaaactctttttcaatgtaatccagattattcaatatcaataaaataacagaagtatttttcattcatttgtgtatgttttggttcatcttatcaattgtttatctatttgatttatagataagcttgtcagtggtttgattcgagataagcttgtttggaaaagggtggcatcgggtagtttttctgtcaaagaggcttattgcttggataatgaagatcggtttgggcctgtgcttccgggatggagcttcatttgctctaataagcttcacccgaggatgggcctttggttatggagaatgtgtagtggagtgcttcccactcgtgataaaattagaagtgggaatgaaaatgaatgtttaatttgtaactgcatgcccgagacccctaaacatctcttctttgaatgccattttgctagaggtgcctggtttggaagccctttaacagtgcggagtgatgagatccaagggaataccatccttgatatggtggttaacctttgcaaagatcgagatggggggagtttagagtaaatccttgtgtgctgctatgttatctgtgatgggatttggaagtatagaaactccctgcttcatggtggtaagaagctggacttaggccgctttatggatgatgtaaatgcaaagtttgaggagtttgttgctgtgcaaaatgaccatgtgagcgatctttcagacctttcgaaaggtatgatggaagggactcccttcaattcaaatttcatagttacggatggtgccttcaaagatggatggtgtggaatggcgatgatggggaatgacccaagggaagagaagtggcacacaagagcgaggagtgaagaaggcaaatctgccttggatgcagcgctgaaggcaatcggctttgccctggagtgggctgctgggatgaattggagaagcctaacaattttctcagattgcaaaatggctgtcgaagctctgcaacaaaggaaacttccggattggagggtggcaaactcgttctttaatgtggtggacaagctgaatttgtttgagttgtgtaatcttaagtttgtcaagaggaattgtattgcttttgtcaatgacctggctgttcaagcgagggtcttgaggctagctgattattgctgtaacggggaaggattgcccctgtcaatcctactttgttttaatcctaatgaactgaggttctctttcaaaaaaaaaaaaaaaaagatatttttcactttcattccatttttgaaattta

SEQ ID NO: 309013 - DNA, 1352 bp, Cannabis indica
agaacatacattacatatttagagtacataaaatgagaaattcaaacagcttgtcgcatcccattgatacgatcccatgattgtagggattgttcttgagcttcacgatatcaatcctgaagtagttaagtcttaatgcacgacttggaggaatgaattcatttgttgttcggatcatctgcccttgttttgctcggtcaggcagactttgtccgtgcagatacattacttgaagtctgttcggaacattttctccagccaagtgtagagaataacagacacgtgtcactagtacgcattgccatgtcatggtgcgaaaaattggataatatttgcccccaagtctgcacgggacttccgaagtcgcgcgtagacttcacttagtttgaatttgtgtctgaacgggtggcacgtgttcgatgcgcctgttggtgattcgatgtgattctgaccaaaggtcggtttgaaattgtatcctgccttaaggatgaatttagaatctttttatgcattctgtggaaaatttaaaatagacgtaatgttgctccgtttaacgaaaaaaagactataatttcttctgctgagtttcaggttgggactttgttacaagactttgatgatgctcaggatcatactgcaaatcctttagttcaggatacaatttctagtatggatgcaactcaaggtggtttgagtctagttgatggtaatacccttgcaccaggttattataaactaagcgtggatactatcgtggataatagtagaagtaaaatagggattggggcagcagtcagaaattttagaggagaggttgttgcggctttgtcttctccattgaatggtaacttgtctcctcttttggttgaagcaaaagccttggtttcggctctcaactggtgtttgactgttaagtttcctttaagtgtcattgagagtgattgtaacgtgttaattggtaaagttaagcataggtggaaagacaagtctgctctttcagacttgattagtcaaattgtgtcctttctctctaactttcctacagttactgttcatcatgtattaggggtatttgcggtgcaggtagtacggtttttgattatttttttacaccaactcgcacatgcatttttttaatttctcaaaccgcacccacaccgcgaaacttaaaaaccgcaaaaaccgcaccgcaaaaaatggtgcggtgcggtttatgcgatttggactatcactaaataattaaactatcacaaatacaacaaagcttgagcaacacttgtcaaaaataccataaggcttgaaaataaatatgaaaaaaaaaaaagttccaagtttcaacgatataataatta

SEQ ID NO: 309014 - DNA, 475 bp, Cannabis indica
ggggtcatgtgttggactactagtgatatatgtgaatagtatgaaataaagacctctaaaattaattaattaattgttattggtataattaagtagttttatataatattttttttatgaaatattgctactagacacctctatatgatgctaggcaccactagactatgctcattttaatgtccttgtaggtaatgctatatatatggattaagctttttgacacggtacgaaaccaacacgagcacgatccgacatgaaaaactatatgcttaggcacgacacgaaaaaaaaatatagacttaaacacgatgtgatacgataagccttaaaacataacatataagtatgaataaattaatttgaaagcatgacacgttaaaaagttcaataatttgataaataataataataataaacttatttatcaattaaaatgatataaataattaaattatgtaacgtccccgcttca

SEQ ID NO: 309015 - DNA, 1658 bp, Cannabis indica
aataaaaagctaaaatgcccttaaacatagatgtcttttagtaactttattaggatattaaggctcaattcgcagtctaactcgcagtccacgtgtagagttgtgcatagaatccagcgaggcccattcctggccggctaggaacctgtagggagtaggttggcaagccttgtgttgtgcagaggctggccggccatagagctagacaggggtggtcgacctggcctatttaggtggctggactgtcacttgtcatcctatttgagtgtcaaaatccccactggctaaggcgctgacttgaccttcttattggtgagttgtactaccacatggcgctaattttgtccacgtaaaaccgccatgttaggtgagcaaaaatcgagataacaagattgatttaggatataaatataagtctcggtcataatttatttatgtgcccatttcgaataatactaattaatttttaagatcttttgaattaagtttttatcagtcaggagaaaggcatttggcctttttaggcaactaggaaacaaatcgcgcttcgcgtgcggttgtattttatttaatgatatttaagtcataaaattatattaaattttcaaatttaatatgagtaattatataattatttttatttttctgaaaaataaattaacatcaacaaatatattatgatagagttaattttaaaaaatataaatataaattaacttaaattttttaaaatatatattagttgataaatttataaaatatttcaaaattttatgactttataaattacaataattatgaaatatttattttttgatagaaaattataaaatattatccacatggatttggctaatggttatattcaactacggtttataatgtatgggtttgtagttatttatattttgctaataaaatataaatataataatttattattaatatagtgtgagaaagaataagatagagagaaagagagaaaacatgcatagggatttagtgtagtggtgagaaagagagtacatataattttgaaggtggtgatgttttaaaaaaaaatgagagaataaattctaaaagatattgatgagtatttttctctatataaatctaaaagatattggaataaattctacatatatatagattaaaattgacttccagaccaaaaaaaaaaaaatctataattaaaaggcaaaccggggaagatataaacttattgtaaattaacaaatgtaagctatatatacataccaatataagtactacaaataatcttaagaaaataatattctaaatggatcataattgatgaagatatgatcaaaaaatgaaattaaaggagctatatatagctagagacttaaattgatatactaatcatgttgtctggttgtccatatataaaataagtggcaaacaaaaggtgtagagtcaactgcttcaacaaactttacaatttgctactcttaatgggaactgcaattaacatgaccactatggtgcttagtgattgccaccattacaattcaatattgcatatttatatgtattttcaaatattatgagttttgtgtccagagaataaaaacaatagtttgagttttattgtacattatttatatatttttttataattacataaaatattaatt

SEQ ID NO: 309016 - DNA, 1165 bp, Cannabis indica
attccattaaactcaaggagacacaatgatgtgtggtattaaaaattggaaagctcaggattccattctgttaagagctcttatcggcttctgcaacaagatcgaaagggtgaaatgcagtttctttctactggtttttggaacaaagtgtggaaaattcgagtacctccgaaagtgaaaaaatttcctttggcgtacaccagccaattgtttgcctactacagttcaattgaggacgaaacatgtaaatgtgaatgattgttgtccgttgtgcaaattagacaaggagactacatttcatttgttcgttgattgttcatttgccaaatcgtgttggttgcaaaccggcattgatgttgataataggcaggtggttacttttcttggttggctcgacagtatgctacaaaaattggatggggagcagaagaaagtgttggttatgacatgttgggcattgtggagaataagaaatgatgtagttaaaaataaaaaagctcctacggtggcaggggttttaatcttagctcattattgtttggagcaatgggataaggcacaagataaacaacatgttcctcaggctgcatttttactgatgttgatgcggctgaagtatggcacaaaccagcagcaggtaccttgaaaataaacgtcgatgcagccctctttgcggttcaggtgtgcacaactttgtctgtgtggctcgtgattcgtcggggactttggtggaggctatttcttgttgtcggccagggttagttgcaccagaattggctgacgtgatgggggttagagaggcgttaagttggataaagaagaaatcttggcaaagtgtaattgttgaaactgatagcctcattattgtccaagcaattcggagccctcttgaaatggtgtcttattttgggagtgttatttctgattgtaaaactcttttagaggagttacttggagtttcggctatgtttgttaaacggtctacgaatagtgttgctcatttcttggctagagcatcctattctgttgttgatcgtattatcagaagttatgatgtttcttctgatttcctaaatgtaatccttaatgattgcaattaataaattgatgaattattttcaaaaaaaaaaaaattagatgagggcaattaggtcaagtgaaaaat

SEQ ID NO: 309017 - DNA, 1384 bp, Cannabis indica
tttttcaaattatcaatcctacgaacatgatagaatggaacacaaggtggcggaagccaatgttcatgaagaaatgagaagaaatatactgcaaaatgatggagatttaaatcagatcttttaggaacttagattcatcgagaagctattgcaaaagcctccgttggggttatgattaatatagaaaatgatggagatggggtattaccaaatgctctgttgttgaaaggtggatcaatccagaatgctgacatggatagtacggaagagggtacaaatggcctttcgaatgtgggtggtggtaacgctaaggtgattgggaatgatgagctgttaaagaatgtggctcaggagcccatgattcttggtggtcctagtacgaagaatattgttaggaaactgagccttaatagtgaagggcccattgaggagaaaactagccatctcatgatggtctttaaaggtattcttcacccaaatcataggtcggccagcaaagctactaaatctaataataaaaaatgggtcaaatttgctccctgatttctaagtggactagttcttcgtctatttctactaggtctggggttggaaaaaagaggcaactaaaggatattgaaggcccttgtagctggatgggagaccttttaatttcagggaaggatgggaaagggaagaaaacatgtctaactagctatcccaacaatcaccttactattgattcgaaaccaggttatgaatcagctcatttagatggagatggtcagaaaacctgtactcagaaggagaatgaggagtatagcgagtccacgacagatgcagaaacagtgcaaaaatgagcataatgagaaggatttttccaaggccgaggaggcgggcctatacaagcccccaaccccccatgttaatcctttcatggcattgtcgggggcttggaaagcctcgggcattaaatgtttgaacttattttactaggatctagatttactaacatgtatgtttgattataaactataatctaatatcctaaatataaatttcttaaaacaatgaaataaacacatataaagttacattggtggcagcagaatataatgtctatttccattcaaatctctaacccttgatcccaactgtggtagagtatgatcaagatctgaacctcaacttctcctcattcgatggtgtttaacacggtcttccacaaaggtctaaatattgactttaattgtatggacaactccccaaccactataggctttgaaaataacagaggaagaagaagagggattcgaatattatggtggctctcattattttctaattgtctcataaaggagtctgatcatcatctaaaaataaaaaccatcttattctatttata

SEQ ID NO: 309018 - DNA, 588 bp, Cannabis indica
ttttgaattgttattgtatatcgtcttttggataaatattttataacagggattccctgaactcatttttactgtcgttataatgtctgtttttagtgttttattttagtcaagtttctattatcctcaccgtttttgataattaaataatatattagtattaaactagttttataaattcacacatgtggcgttcctatagattagtacgttacaccttgagtcttactttaagtgtgtcaatcaacctgagtggaaactactacttgatgatttacatgccccttagtcaaaactaaaagttttcctattgatagatagtatgaacatactaaaaaatgatatttcgagaaaaatgcttgttttggctgctaaaaatggtagactgtttctagaaaatagcctgttgtttttaactgtagaaacataaagaacctcttttctcacacaaaactaacccaaatcttccaataagctcgagaacacctatttggagcataaacagcataattcatccaaataatctatcatcaactaatagaaacaaaaataaaacttatttcaatataatcaaatttattaattaat

SEQ ID NO: 309019 - DNA, 1875 bp, Cannabis indica
tgttgctgagatatactctgcttcagtaattgatagagccactgccggttgtagttggactttttagctcacacaattacccctaattagaaagtaataagctgaagtagatctccttgtatccctatcgcctacataatctgagtcacaaaaatcttccaccaaaattggattttgtgattgtctaaacaccaattcagtgtctgtaatccctgttaagtacctaaaatttatttaatagctagccaatgtatctttccaagattagccatatacttgcttaggacacttatagcataagcaatatcaggtctagtactcaccattagagatactatagaaccaactgcattagagcaggatacgtagctcatttcaaactcatattttagcatttctttaaccaatttactctagagctttcctttctgattattagcatgtcatttacatataacagcaagtagatgacatctttgatattactttcatgaaaatataagcaagtgtcatagtagctcttagttaaaccctatttagtcatagaagtatcaaatctcttgttccactgtctaggagattatttaagtctatacaatgacttaacaaatttgcaaaccaagtgccattttcctttctccacataacccttaggttgttccatgtaaatatcctctttcaattaaattgattagctaatgccaacataagccttatagttttgtatttggagggaaaatctcaatgtagttaatttctttcttttgtgcgaatctcttaacaaccagtctagctttgaatctcacaatatacaatgctacaaaacatgtcataaaatcaaataaagaacaattatatattttttaaacagttattatactacaataataataaaaaatagtttaatattttatcactctctactttataaataagaatgggatttcgtctactcttttgttactatatttgtaaatatttaattttgattaaccaaggcttataattatatagcttttaactaagaaattttttattcctaactaaggtgggacaaacctcaaattattttattcacatttcaaacaatactcacagtaaaaaattaactttgatccatattgcatttcctttgaaatagtatttccttaaactttcaaattaatcttcttaatttatattctaactgcatttcctttaataaaaaatagatatatcaagtgaccattattttttggtaaaagaaaactaaacaaggttcactataatttatacaataatttggaatatgggtataagtaagaaataattcaaaataaaaaaaataaaattgaaaaaaaaaaaaaaaaaagagagagatcaaatatatattgattagtttgtaaaattgtaaatttttagagataagttaatctattaatcaaatgagtaatttgcgggataaatacttaagtttaactttcagttgtaaataaatacttaagtttaatttttggcactaataatacctaagttatatttttagaactctgtaggtacctcaccattaaatattatgtcattatccatgtgtcattttcttattggtatatttaaattatttttttttttaaaaaaaatacaaatttaatgattttgaccaatcaagaattgctacgtggcaatttacttaacaattaacagtcaggtacccaccaaaatttcagaattacaacttaggtattaataccgttagaaattaaacttagatatttatttgcaactggagttaaacttaagtatttatgccacaaattactctaataaaaatatactctcatattatatttcattaacctaacagatataatgaagacatcatctataaaagtagat

SEQ ID NO: 309020 - DNA, 2023 bp, Cannabis indica
caatcaggctactaacatgcttcctgaccgtcttttcttataacatattaaataaacaagccaataaagaaataaaggcttactgaaccgtgagtcgaccttatctctgctgatgattgtacatgtcgtgacgatcttcagaagacaacctaacaactctgataccaaaattgtaacaacctactagattaggcttgctatcgtgattttatcttattcgtgcattccattgataattagtgagtttctttaaaatcgtgtttaattaaaattttacttaattaatattaacttaaaaatgaataaccattatataactgggagcctgagtttaaaatatatacaaaaaaatatgacatgtttattacaaaagttgtcgcctagcgaccattaaaaatatagcctactgtcacaaagattgtcgcactcactgttgtttagccttgccttttcccttacctacacatacaaacaataattatgagtcgatagactcagtaagaaaagcataatcataatcataaatataactcggattacaattaggcgcccatacacccagctgtaatcaaatccccgcgccctaggtgttactgagtctagaacattcgtacgacaataccgattaaatatcagcctatactcaatactctagtcgtaccgtcatgatggtcgaacaatggctgacattaatcaagacaatcctaaattttatgggtgtcatcaagaatgatcgggtgacctgtgccacatttcagttctaggaggacgctcttgtgtggtgggagttggtatccttcacccgagacgtcactataatgacttgggaagagtttcaagaactattcaatgccaaatattacaatgagtcggtctgcagtgctaagcgaaaagagttcactaacttggttcaaggagaaaatatgtcagtaactgaatatacaacaaagttcaatcgattagccaagctggcttcaggtgtagtgcctatagattttagcaagaaagaaaaatacttggcaggtttgaatgccaagattaaacatgatctggtgattactacaagtgatacaacaacctatgcttagattgttgaaaagactatacgagtcgagggtgtagtgaaatttctttaggagctctaagagactccaagtgttggttggaccaccactcttcctacttatagttacggtagggatggtggtgatttcaatgttgatcaaaagaggaagactttcccgacgtcagatggttcgggtcaaacaaaaaggttctgagggaactaaggtaaaggtggacatcagggttattcttatccttagtgtcctcattgcaagaaacatcatccttgtgaatgcaatcagaagacatgattccaatgttgcctggcagggcattttaagagagatttccctcagacaaaaagggaagaatagaagcaaaaggcaaaacctgttccatctcgggtgcttgccattatgcaagtggatgctgcagctagcccttccgtggtaacatgttagcttcttcttgacgaatcatattttattgtattatttgacttaggggctacacatgcatatgtggcatcgagagtaattaataaattgggtaggccttgttattttattgagatagggttcagaaccctactatctagtggagaattggttatctccaaaacgtggataagatctatgccaattagagttgaaaatagggagttaaagtgtttccctagtggagttggaattaatagagttttatattatacatgggatggactttctgtccaagtattcaactagtattgattgcaaacaaaagatggtaacttttcaactgaagggtgaagatccatttatttatgttggatttattcaaggttctcacattccgatcactttagttttaagggctaaagatttactgcataatggatgtgtaggatttttagcggctatgattgactccagcaaacatgagacattgggtctgaggatgtcagagttgtaaaaga

SEQ ID NO: 309021 - DNA, 1847 bp, Cannabis indica
taaaataatttccaacagtaggaccattagagagtcagactttcatatagtttagaacgttacaatttgcggggcatcattgttagacattggaggtttcaaaaattagcagggattgataataaccaaactaccttggagactttaaattctttgatgtatgttaaggggcaaaatagtcatttcttttagtaccttaatttgtcttttgtggcattagtattcagattattaagctaggattacttaatattagttaatattatctcttgaaggggaaaatgttagaaaaacgtagaaacaactatctctctacaaccctctctctctctcgaattcgcaaggaaggacagctagggattgtgagttttctgctcatcattaaggattctagcttaattttaaggtcccaacccaaggtataatttcttagcctctccctctttgattttctcaagcttaagatgagttatgatggttgaatttgagtagtaggctactgttttgtatattagtgtgtgattttgtgtactgaagtttaattgagattgtttatgttgaattgagttgatttttttggttatagtgatgtttgtgcaaggtttgagtttaaaaattcaaaccttgccctctaatggtggattgagtttccgtgtttaattatgaggtttattgcttgattttggttcattgaggtatatacaggtgtcttggagattattgagaaatttagagttgaattgtagtgttgaggacatttttggtggttcctgcactaaaccggtcgaccagttcaggggaacctgtagcaactggtcgaccggttggtcctcaagaaagtcccatcaaactggaattccagttggggaaccagtctaccggttttggtattttggtcaaccctagttttcccacttttgtaatatttagggtattgccatattattcatcaatagggaaatttctagttttaattttaggaccccagaaagtgttttagcgtgtctctcatcaggattacaaatattgtgttttaaggccctgtaaagcgtcgagctgctattccaatcaggttgatcagcacacctaagcacgaaaataagataagatagcataaagtatatatatgtgaatgaatgcatgttattatttgtttacactactaacactgactaagatgtagctttaaggggtgttagtacagtgtagggttttagggtagttacagtgttgccaacacgagtaccacggggtacggagtgcatgtggtacaacacccagtaactcccggaagtataataatgaccctaccaacacaagtacggagtcggtactctagtgcatatggtaaagtggtcgtacttccattgagaacgttcttaaccatttagtgagcttggtaattgggctcaggtcggcttaagcataaagccggtattgcattgtttatatagatattatgcatattttactgagtcagtcaactcatcagattgctacttgtgtaggtaagggtaacgctaagctcgaggagcagtgagttgggccttggcaagaattgtacatatcgcggcgcagtgcaacctggagggttccaatcttataacattttaggtttcattttgttgttgccctgtagtttgtaagagaaataataaatattatgtaactttatatgtaatacatgtattttcaacaacagttttaaactcgggatcccgatttacgaggttatataaatataatataataagatacttttcgaattagcaaatttttaaatatgggcattacatctatggtagataagttttattgtatagtatattattttattttagatcatg

SEQ ID NO: 309022 - DNA, 1448 bp, Cannabis indica
cacatcatcaatacaaacggtatttttaaacaaaataaacagaaggactaaatgtatgcatataaaattatacaaggactatttataacaagctgaatagattaaggggcataatagtatagtgtcataagtacagggggtaaaaaagataattattctttttagtttgtatagattggattataccttgtttgtttgactacagattttaccagatgaactataataaatggaaatcaaaaagcatttgaactattatactcaaaaaataatttgaaaaaggttaattataattttttgccattttaacttttcatatctttaaaatttttcttcaattattaagattgttggatttaaagatttttgtctaatttctttcagttttgctaatatgaagattatccatattctaaatcgtgtcccacaaattttaatatttacaaaattatgctccttgaattttaacatgtactgaattgtgcccctaaatttttatcaaaaccagacttttttttaaagtaaaattaaacaaaaattcttaaatctaacaatcttaataatatttagagaatttttaactatacatatcaaaattgaagataaaattccaaattagcctaagaaaaaaaaaatgatgtaatatagttcaacctagcaaatatataaagctttgataatatgggattttcaagaaaagtcaccatgtaagaactcaattttaatcatgtgtttatatatgtatgtatggcaatatattcatctaattgatatgcaaaccctttcaattttatggttagctcaattagtgttgtttatattagtatggtcaacaaatgttttgagtgacagagtttataggtgacttacatttctaataagccctaatatatatgggttagttgttttatattaatttttacgagtcattaaaatataccttttgaattataaaaatgattgcaaatattatttttttagttacattttgcttatttttgtatgtaatcataggtcacaaatataattaaaagtcgacttaattaatttaggcaagctaaaattaagtctatcatactaaacatacaaataattaggacaaataaataggagtgtttattgaatcatgtttttaggcttatttagattcgatctaattatacattagatgttagattttactttccgatccgatctaattaatttcagtcatcaatcgatccaacatccattgaatgttagattggatcggttctatctgttggatgtattatatatatttattggttcaatatgggtttattcaatattttacacttagtattttttgatcgaattagatttctccaataatttagatcccgtatgtattggattggactggatccatctaatctaagaaaaaaagagtaaaattttaatgttaatttttatatatacatatattt

SEQ ID NO: 309023 - DNA, 678 bp, Cannabis indica
tttatatataaaaaatagaattataataaattggatattaaaaatatataaaaagaaattaaataaataaaagaagcagccacacatctataattttccaagtggtacctataataacactagctagatagtgttttagtttatttaattttgagtgttgtcttaaataaatatatatatatgataaattggtgaaccatgaaccaactaaccctgaatattataaacaccactttttttttcttttaattaacaaattttttttatgtatgattattacataataattgatgaaatatacaaaatcttttatatacttttgtctgatagctttttttacaatattgtcatatatattaagatatgtatagtaattaagtacattaccaatcataatatatatatataaactttaacttctaattacataaaggtaatgctgattcacaacagctttaattagtagtacaagttagtataatgttattattagttaagttcactaactttttattttattaataataatatatagtaatggcaaagtctagagtaaatttaccaaaattggatattttggtagattttttatttatttaggtcatttcgaaaaaaaaataaattcaaatatttttttatatataattgtatatgttatacatatttagaatcatctat

SEQ ID NO: 309024 - DNA, 2657 bp, Cannabis indica
taaatatatatatctatatatatctgaacaataaataatgcataatacctaacaattaatggagattttttttttgaaacgtagatgtttttttaatttaatcatttatatttacttttaattcttttaaaatgattaaaattaagtttaattctcttacaaaagaattgggattcgggtttgaaagggtgatagctgcttatttcacaaatttgtatggtgctcaagggcatgcttaaaactccattactaatgatatctccttctcaataaatggtgatcaaaatgaggaacttttaaagcctattacaaccgacgaagtacgtactaccttgtttcaaatgcactccgacaaagtccctggacctgacggaatgaattcagatttcttccaaaaacattgggacattgtaggggtcgacattacatccttggtgattgagttctttgtgacagggacccttccccctgatttaaatctcaccaacctcgtattgatacccaagaagaagaattttatggttatgagcgacctccgatcctttgctctctgcaacgtcatttacaaagtggtctcaaaagtccttaccaatcgaatgcgcaacattattgatcagataatttccactactcggagtgcattcatccctggcagacttatatatgacaatgtaatggtgccgtttgaagtcatgcactatcttaagaggaaaacaaaaggaagaaaaggctatatggccattaaactcgatatgagcaaagcctatgaccgcgtggaatgggattatctttgggaagttatgatccatatgggctttcacattcattggattgatctggtgatgcactgtgtgtccacggctaggtacaatgttattcatgatggtcattatattgggcctatcaatcccacaagaggcattcgacaaggaaaccccctttcaacttatttatttatcatatgtgcggaggggctttcatcgcttattcaacaatatgaaacaaattggatcatccatggctgtcacattgctcatggggctcccctaatcactcacatgttattcgccaacgatagttacctctttttccaagctactaatgaagctgctgaaggtgtcatgtctctcctccattccttcgaacatgcttctggacaacaagtaaatgttgtaaaatcctgtgtttttcagccccaacattgataatcaaagtcagcctctcatttgctcaactctacaaatgcctgaagcggatgaaggtagtctttacttaggattgcctaatatcattggaaggaacaaatcagctatttttggtttcctcaagaacaaggtaatggctcgtattaatagttgagaaggcaaattcctttcaagatccgggaaagaaattcttctcaaaactgttgtacagtcgttgcctacatatgctatgagtgtcttcctcatttctattgatatttgcgaggatatcgagaagctaatggctagcttttggtggaagacctcttcaagtaaaggaaatagcatcatttggatgtcatggaatcgtatggtgacttctaaagatgatggtggtatgggattttccatctccacgatttcaatcttgccatgctcgcaaaataaggatggcgcatgctatgtaatccagatactttggtgggtcagattttcaaagccaaatacttcccacattctgatttcttatcagcggagcttggtaataatccaagctttgtttggcgtagcatatggggagctcaaaatctggtgaagaggggagccattcacactattggtaatggggcatctactagtattctttctcatccatggctaccaagtagtgacaatagatttgtttcctcaactcatccgtgcctaatctcaaacaatgtaagctctctattttctatggattctcgtacttgggatgttgatattgtacgtgatttatttccccctcgggaagctaacatgatattgggactgcctttgagtcatcatgcctctgatgatttttggtcatggtcgaatgatagcaaaaggtgtttttcgtgaaaagcgcctacaacttacttcaagaagataaacacccgcattctagtcccaacaacttcgggttttggcgtaaactgtggggcaattaaaggtcccgccaaaggttaaaaatttcctctggcgtgcttctaatgattgccttctaacatgcctgaatttggtcatcaagcatgtgaccatttcttcaagctgtcatgtatgtaagttgcaagctgaaacagtagttcatgctctcatctcttgcccttttgctcactcttgttggacaaaacttggtccaaattatgtctcggatgtgctatcttccttcggcagttggcttgacaaaatgttttgtttgttagaagaggatcaagtgagttatgttgccatgctgtgttgggcattatggaatgctcgtaacaatacagtttggaaggataaaatgtctacggtaaatgcagttctcgcatcggccaagaccactcttgatcattggagaaaaattcaagataacacttgtttgtcttctatgttctttgcaaacaatggagacggcgctgagctttggactaaaacccgaaaataatcacatcaagattaatgtcgatg

SEQ ID NO: 309025 - DNA, 706 bp, Cannabis indica
ttttttttttggcaagttcttcttatttcaagttgatcatagtattaattaagtattttcctcttgattttttacaaattttgttgggtgtgtaatttgaaacataaacttcattaagaaaaattcgttgttacagaagaactcaaaaatcgtagacaagtatctgtccaaatccaatctcgtaaactagtagcagaagttgccagtatgtgggcaacaccattcgctgatcgcgaaatgacgccgcaagaactaccaccaataacagttaataaagaacaaatatctaattgttgttatatcagtcctaaataaacctacaacctaaatactaagatgacatggcatgtattaagacacatcaatttggcctctctagtttgcttctgtttttctgttatttttaattagttaatttctgttatgtaactacctttctaatcaggatccttaagctataaaaggaggccttgactcatttgttatttagtgcagaaatcagattgagagaaaaacagagagattaatgtatggtgaggttttattatatcttgtagcaagaaggatagagatgaagaagagaggagcagaactgagaaaccagaaatagtcaagggtcttcaagggtgtttcctaagtgctctaagtttcatttgaatattgttcaagggagaaagatcaccattgtatcaagttcaagttatct

SEQ ID NO: 309026 - DNA, 1545 bp, Cannabis indica
aaaataaatcatttttaaaaaattaaaaggagaacaattttttttactcctttcttttcttttttctagtttttgtttcttcttcattttttgtactaacaacactgccaccaccaaaaccatctttatccaccattaatgaccagcaaaactaccacacaaccactactactctacaatcatagccacaaccactgcaaccaccaccataaccaaactgttgtgtttagtagatccaaatcaacctataaaacacaataaaaataaatccacaaacaatctcaaatccaaaaaacaattttgattctacatggttctttctcctcaattctcaaatccatataacaatccacaagaaaatcaataaaaaaaatgataaatatctaactaaagccaaacaaagtaccaaaacgagatttgggagctatgcactgtaggttggtttttggagttcagtggcttcagaagaacgggaactgagattttgaatcttctttcagtgccagagtgtgcgcagatgagagagagggagagagatagaaaagagtgatgaatggggttttcgggccaggatctcatcgtggtgagcaaacggttgctggagggaggaaaagagaatggctccctatgagtcttctcctaacgccactccttcatggtattggttcgagaatagcgcaagtgagagagaatagggtgaggggtgggtggggttagtggtggcaaggatctccatcatagtgctgctttgagaacacgatggtcagagatgggaggaagagaggaagaccagggaagatgatggtggtgcgtaggcagtagagagagatttaggaagagatatggttagtgttagcctatttttagcctaagttttaggtcactttttatagttatttctcttctttgttattattttcagaatataagacgcttgttttctttggttttatttctctatctctaaggcatatctctagatggactttcgtagctactagtaactaaccatttctatcaataagtgattttggcatccctagatttattaatgaagtacactaagtacatgaacattgcatcattctaaggttgtcttggaacctagtcttaaatgggacgatattttaaaatggcattctctatctcgaaggttattccctagaaggaacttggtagttactagaactaatcatatacctaatgtaacgccctaatgctaaggcacgctgcagtgcttttcaattacggtgcaatctttgctaatcaaagatttttcttgaaaaacgtgataaattaaaacttttatgataaatattatactttatatgatattaaaatatttacaagtgtcgggatcccgttttcaaactattttaaacttaacattttaaaatacacgtaaaccaagtcgcacagcgactacaaaatataatccccagatgtcccgagaccgaaaactccaggtcgcgctgctccgacatgtacaacttcatccgagctcaggttcactcctgttcagctttcgcctttcctttacctaca

SEQ ID NO: 309027 - DNA, 842 bp, Cannabis indica
ttttttttcgactgatggaataaccctaacctatataatgtaaaaataaaaataaattctaattaaataaaaaaattaatcataaaaactcaaatttttttagtattacacattcataagtaataccctttaagagtgcaccgttatatatatttaaaaatattatatatacaattaatattttaatgttaaaaaataataaattaaaaatctagtacatatataaatataggcagtcgattttgttcccattttctaaaattatgaattgtgtttcgttgtacgacataatggacccaacatactttaatattttctatgaatttttttattgatttgacaactagttcttgtaggtttcttccatggttgtcacttttcttttttcatttaataaaaaagtacaaaaaggcttaatcaaatgacagttggtggtagttaatacaatagtactatagagaatgtgtctatattgtcagactgaggttatttttgtcttttcagtccttcatattttttttttttattgaatttgtgcagtagtagtggagtatgttatatcacgtactgagtatatttatagtttctgcatgatgcttagtaaaagtagattacaaaatattacatacctagtacgtacctttatgtttcgtagtatattggttagaaaaatttcttataactcatgaaagtttgtattttaggagtgatcaataaatgaaattatgtattgttatgtattgagttttacattggtgtaattgttttcttttaattaggttttagattaaaaattaccatagaaatattttttttcaccttataagattagttttttttac

SEQ ID NO: 309028 - DNA, 662 bp, Cannabis indica
gggagaaaagtcattattcaagattgtagggcaattgggcaaaccattacaagtagactcaataacaaagcaaagccacaagttgaactatcctagagtctttatagtagttaccattaatcaagatcttccataacttatctggtttgaagatgaggttgggtatgatacctctgtttaagtcacatatgagtggaaacttatgatatgtggccattgcaaaggcattggacatatcactgatgactgtcaaaagagggaaacaaagcaacaatcagtagttaaaatagatggaagaaaagttgcagcgaacacaacaaaagacccaataattgatgctgatggttttcaacaagtgagcaaggagagaaagaaaaggaaacaaattgtggaggaaaccgaaacaagcaatgctttccaggttttgactagcttcccagaattgatgatggaggcatactacagcaagcagctagttgctcgaatcctgtgacagcgagaccaacaacatggagcatatttcatcagtcaaaggcatagaaaatgcttccacagaaggcaacatttttaaaggttatttttagtattaattttagaataatttagtatatttttaattgagttttaatcgtatttggagcatttttacgcttgttatcttt

SEQ ID NO: 309029 - DNA, 695 bp, Cannabis indica
catgggcttaagcctacactggcccttcattaggtccgcctctgccaccatattacaatcccaacaccccggatttacatccacaacagtccctcaaaactggccaagtaatccaatgatcaatccccaatagtaaaaaaaaattatagagactcaaaccactctatatccacttaaacaattttctcttttctaacatttacatttctatttttaacaataaatttaatttcgtttacacacctgtcaatagtttgtattttttcattccataggcatccatttctattgctccaaatctagtaaaccagttccactagcatagctaatgtaacaccctaactagcataggcgtgttagcgtgattttaaatgtactgtgtagcttgttgctaatcaacgaggttactgaaaaatcgtgaataattaaaactcgcttatttaattagaaacttaaagtattacatatataaaattccaggatcccgtttacaaaatactttttaaaagtttgctatacacataaacaaaagtttgtcgcccagagactatacaacaaaagcctcgatgtcccaaagatcgtacgctccaggcctaaccgccccgacatgtacaatcttcatctgctcgttctcacggctcctcggcattagccttgcccttacctacacatggaaatagcactgtgagtcgaca

SEQ ID NO: 309030 - DNA, 807 bp, Cannabis indica
attaaatatgccaaaaatggaattaacagtgctctctttgatagaaactcacaaaaaaagtatcttcataagcgaaccaaagatatctatttaaagtgtttaagatcacacacttttaaattcaaactcataactcctataaatgttatggattcaaatgtaactcatgaatagaccataactctgctttggaggctgaaacaaaagctatttggctttttgtgattcaatgagagcattcgaggattcagaggcggttcctttggggatcaaatgcattcaatcgactgctaatattgtattaatgacagatgcatcgtggaaggaaggtgtagcaggtcttgctgtggtgatggttaatgtttctactggtatgtgggcttataagatagccaagtcttcggcctactctgctttggaggctgaaacaaaagctatttggctttctctagattgggcgtacaaagaaggatggcacagctgttatgtggtgtcggattcaaaggtggctactcaagccttgaatggcagaaggtgtatcccgaattggcacttccttaatctctctttttcagttttagatttaattcagacttttagtagttgtaattttatttatgttaagcgtggtgatctgagttttgtcgatggtttagcaaaatctgctagagtttctggcgatagtgcttctgtaatccatggggagggagcccccctgtggttcccatccgtttcgttgtttaatgaactagttgttctttcaaaaaaaaaaaaaagaatagaccataactcctatagcattaagaa

SEQ ID NO: 309031 - DNA, 911 bp, Cannabis indica
gatagagtcattttggattacttccaaggtttgtttacagcttcagttgtagattggagagaagtgctatcttgtgtgccttctattgtcacggataggcataataaaatgttgcttcaaccagttttggatgatgaagtgaaggcggcagtgtatcaaatgcacccagataaatctccaggccctgatggtatgaacccggctttttatcaaaaatattggcatatagttggcggagatgttattcatactgttcgagaattttttagagtggaagctatgcaaccggggttgaacaaaacaaatgtggtcttaattcctaagaagaaatgcccagataagatgacgaaactcagaccaatctctttatgtaacgtgctagctaaggtcatcactaaagtcctggccaatcatatgaaagggctcctcaatgatattacctctgttaaccagagtgcctttattcctggaagattaatcacagacaacatcatggtctcttttgagatcctacactacttgaagagaaagcaaagagggaaggatggttttatggcgcttaaattggatatgagtaaggcttatgacagggtggaatggtcttatatatgtgctatgctttctaagatgggctttgatgagaaatgggtgagaattatatctagttgtctttcctcagtcgagtatatggtggttagtggcagccatgaaattgggcccatagttccatctcgtggacttaggcaaggggatcctatttcgccttacttatttctgatcagtgcagaaggcttttcggctttaatacggaaatatgaggaaagaagatggattcatgggtgtaaagttgcaaacagagccccggtggtgtcgcatatgcttttagcggatgatagctatctctattgcaa

SEQ ID NO: 309032 - DNA, 1113 bp, Cannabis indica
ccatatttactttatgatccttgaatttgtgttgtggcatgcctttaatcaaggatattgtgatcacccaattgagtgtcgtgtgcttaatgaccacttatcacgcctctttatggctaaatgcataatgttgatatgctagcttcgaccaaaactcttatagtttttagccataaatactgtagctaattgcaaaattttcttaatagcctaaaaatataattctgaactctaggcctaatataaaactctataatacaccatacaagatatattctcaaaacaataaataaatctgacttctgtagtgaaaatcacaattaaggtactccacaatacaacttactggtaatcttaaggacgtaatcaaatattaatttatgtgtatctaatagccttagatacacttgtggtgctcgagggacaagttggccttatgtggatgcaagttgaacgtgtaggaggtgatcttgagccttgtagcattatcaggtggtcccaagttgtaggatttgtggttgcggagtacctattgttgggatgttaaaggttgcagacaacgcatctccactacttgtaccatctcaccaccaagccacgttgaggaagtggctgtacttggtctcatacctctctacgtgcaagccatctcctttcattccttcattaacagtgtcctcttcaacacatatccaaattctcccttcacttcaaatttttcacactatctcatgggtctcccacgacatgcctcacatgtgagcctcgcacagaccacacaactaacatgtaagcccttcacacaccacacatggtttgcatgcaagcccctcacacctttcatgccatggctcacatggggatcttacacggatgtcttgcaccacgactctcatggacgtcttgcatgcatcacggcttgcacgaatgctccatcacttgcacaaatgcttcacgggtcacacaaatgctcatcagcttacacgaaggcatattggcttgcgcaacaggcacaccagctcgcacacaggcacatcaacttgtacgtaggcacactagctcatacaaaggcacactggctcgcacaccccactgtcacatttcaatggtctt

SEQ ID NO: 309033 - DNA, 1416 bp, Cannabis indica
ataataatattaggtgtaccaatctaaacattacacatatacaagaatgtacatactagcaatcctgcttgctagttaactttaaccaataaatgacatcttaaatttactaacagttcaataatttaaagaattttaccgctaaaatttaaaattaaaagggtttaatgcaaaaaaaaaaactcataaaaaaattattatttatttcttgtattgggtttttcccacttccctagtctctcctccacgctacgctactgtgctccctcaacttcactccgacgagctccgtttctggtcagcttcacttcttcatcttcgtctcagctcaggtaaaaacaatgatgttttctatcatagaaattggtccaaaaatcatggttactgtatataatacttgttcacattttgttttgtgggttttggattgacagtgttaatggaggtcgagtctccactgagttacggtatggacccaagtgatgacgaaagagctgacctcagcatttctgagctcattggcgacctcaggacggcctttaggccctccgattttgacagggttgaggagatttttgtcattaaagaaaacaagatgatggaacaaattagggatttggagtctgacaaaatccgacttgaaattgaggtcaagaagttgaagacagagaatagtgagagtagagttttgagagagaattatgaaattatgagggaaagagtgaagatggctgaagagaaagctgaaaaaactgaaggaatgttggaacggttactgaaagatgcgaagaagaatgagagagaaaaattggatgagtttgatcagctcaaggagaagattaaggttttagagtctgagaaaactagagctgaggaagatgttcaagtgtggaagaaaagctttgtggaattggagaaaagagtaactttgttagaagctgaattacaaaatgttgtaaaaattgaatctttggttccaaatgtaaaagccatagattctactgagtctaacaaggcaaatggggagaagggtacaggtgaaaatgatcatcatcttccttcacctccaacttctccaatgaaccaagattttctaagtaagatctttgtttgcattgcttatttcttgcaatttacttatcatgcatgtgtttgtttgagttaaaggaaaatgctaaattgagtcataatgtgagtttgaaaggattaaatgttatggaaatgactttgtagtttgtactgataagtgtagtttgacattttcatgagcttccattaatgtccttagctgtggtaggtagggactaatttcaaagaaatccagtttggggtagcaaacatagttataattgttagatgaagtgggcactgcttcagttgggattgacattaagtcaaagaatatatatatatata

SEQ ID NO: 309034 - DNA, 838 bp, Cannabis indica
ttttatgaaaataaataataatttaactataaataaacaattctagtgatgtacatttttttcgattttttttattgatgtacttaatataaacaatttcgtgtctgtcaatttcatgtcacacgggttaaccttaatctaacaaaaataattatcatggtattcctgttctatttttgatgacacgaacatccaatatttcgtactgaattcatgtcttgttatatcgtgaccctaatcaaaagtggaaaaatatcaccttttttttccataaaataaaaagatagatttgggtatatcaaacaaaagtataaaaaaattcaacttagaaccaaaactgaattataaataacttaaatatgtgtagacgcagagattcaaggaatccagtacagataaccaactacaataacacagtaccctatttcactttctcaaaacatataaacgaaaaagaaaaagaaaaagaaaaactggaaccaagactcaattataaacccacaaaagaaaaaaagaagaaagagagattagaacatactagggagtatccgcgggtcccatgatcgtgacgctccattcaaagacgttgctttcgtcaaccaatcctgctgagaatccatccacaggagttttgtagagatctgcagataccaaacaaaaaaaaaatcaaacccaataataatataaataaaaaaaaaaacatagaaaggaaattgatcaaagaaatagaaaaaggggagtggagtggttattgatattgacctgtgagttgcttttgaaggaggaggcttgcttgtgtagcagccatggaagaaggaaataacaagcaagctctgtt

SEQ ID NO: 309035 - DNA, 1998 bp, Cannabis indica
acaaggaatagaagatgaccacaaaagagaacgagcaatttcaataatgtgcctatactttttttcaaccataccattttgtttaggtgtatcagtacaagaagtttgatacacagtgccatctaaggtaagtgaatcaataaatttatttaaagtatactcaccatcttgatcacatctaaaacattacaacatcatgttgagtttttacataagttcaaaaacgatcataaatactataaaagtcagaacgatgtttcataagaaaaactaacaaaaacgagtgtgatcataaataaaagaaacacagtaccgagaattctcttttctaacaacaggaaagggttcccacacatcagagtgtacaaaatcaaatggtacaaagaacaagttgtacttttattgaaatgtaaagcagtaaattttgtaagtttacatccactacaattaaaaatattatgaggttgcaaatttcctaaagttcctttagaagctaaaaagtttaaaggagactgtgaaacataaccaaggcaagagtgccacaaataaaaactagaagactaaggagacaaacaaaaagaagacaaatcaacactaggagctgcatatactggtaatctcaattcatccaaaacatataatcccccttcctatggccggtcccaatcaacttttgaatattttgtgttaatgttagttaataaccttacattaattattagatgttgaatatttcatttttattaaaaaaaatattttttcttattatataaatactttgaaaattacaataaaaaattataacattaattaagatctacgtattataatttaataattattataaaatattattaatcgctacttcttaaatttcaaacggtgttagagagttttacattattaatgtgtggaaagacaatagaatatataagattgttggcctactcctcccgttatcaattgattttgagatggaacctcattcacattatcctaaattttaacatagtatcagaacaaacataaaaaaaataaataaaaataatagctcatttgatagaattacattttttatattttttttacctcgtagttaaataattgaccttttagctattttaactataccgtgttctaactaatcctattgtaactaaataaatattaattagttataggattcaaaattaatgacggaaaaaatattgttatatgttagaggaaaatttgtaattttacctagagactaatatatatacaaacatataaaaaaaatgttatattttgaaattaatgtaatattatttatcatgatagtattaagactatttaagatttttgcctctcgaactatgacacatttatcattgtgttcctaaatttttcagcctgttacaaaacaccatacttagtcgacactagacctcaaaacaccattgatacacacatttctttacattttattggtttattattaccaagaatcttacaaccactaatttaaatcagatttatgaatattaagtctcccatgaatcttatattcataaatctcgattaagattttacttagaaatcctttgctatatttttatccacactcttgagaatataactctggtgtgtcagatctaatcaataaaaataaaaagtaaacgcagccccattaccatcgcaacatgagggtaaactactataaattcctggtatgtatttaatttattgtagttttattagtcaaattaattcaccgtggttctctttatttttacgattttcttagatcagtagacaaaaagctgcgtcaacaaaatttatctaagtatattaaatatttgttatattataatagtaattattatattaaatattggttggaagaaatttccccttatttaataagcaatgtattatttgattttttaagtaataaaaattggttattatattcaaaataaataaaaaaaattaaaatattgtacaatattaattatt

SEQ ID NO: 309036 - DNA, 1182 bp, Cannabis indica
ttatttagtggctgtgaaaaacaatgactatcaaccattgaaattttataacataaaggcagagaatggagtatgcgataagtattttagtcaatttctatatgcttttaaagagattctgtcgatggaaaagttttttccagagtcaacatatgaggtgaagaaaaccttaagttcgatagggttgaagtataagaagattcatgcatgtacaaatgattataatttgtatcgtaaagagtatgcccacatagacagttgtcaagaatgtggtttgccacggtacaagcccaacaagagcaaggagatccaaaaacttatgccaaagaaattcttgtggtacttgcctttgattccgtgactcaagcggttctatcaaagtgtagaaacttcagaaaacatattatggcacaagaaaatgtgagtgaaagatggtaaactccgacatcctgctgattgacaagcttggaaaaagtaaatttttttgaatctgaaattcgtagctgaaccaagatatctacgccttggtctatctgtcaatttagtagatccacatagatctcttagcagtcaacgtagttcatagcatgtgttccttgttatgtacaaccttccaccttggttggtgatgaaagggaaatttacgatgctatcagtaataattatagggcctaaacagtggagacgtgatatcgatgtttatttggcactggtagttgacaacttaaaagagttgtacgaagatggtgtcaatgcatacaatacttttaagaaagaagttttcaatttcaaggttgtgctgttctgcactatgaatgatttccctgcatgtagtaatctatcagggttgaggacaaaaggctatgaaggttatcctatttgttgtaccaatacacgagctcgtcggttgtcaaatggacgtaaaatgtgttacatgggccatagatggtattttcccctaagtcacactaacaaaaattaaaaacaagcatttgacggtactgtagaacgagaagttgcacctttgccacttagggtgacaaattcttgaagaagttgagagaatagatttcaagtatggaaacggcaagagaaagaaaaaatctaatggatgttttgaaagaaaatcaattttcttccgtctttgatactggaaagatttacttgttagacattgtttgg

SEQ ID NO: 309037 - DNA, 1862 bp, Cannabis indica
ttttgagtttttttttttcaagtgtaactctatttagttataacctctcaattagaatattattttcttagtcccaagtgtattcttggatagaggttctactgtattattattagttggcagatgaaaatattcattaaaggttatgttcaggaagctagatggttgaacgaatacttcccaagctttgatggacagttaaataagtttcttatttgacttctagtaattctatgttcatagccacaagtttggttggacgtacaacatcatattgtaacaaatccaacctatgagtagggatgtgggttgtaactttttttttttttcaaacctaaccatatatgtcactttttgtaatttgtcaaattgcaacctgtactgcgagaccttaaaactgtaaacaccacactgtgaaaatacggtgtattatcattatcaaacattataataataattcaaaaatcaacctaataaagttttaacaatgtgaaaaaaaatattaaaattttaacatcataatattaattaatatttatactaatcattgaattgtttttaaaaaataatataatatacacatatattacatatatttgttcttatatgaaaaaaaaaatcatattgtaaaattagtaattttataatatacagtatgtgttgcggtttaaactgcaaaccgcaccgcaccccatggtgtgacaaaaatacaaaccacaaccgcaccgtgatttagcttctcccaaaagaacttttaaatttatttattttttttttttaaaaaaaagacttttcaattttttatccaaacacctctagagaacttttttaattttaaaagcttggaaaagagcttatagaagctaagtcaaatgagaccaatttattcagtccaacaatgagtactaaatgaggtgaaatgaaaatatagaacttcgattcattggaagattgacattatctcgaaaagtgtattttagagatttttcatgcctcgaaaagaagacccgttacctagtatacttgagcattattattggacaccagtggtgtctagcacttctaaacatgtctagatctatctatataacttttagtttgatataataacacttttagcaattaatattacttaattaattgctaaaagttatatagacattctacatatatcgttttatgattggctagcgatactcagaggcagacgtatagtatgacatatagaggccatggaccccctagatatttgctatgtagttaagtttatatatgttatttggttcttcttttttgcttggttatgtaatttagtttgttttgataattaagtagtacatggtgatatcctttgacaaagtcaaactaaaattataaatatgatatgttttacttttatttatttaattttacaaaagtctatttttgtttttttatcttttaagactatttatttttttttaatatagaataaatttttaagtaattatttgctaatatatattgaaagaaaaattgccaaaaattttagtataaattcacttatcggtaacgtttgtgatatgcaagaaaaacgttttgtttttaattttaattatgaatttagttaagatatttgcaatgaaactcccataacatttgtagtacacatatgatcctattaaaaaatagtgacaaaactatcttatcttccgatatcattttgctatagttatacccttaattaaatgccaactcaaaaacacatatcgacatattattagaccatgtattaaataattattacttatcatttttttaattaaaaatatataaatttgaatagaaaaatgaaataagtttttctttagttaaataaataa

SEQ ID NO: 309038 - DNA, 604 bp, Cannabis indica
agaaaggaatcaaggtctagagatctgaatggaatgagtcattatattctgttgctctcaatgtaaggttcactaaactttatatgtgtttatttcattgttttagaattcatattaggttgttaataaaacatacatggtagtaaatttagatcctggtaaaatattttcaacagatcgtgatgaaccctctgctttccttgttgtcaagcttttgaccaactgccactacaactctgaagctttcaagaatcggctcaagcaaatgtggcccgaacgtttctcaatcaatgtccttgaaaaggaaccctacttctatactgttgaattcggatgtttggtgatctacgccatgtccttattggtcaaccgtggcatatcgattacaaactcattgtaatgacacctcttcaagcgggttctgtggtgaccgctgatacgcttacgtccacaccattctgggtccaagtttctggaattcctttccttaagagatcccgggctcttgctcaaaggctgggcgaagtcttagggtgttttatcgaattggatactgcttctctaaaggagacttgggggtccttatctccgggtccgcattgag

SEQ ID NO: 309039 - DNA, 7516 bp, Cannabis indica
gagtatacgtgtcctctaaacaggggtctggtctcgagtttctaagtgagagaaatctcactataacaacagcctactgtcaagtttcttgtacatggtgtaggaaaaaatctaggaacaatagtacacgtgaaaatcgcaaaagataaaaaacttcatgtccttgttcgtagcactagatgcttcaagaaaatgatggcacaagtgcagaacactaatcgttgttgatggaactttcttaaaatctatatttagagggcattgctctcaacctgtacacaagatgcaaatgaccacatatttccccgggcattctctgttgtggatttagaaaattataacatatggacttgatttttttataaaattaagggaaacatatggggttagagaacaacagtgcttaatattagacaaacatgagagcatgattaaaacagttgctcatatatttcaagagataacttacgactactgcctgtaccacctattaagaaaccttgaaaataaccttcaagaagaatgctagcaaactcaagaaatcattctttccagcagctagagcatacatagagaggaagtttgaataccatatgagtgagcttgatagcttggacaagcgtggtcgaccctatttataaaaatttggacaccacaaattgttaaggtaccattgcaaacacaataggcatacaactttgacttctaacattgttgaatctctcaactcgacaaacttagtagctagggaactaccaaccactatagtaatggagtctttgcgagccttcatacaacaattgacatacacaaacataagaaaaccatagacaatgaccacaagtttgacacctgttgctgagaagaagttaagcaatatctttgtggaatcattgacaaaaaaattgagagcctctctaaaatagaattcaaattcctctttccttctcttcataattttgaattcctaatgaagagtaccttgccctctcgattcaactcaatcatagcgtgaaagattgtgaagaatttcaacacctaaaggagattcaggttcatattttggtaatacactgggatagaaaggaataagggttagagatctgaatgaaaggagctataatattttgttgccaccaatataaggttttctagaactttatatgtgtttatttcattgttttaggatattcatgtttaggatgttagattatagaatataattaaacatacatgttagtaaatctagatctggtaaaataagttccaacataaccatcttaggattgagatcagatgatctatcaactaagtcatattgacttaaaaaatatataacggtaagtttataatatctttttcattgttaatattagtccagtccaatgtatagccaatacatcgtatcctgatttactttgctaatgccttggaaaagacattccactcaactaggtttaagtaaaccttattactacttatcacgttagtgcaaatccaatgcactgataaattgtgagatttaataatttaaagcatataatcacaattactttctattgtgatgacatcattgtaattgtgaatcactatatttttgggatttaatagaaattatatattaaacatataatcatgtataaaacatatgaacaaagcgtatgccaaggtcaagatatgatttctgatctttattaaaagtaaatataattacaatgaaatttggtttatttaaggtataaaattccaacaaagtaaataagattacataatacgatctttgatgtggtcttcgtttggtgcgtgcatgctgatttggttctaggtgtaataggcatccatgaatgtgaggatttcatgtctggatgtcatgtccaccaattgatcaatttgtggtggtgggaaacaatctcactcaagacctccgacaggtttgttccaatcttgacaactttgatcaggtccgatgtgttgaggggaagttctttgagttcatcagtcagacaaactcttaagtggatgtctccaaaaggggggtcaatgtcatccttgtcttgggtgcaccttcaagtggctttaggtggtgtaaccatcttctctatagtttaatctcctgaggtctttgtcatctctcaagcttttgtgggagaggccgtgctcgttccccctagtgccatagcagcaggggaggtctttgtcgtccccttgaagccatagcaacagaggaggtcttcttggtgagtgataacgatgccttataacacttgtcagtagttcctagattgccaaggagacaaccattaccagccgcctttgggaacttgatagagaaatggtatactgaaaagatggctcgaaggtcgtaaaaggtagaacttttgagcatcacgttggaccacatctactactatgaacatgaccataatggaggtcagctttgggggagtgctgatagtaagtggcagtttgatcttgccacatggagtgatgctagctttgttgaaaccatacatgagttgctcgcatggttccaggtcttctaaggatgaatccattctgattagcgcttacttgaacaggatgtttgatgatgctttgtcgtctatcatcaccccggtgaccatcatattagtgatttgaagctcaaaaactaaaggattgtgagggtagctaacatggtaagagtccaattctctgaaggtgatatgttaacatctgtagcattgagactttggaggaaattctgctatctctaggactttggctcttggttcatgttgaagtgatcttgcatagctttttaaggcttcccttgaatttctagctatgtgaaggcctccattcacgatctctagtctgcctacagctagtgtaggctggagaggtacactacccccagttggagcgtcaggtcatacataccgctaaagagcagcatgtttctatttcataagaaactctatctcgtcccacaattaattacactcattagcgtcatgaccgtaattattgtagtaacgatagaatttgttcatgtctctcttgactctttgaatggaggagctttgtaatatgacactattgactatgtagccgtatagttctcctctctttgagccaagagaatgaagtaggtggtgatgcaaggctcatgctctcgtaagggcttgcccccagtcttaggcttctttcctctgagggagttaccttgcttgccaccattgttggctctcttttctctattcaaacttcttttcttcccattgccctgcgcctcagtagtaggggctctaatgtctggtgacttcttcttgacaccatttaagccattggttcgggtgacgtcttcttcaagtttgataaatccatctgctatatctaagaagtcattcatggtgtataccaccttaagatgaaggttgggccacatagaactcatctccttgagcccaactacgagtgccataacccttgcatccttgccaagacttttggtcttagcagctgcctcaaagaattgttggatgtagtcattaaggggctcatcttccagttgctttacatccactaaatcattgggttcaatctggaattgttgggaaggagcaaactgattgataaaatcatctactagatctctccatgagccaattaatctaggagagagcttaaggtactaccattgagctaagcctattagtgtggtagggaagattctgtaactgacgttatctctcacaccttgcagatcagtctgtacattgaagtagtggatgtgaggtagtggatcttccttcctggtgtattatatcatgaagggttcttcaagtttgtaggaatgtgaagaacttttattcgtttggagagcaatgagcatcgttctctgtcaaattcaaatttagacaacttagcaaccatgatccccttcactaaagcaggaaaggtgttaaattatgctcaattaaccccatgagtggtggtctgcttcctagtccgagctcctatcactagagtagagtcttcactaaaagttgttgcctccaccatcctcttcttggctaagaggtcacacaagtctcatggtcttccaggtcgatcttatacttcagtcgacttgggtcttgtagttgtctcttgatcatggggtcgtgaaggcaactctaatgaggcctccaaaatgaactctagatcgtctcaagaggaatcactgtgggagtgttcattcaaagcatttttctggctacttccctcaaagtagtctttagctggatcacaagtgtgaagagaattgaatcgattgctcaggttaaattcttctccatgtactcgtgggaagtactcatacttgtggctgtcagggccacgagcaaagtaatggcataacccaccccttttatctaaaagtacatccaagtgtaaagtggctcattggtccttacccatcggatctcatagcctctagtttcgaagtagcgtctcttactacctctttcagcttaaataataggcccatttcctgatatagagtctcggggcctagtttcatgagaatattaagaaggacttggtggaggagtcatgttggttctctcattgttttggtgttgttcaacatcgggtggagggcccactagttggcacccacgagtttgagtcctctgaggctcttactcaaaggtagtttcccttcgggaggtctccccacctagtgtttacctatttcttgctcagttactaggtgcagtagtgtgttccgagcattaaggttttgccttgggcactaattcccacgtgaccagttggtcaacggggagtttctctcaccaactcataaatacttctacaggaagtagttccacgattagggcgataagcttctctaatccattgagacaggttagctctctgttattcttgttcaatgctttgcctttcaatgttcctccaattttccacaaaccaatgttgaaactgttcatgtttcttatcgagaaagtctcccagctattattgtaagttagccatagtttgggtgagctgagcaacccaaggattagccttttcagggttatcaatctctatgtgtggctacccaggtaagatctagtgttgttgctagtcccaggagcatttggtggccttggaggacaagttgttgaggatccagttctgaggcctactcctggtgtctagggcacagaagtagtcctggttcctactccatcaactggtgtgtgcccagttgcttggccaattgttcaagtctatctatctgcacttgtagaatgtgttgcaaccatcttgctagtagctttcctgagctacaactttcaatgaaagtaccaaaatattgacttaaaaatcttagacttctaagcaaaacttgctcgctagatggcgggaatgattaagtagttaagtaattataagagaaacataggaaatttatagtactttactccctgtatcgcaacagtaatggagctacgtctactttgagtttttacttcccaggagatggtaattacaaaaaaagactaactattagaagctctaatttctagagagagaaacaagagagagaagctctaaccttgtgggtagttttctgaacttgaaaaattagctaagggagatctccctttataggtgaaagaggcccaaaaaaagggaaaatacaaataagatgttttgattatagtcatggtcccgaattgccaccttaaaatactgttaagggtagggatgaagagtgtagtataatgtagtttagaaaaatctatttgaatcagaaaaattataattattttttgtaataagtaaataatttttcacattaattaaaatagaaaaaagacaaaaatagttaaaacaaaatttgtcgagaaaatatttgttgggacgattgtcaggacaaaagacatcatcattgtcctaaatagaaaaggtaggcacctacattgtagcctgtccctacggagtttgtattttcgagttaattaattaaattagataaatatctaaattcaaaaagtggttaaagatatttcaaagttgttaaaatattccctcaagtagttgagagattctctcataactatcaataactaaatttggttataaatatttatttattcaaaataattaaatatgatttaattaaaaggttttaactactataaatagaagcttggtttgagaaatcagaacactctttagacatatatttttgaaatatagagagaaagaaaagaaaaaaaaggatttttctctcaacttttcttgctcatgtgtagagaactcaacaaaaacaatattatacactttatcctaatagcccacactattccttatgtgtggtagatcgatttggaagacactgtccttgagtccaattgcattattctcatcatctggattaacgaatacaatatacgagaagtttcgaggatatcctagtagtcttcaaaaggtatattcaaaacttattactattttatgttttaattcaatttacacacatatggagatccacatgggatatggtacaataataatcaacaatacaaaatttttttgctgcgtatctaatttagtaccatgaaaacacataccacccctcatggtccactatcttaggttttgcagtgaaagttgtagagtctttcttctcttgtctagatcctggagctattcccatgaagctatcatcatttatgtagtagcaaaaagctgttgaatgatcatatctttcacaaacatgacaagtaggctttgtgtttcttccacccctttgcctctaccacttgtgccatttgaattgtaacctttgcctccacaacctaaatttggtgaataacctctgcctcgaccattgttgttgttgttgttggtggatttattctatttgtgagccaagtttgcaaataatggtgaagttatggacgaaccttgtgtctttctagcttcaagaccaattagcctttccaattttctatgaaaactcgaaagagtatcctaaagttcctgccaagtgattggagtgagattggatttagctttgatgagagccacactggtaatgtattccacttcaagaccactaagaacatttgaaacaaggtgagatttcggatatgatctcctgcaagtgctagctatatgctagctgacttgatcacacccttttctgttaaaggtatttaatcattgatcctgattcttttcgagttgtttgcaataaaattcttaagtcatccatcttagctctagaatgagcttcatataaattttctagagatttctatagagatctcactacaaaaaatcttacttttagttacaacaaaatttgtgactaaaagtaaaaaaattgtgactaattataaattattatttctatgttgtggctaaaaggtccgtggctaaaggtattagtcataaaaattacaatttgttgtgagtaaaatgtatttttagtcacaatacttgttatgactaaaactaaattggtgac

SEQ ID NO: 309040 - DNA, 1069 bp, Cannabis indica
ttttgatcttacctataagagctatttttttctagttttaattggttgaatagtgaaagtatatggagttagaataagtggtggaacatgctattaatagttttaatattacttttttaaaaaaaaaattaaaattgaacagattcttactattcctttgagcttttatcagtcaagtgataggctaatttggcatcataacacaaatggtatctacagtgttaaatctggcttccaccttgcaagctctatctctgagaaagaccaagaatcgtcctcggatgattataagacgtggtggaaatattttgggcactacaaattcccccaaaagtgaaaatttttgcttggaaagttgtccaaaatgcactaccagttgccacgggtttgcacaagcgtaaagtgattgattcagctttgtgttcaaggtgtaaacacgcatgggaatcaattggacatgctttgttctcttgtaaatctgccaaggctgtttggaaacatactaatttcctcattgattataaccatgctcaaggaatgtttaatggagactacctaattcatttggcagcaactatggacaaaaaggatgttgaagcactcatatgtgtcatgtggggcatttggaatgataggaacaaagtccttcatggtggcaaacagagagatccatttacaattgcatcattcacattgagctacatagaaaagtacagaggtgcaaagggtgctctcgcaataaattgcagcaaccagtcgctcaccaagctagctttcaacagaccgaattcacaaatgaacagctacaccggcaacacaacacttctgttgacactacagcactgccacctccaacagcaccacaccatcttacccgatccacttgtcacactggtttggttcgatcttcttcagccttgcaccagcaacctgctgctacaacaaggaaccaacagaataacttggctgcagatgcaagtaatacatttccacgaagcttagacaatatcacatggactcctcctgctgtgcatatgcttaaaatgaatgttgatgctgcagcaaattt

SEQ ID NO: 309041 - DNA, 1452 bp, Cannabis indica
tctctacaatttcagcttcaatactagcaaaacgggtcacagtgaattgatacgaacacaacacgatttttacgggtcgggttggggttaaaataattagacacgagtcaaaaaaacaaatcgacacgtttgacacgaaatataaaagcggatcacataaaatataacacgaacacgatacgatacgagaacacgttttgccacacctaaccgtaacaatgctcacactacatacaaccacctgattgcatttttgaaacagcatcacatatcacataagactgttggaaaaaatgataaactttagctagtgaaatagttaataaacaaagtaaaaaaattctactttttggtaaaattattaaacccaccaaaaacaaataatcacttataaatttaaaattacatatattcacccctaaattttaatagagcttcttactcacttattttttcacaacttactctttttctcacacacaccacacccacaaacaaaacacatatttatagattaaataaatttgggcactaaaataatttgacacattggtatgatattattcgctttgggcttaagccctcacggattgtttttgggcttcccaaaaggtttcattctaatagagatagttccatccttatatattcaagattcttcccatttctagttaatgtaggactttggttgtacacctaacaatctttttctacgaatgaccacattatctccccttagacgattacagatctaaatcttgagcaaccactcaagagcatatttccatctcccttagaaaattgcaaatcaaattcattgattccaacactcaagatccctttgagtaacctagataaatcccttcaccagctagattcgaactcccttcgaatcagatccgaacttccaacggctctagcaagctttacctccattgtttggtatttcgatgattattcaaatggctaattttgagatctggctctgatactacttgttaggactgtcagacactatctatctgtacattggtatgatattgtccactttgggcctaagccctcgcgaatttatttttggacaccttctcaaaaataaatccataaaaatttaagtcaaaaagagacaatatcatactaatatagagataaatagtgtttacagtcctaacataaaaaaaaataaaaataaaaaatttgaactcctctataaacatgtgtcatagatggagctcgccacttgccttgaccctccctctcacttcgcttctccttcctcccacttaattcattaccaaatcttccataccaatctaataaataatagatcacatgctataagttaattggtctagttttttttaatagattagtccaatcttagttacataatattttacaaaatgaatgataaaagtattttaatgaaaatatttattgttgggttttatg

SEQ ID NO: 309042 - DNA, 1402 bp, Cannabis indica
agcatttgaatttagatggcaaaaagaaagtagaatctgtgaaacaaatccatgagagggcacaactcaacatagagagaaggaccgagcaatacataaagtaagctaacaaggatcatcataagcaggtttttgaccccgatgattgggtatggttacacataaggaaagaacggttccttgcccaaagacgtaccaaatttcttcctcgaggatatggaccatttcaagtgcttgaaagaatcaatgacaatgcctaccgacttgatttacctggagagtataatgttagtgatacttttaatatttcagatttgagcgtttctgatgcatgagatgatttgcggaaaactccttttcaagaagggggaatgatgaggacactaaggctatacaagtcaagttccagttgcctagtgacgacggagcaagccaagatattcaaagaggaactcaacaacctagtcaacaaattctaaaactagagcagaccgtgatcaacactaaaggagatcaaaaatttttgcttctcatcaaagtagactcaatttagactcaatttaggatgatcatattaatttcatagctattagattttttggcaacttttggcaacttttcgttttaatttcgtttccttttttttctgtctttgttattaggaaagtcttcattaggaggacgaatttatctttgtttttttttttcatttccttttttttcttagttgtaaattggctatataaagccttgcaaacactttggaaaatcagattgttatgaataaaattttgagaggttttcttcttaagttcttaaaaaaactattcgaacttatcagggagtattccttgtggcgttcaacctgacttatcaaacgaacttccatccccatttgtggtgtcttctttcataccaaggttcatgcttaactaagcattgggtcgcggctatacatcccaaatttatgagttcttggaggctgccatagttggtgtcgagtttcatcacaattgttggtgtggttcgtatcattttgagctgacttagcaagtcttggatcttggtcgagtaggccataattctttcaacttgagctgtgtattcacctaggacttgattcacgactagttaagacacgctgaataagtccaggtggtcagttcgtacttcatgcgccagcttgaggctaggtattagggctttatattcaacctcattgtttgaggctttaaagccaaatttcatttcttcgtgcatctattttctcccaagtgttataatggaaagacctgcatcagaaaaattggtcagtgcagcttccatcaacatatagtttccatattaaattacttcaggttttttctgttgctcttgctctcacttcctctctggctcttac

SEQ ID NO: 309043 - DNA, 1278 bp, Cannabis indica
attatatcatctttcttactcatctcttcatcgtcctaatcctcgacctagctagaatccaaaaaataacggaaaaagttgaagaatactctctttctttatacattaactaattttacatttaaaataaagtttaactcaaatatacctctttttatgaatattgtacctaaattatcctcacacactcacataactaacatataatttcaaatataatagatttgtgttctttatagatggatgtgtaggtttgtgaaaaagttaggagaaaattttaattagaaaagaatgaaaactatcatgaagtgataggggtaaaatttatagaatgattgaaaaaaaacaagtaaacataatagattttgaaaaagaagataaaaaataaaagcatcaagttaaaacagatatgtagtgtaattttactaaaaaacaacgctcatccaacatcgcgaactcggttgcaatgagctacttttcttttagcattagtaaccaagagcttgagaagctaaataggttttcatattttcatgaattgtaaatagggataattacataaaacactaatttttattaaatttttacattttcacgtttaattttttttatatatattttacggtattttataaaaatatgaacaaaacaatattaaaaaataatacacaaataacaaaacatcaacaacaaaataataagagtacaacataaaaatatactaaaacactatattttatgtaaataaaatctaaaaaattgtaaaaatgttaaaaactttgtacaaaccgtatttttgtaattgttgtgtgttttttgaaattatcccttgtaaatatgaggatttatgggttcaagttttgaaggtagaggaaatagctaaggccattgttgtgcttattgggcccttttggtgagtccatgatttttttagtgttgagcttaattatgacactataaattaactgaaatttatcacaagtaaaaataataaccatgattagtgaatagggatgataaagaataggattaaaattggatatgcctaattgttgatccatacatatataatggaattattgatctactttataacatgagtattcaagatgggtcgaagtataattgctcataaggcccacttttgggcccaattcttttttagtttttttgactggggaggggggatttgggcacaattcttttgtgtgaaggaaaccaccactaataaatttatttataaataaaataacaaataatttacggcataaatactta

SEQ ID NO: 309044 - DNA, 727 bp, Cannabis indica
tttaagtaaaaaaaaaaaaatctaaaattttaaaatatagcgaccaataaagtgtaggagacaaaaatgtattgcataccgatgaggatgaagaaaatttagttttttttgaactaatagatacaaaattaaaataaaaatatattatttatttctacctaacatatttagttttggcatttacactttcttttcttcattatatattgttttctttttttttatttgacataaattaattttgaatatttcacaaaatattatattagcaaaatattttttagatatttcttcaattgtttgtaaatatattatatcaaatcatttatacaactgtccattcaatcattcgtttattattttaacttataattatctataaattcatttaaaaaaaaaaaatatacataaaaagtaagagaaataaattataaaatatatctaacaataatatatgtagaaaaaaaactttagaattagataaaatatacctaacaataataagtaaaaaaaaactttagaatttaggtataaaaatatttatatacattttaaattaatattaaattaataagtatgatgacaaaaaaaatatttttatatatctatctatatatctaaagagagatatgagacggtgatataacacaaggaccgaccctgagttgaaatgggctatagacaaaaagaaatcttttggacccttataataaagataaatggtatt

SEQ ID NO: 309045 - DNA, 1853 bp, Cannabis indica
tatgccactatttaccctatattatatattatatgtttgaggtttgaatcacatttcttaattatttctccacacctttaatcatataatatctatcattaatggattttgtttatattatatatatatgtctatatggggcagtgacagtgtggacccctacataagttgagtgtgtagagtagtagaggtacgtagtagtgcaggggaggagggattagaagagagggaccggagacaagtagcgcagagaatacagaagagtactgttgcagttttgcagatgggtaatgtgggtggagtgggggcaatgtatgtacatgacgttgaacgcaacaattctttcactttcttacttgttattcccttgtttgaatatatgtcacatttcacattgtaaacaagttggcatgccaatttagagccggaaaaacgggtcacacgactcgaaatttgtacaagagttaacaaatttgggttcgactttaattaaatggattgttctcgggttgacacaactaatacgaaattgacccattaataatccatttaaagttattttagtattttaacatgtcaaaaatggattataaacatgtttaatataccataaatgtgcttatatttaaagaaaatatactttataaaaggattacacgtgtcaccccgcttataagcaggtcatgttcaggttttattttttgatacgattattaaacggatcgtgttcgggtcgagcacatacgtattatacataagtctcgacgcgatataaatacgacccgcaaacacaaattaccaccctacatgccatcttattattgtattaggaggctacaatattctagagttctacttctcactactaaaaaattgcaaattcccatcagttttatatagtcgggtaaagaattcctgacagtccacaaaactgtcgcgtatacgagcgtcgcgaatactaaagagaaaagacgatggttgaaaactgtcgggaaaatattatgggccacagttaataaccgtcgtctatagtgctcactattggcgacagtttaaaaccgtggcctatagtataggctacggtttaaaattgtcgcctatagtagtataggcacagttctaaaccgtcgcttatagtaaagttttcaagttaattttaaatttcgtatttttcaacgacggtttttgcaagtcattgagttgcccaaagagagaaaaaaattaattttttttttttacttttttctcctgtattaattaatttttactaatttataaattgtaactaattagttaaggtaaagtataaacataaattgaaaatcaacaaaaattgaagtttatacaaactacacactcaaacataaagtataaacatgaattaatctttagttatataaaagtaattggttatagtgtaaagtataaacaaaaactaaacatcataatagcccttgtcgcactgtctgtgctcggacgtattcaatccactgatcacgtagaagattcatctcgtcatttgagtacggattgctcttaccctgcaaaataaaacagaaagaaattatatattcattagtaatatatatgtggctataaatttctagtgctccttgtattttttttttctactagatctctcaacttagccaacacatatttctatttctatttatgataaaagcataacaagcatatcattgtccatgcaattttgaactattagaacatgaaaactgtgacctaaaagatactgaaagcaaccaaataaaaaaaaataaacaagtcttaattaatcaaaagaacaaccagaaacaatacactagttcactagctaagaaaatattaaaaat

SEQ ID NO: 309046 - DNA, 1622 bp, Cannabis indica
tcattccggtgatccatgaaattcaagattcttgtaataaccgtcacccactgctcggattacatcaggacctcccaaaaaaactagaggtgcagcttgtagatactttcatatagtggttccatttggttcactagaaccaccggtcctacctgcacagcaggagcaggagccgcctacatttttggagcaggcattactggagcaccttgctacccaggcgtctgatttcttcctcttgcttgttgattttggcttgcattgccacgtacctaatttcccattcctaggcaacttgcgatgggttaacatcaccccaactacgtgccttgcctctagggcctctgcctcggccacgaacatttgggggaatctaagctccctaaccaccactagatgcgatcgagttaccctgactcctggtgttttgccgggcgtccattctattagaacagcttgcataaccaatagctagtctggtcagatcgcgatcaagaataacttactaattatcgcttattttggaaatttaaaacatgcgcctattcagctattaggctactaacatgcttcctatcaggccattcttaaaagatactattaaaataaactacaaaagaaataaaggctcactaaatcgtgagacgagctaatcactaatgatgattgtgcatgtcgtgacaatcttcagaagataacctggcggctgtgataccaaattataacaccctactaatttaggcatgttaacgtgatttttaacttaactgtgcagctcgtttcgaatcaacgagtttattgaaaatcgtgaataattaaaactttatttaactaattataactaccaaattaatatacttgtattaatagggatcccgttttacaatatatttacaaatgtatcatagtgcatgttacaaaattttatcgcctaacgactatacaaaataagccccgttatcccaaagaccgtacgctccaggcctaaccaccccaacgtgtacaatctccatttgctcgctctcacgagatcattccaacacgttcaactctttccttccacatcctctaagcaaagccttccaatattgatagtggaggattggctaccaaaacataacacacaattgaaggcttccgaaattcgattttatcttggatatcatcagtagtaattttaactttactagttgatgttgatgacttcgaaaatgaagttttcaggttgtgtttcacattaccaaaacgtaaaatgggggttggatatgttaccttaagctaacttctcagagcaacgattactggcttccacaaaatggacaaaatctttcctgatatcctcttgctgtttgatagatcgaagagacgacctaggcgagagaggctcagggaagaaattgaaaattgagtttttgctaatgttaataattattacaggaaaacaatcaaaaattaattgtaatagtctgtagctgcaagatgtaattccattactgcagaacacagttttacagaaataaaccagaactagaacaataaattcagcaaaaataaaaataaaagaaaaaaataaaatcacttgacacaagagatttatttatggtatcagtgttctttcgaac

SEQ ID NO: 309047 - DNA, 1320 bp, Cannabis indica
tatctaattaacccataatataaatttgaattattgggatattataatgactaactcagccagggtcgtcagatgcaacgactctatccagctagagagtatggcaccggggccagcaggagggttggatctgtctttagacaactacattccctgcctttcctataggtggtaaatttgcttagcaacagatcctgcgatggcggctgctgagaggagaccatcagtaccatcgaaggttgctgggttactagtgaggcgtagttatggtactattggtagaagcatgcaactcttggaaaagttcactccacgccgttcacttcgcctagtgtaactacaaccccgtagttacattagggggaatcatttagagacaatataaaccaattacccttgcgacatgcttgtcccgttgagagacccttaaatgccctatgcctcgccaaaggagacagagtgcctaggaaatttgaaggtgtaagcatgcacctcctaaacctcccttgagctcgggagatgcgcgccgacctgttctccaagcgtggaagatcattgggagtgttgcacgtcttcaaccgtctttccagaagggaagggttgcttaaagtttgctttaatcctagtgacccttccacccattgatcttttcaagcgaagtctaagattttttatacaacttcagtcttcccttccaggaagctgaatcttgttacataaaaattcaacgtgactcttgcatgcacgtggttttccgtgcaagaaagatcactgggggtacgatacgtcgtcaaccctccttcccgagcttggaaagattgcttgaagtctgtcctaccccttgtgatgattttctccttgatcatttccagagaagtataagcttgaacttttatacaacgtaaaccttccttcccagacttcgaagcatattacataaaaattcaatgcgactctcgcatgcacgttctttattatacaggaaagatcacttgaggtaccatacgtcttcaaccctccttcccggacaaggattgcttgaattccgtcctatccctcgtgatgcttctccccttgaccttttaaagagaagtctaagctggaatttttatacaacttcagccttccttccaagaatctgaagcatattacataaaaatcaatgtgactctccaatgcacgttgcttttcatgcaggaaagattattggggatacaaaacatgttcaaccctccttcccaaacctggaaggacttcttaaagtctgtcctacccctcgtgatgattctcctttgatcttttcaagcaatgtctaagctt

SEQ ID NO: 309048 - DNA, 687 bp, Cannabis indica
ttttggacaattatcctttgcttttaggagcaaatattaatacatatgcaatataaaaaaatatatatttttttatgttggggaccatatcataaattcttgaatctaatattcaacatcaagactctaaaatcaaacatctttcctcagttgtgactaaaattacttaggtagtcaaacattgtctatcgcatgggtcaataccctttgttccgcaatcaacgcattaatattacctaatccatatctgtgtttatttatttttttatttttttctgaacaatatctgtgtttatttatttagatatatatacgctgttacattaaactaaataaatcaaataaacatactgagtatcttcatacagttcatatcccactacttgagtgtactattttgttcatgcactttttcaacgcgcagctaaacttttcaatcgtagtatagatcaattataaatcatacgatacgatagtcagagtatatgtaattactcgttttagaatattttataaattgtcgcattgtttaaaattgggtggatatattaaaagggaaaatactcgtagagatattcttaatggggatagctggatttgtccccactgatgtggctgttagacatttatatgtataaactgaaatatatatttatgtataaaatgcggaattaaatcaaacatata

SEQ ID NO: 309049 - DNA, 3732 bp, Cannabis indica
ttatgtcgaataccccccaaattcaaatcccttgagcgtggagcccttgctctatccccccttttcttttggtcgatctctcttgaactgcacgcagcttttccctaactagaggtcctcctagaagtcgtccactgagagtagggagctctttcttagcgctttccagaaaaagcagtgacatcaccacattctttccacttatacttgcacgagattcaacaacctcaactactattctcctaagacatattcattttttattgatatgaaaaaagcaaggacttcgcttcgtttttctttctttcttatgcggacctaactcattgaaatgaagaaatgtctcgacccattgagcaacgagtctagtgcttattaacgcgagggtcggtacgagtgagtctgttttggagcgtagagcttagtgagggcgagcccccattatgtagcttggtcttgcattgctccgttcaatggtattgattctgaccaactaatcccaaagagctgcgagctaacggggtttgttttgaaacaaacgttaagagtattcttcattcaagctttgaaacatccgcttcaagcttccattgagtctctgcacctattgcatctataaaaatgtgcacccggagccctacccccctaagaagacaactcaagacgactggccacagcgcaggccctacttctttctttgctttctgtatccgctcgactagttccatcgacgtgattatggaaaccactttttcactgaatcgagcgcttccgaggtcggttggaacactcgactattggtgtttcgaatcaaacccgggtagatatgcaaagtttgcatagcagtgtacttgatgagtagacagatccggagacgtacttacaggcttcgaagcctcgcctatcgtatgtatcggctacgtctcagggattatacctgaaaatgaaatcaaacatgcagcggaaggactttgcaaggaaaccatacatgtttcacattgttcgtgtgaaagtgaaaaagcggtcctaaaaaaggtctctcgagcctcaaacactgtggtttaagcctgataatggaacggcctgcctggtcactatgaatgaatattacgtcaatagagtaagtagttctttccgttgtgcccttaacacgaagctagggcagctatgcgaacgcttgtgagtgcattaagtaagtcagatactagctggtatgaagcaggtcaattgtgcaggattgagccctggccttggaagccatccattcaagcaatcaaacggctgcgctaacgcccttattagagtaaaggcgagacgctcattcctttgcctttggattcgacggaaagcaactcaaagcctagcttgagcttgaaaaaaaaactcctccttgaaaacaggattgctagcttccctagaacaacaacttctttccttgcctgatggattttttttctttcctcctggccaactcacttgcacggagagcttacccgctttcctaaccttagcacttccaatggctgaaagggaggatagcctaagatccccctacttgtcttggattgcattggttgcaggctagccagtcagatttactttctttaaagatccacccctaaagagcccgcctagtcaatatctctaaagaaccggcccacctaagattccttagtcaatagcttatcacatatcccttccttctagagtgcctgtggaagttgtcgttgctttttagcatccagtgaggaaggaagtttcatactggcaatgggatcaagcttagatgcagtgggatacgaaccagttggagtagcagttgctaatctagctctttcactccgttcctcaagtcctaagctaaggactaagaggtaagtaggctaggtagagagtctctgtctatgggccagtaactccctctatcaatattctcttctcccattggagtatatcctatatatagctggcaagttagaaggctattcaaatggacaagctttatctcatattcgagagctctcggagtatctcgcaagctatccatatgggaaaaagcacaaaagcagctaagatttccaaggctctcaagttcttgtcggatgtctttgaagaaagcacagcccttggaatctctctgaaaacggaagctcttgctgctgcaaattccctagtggttaggcagtcgagttggccttaataggattcactttctgttgaagtaggtcatactggaagaagagtgagccgctttaattaaataaaggctcgagagaccttcctagcaaacactagcagcagagattgtgcttattccatacgctgtaaagaactcactatctgacaggacctattctcgtatcagtcctctctaaagaagctaactttttaatgggctaacattctcagtgctacgaatactattgctctaacgtgctatctaggaaagctggttataaggttctaggtcaagcgcagtcactcgacaccattagaaaaattttaaggtctttacacaaacaagagcaagggagttttcaagcgcgggcaggctcctgggcgcaaacaaagaagctagttaaggaagagatagatttatgggactttacttaatggattgactgattgaacagtacgagtagtagcgatccaagaaattcattacctgcagagactaaggtcagtattggcaacggtttgttatagtcgtaagaaagattttccggtctctgaggccatcgttcgagtctttaattacattatggatacttcttttttggcttgttcacatgcttttcgcttgaaaggtttatgcgggacatacgggatatcgaagaacaaccttttctaatctatcatctcgatctggattgttgttacgtttttgtcaatagagaaaataaataaactgatcccctttttttttcctgggcattgatttcttcctgcatagcatctctccagcaagaatgattgaaggcttcagcaaatgattcaggttcatgagaagattgaactgacatgaggtaagctcgatgttttggggaaaacgattcataagataagacaaaaatccttcaacaggataagaaacttgagaggatcgacgaacctgagagagggatccagaatctgaggaagcgactgggctagactgctgatcttctggagtagtattagcctgggaaacataatgtaatcgccgccgagaataaacatgctgtgccgggtgactggaatcctctgaggtcagctgaacaggctgacaatcggcagaagcttctttcgaacctgaagagtgaggctgatccgtaacatcaactgcagaagaatgaggttcgagttgatgaacaggagaaggccgcaatacatctccatcaccattctcccccggggctgattaattaggttaaggaaaatatgaggcgacctcattaaagagaacattcaaggatacatcgagtctcttggatttcacgtcatagcatctatacccggactgagcatatccaagaaagacacaagtggttgccttggggacaatttttctcttaactgcgcaggaatatgaacaaaacacgtgcatccaaacactcgcgcctataggatggtgctgccccagtaagaagttcgtgaggtgccgctgcagcttattccctctctcttccccccccccaaaaaaaaaggagagagatgtcccgtcccttctttatgcacatccatatacatagc

SEQ ID NO: 309050 - DNA, 2476 bp, Cannabis indica
ggcatccgtgtttaacttcagcttgcccgaaggaggattcatccaattgggcatcccaactgaagctcttgaagatgaagaaccgtctttgtgaaaacaacttaaagaagaacgagttgaatggtattcacctaaaaagaaatggcagtatagagaagaacctaaggtggttttggtttagtgacatgcctctctttatttctttcattccataagctccaaaggatacaaaagaattgttccacttctgatagagactaggcttctgaaagtatgaccaataaatctttaagattactagtctcagtaagcaaaatctcaagagaaaaggaagaatttctccatactttttttgccctcttacaatgaatgagagcatgaaaacttgtttcacagtcgaaattacataaaacacagtggggggagtcgctgatgtgccttttaaaaagagcagccgcaacaagaagacaatcatggataactttctataagaaaattctaaacttagaagggagagaaagtgcccataattttttctacatttggaccgcctgttgtgaaccagaagagagtgaccaatctgcaaaactagcagccaatttataaccttatttcattgtgtagctatcgtttgattcatgatgccaaactagctgatcttcatgaggaaagatagataaagggatgtcttgaatcttcataacatcgatgtgtaagaaaagactgttaagaagagataagtcccattttttatcttcagtaattaaggcgtctactttgagattcataacataccccttaaagaatgagggcttaaaaattgtgtgactaggcagccacagatcagtagcacaattgatgttcaagccattaccaacttttcatcgaagaccttgttgaagaagttatttaccccaaacaatacctctccaagtcattgaaggataagagccactttcagcatcaatgaatgatgaattcttaaagtaacggtgctttaataatctgctaaggagtgaagatggattagaaaggcttcgtcaagcttattttgctagtagagcttgattgaaatgcacatagcttttgaatcccatgcctcctttgcccttagaatgacatagagcattccaagttttccagtgaatactagtgccagaagcaattgaaccctaccaaaatttattcatcatcttctctatttgatcaattattttcttagagagtcagaaataactcatagcatatgtgggaatagcttgagccactacattaagaagaatttctttgccacctactgagaataacttttcttgacaagccgaaagaagattccacaacttgtcttttatttctccaaaaaaaaactttttatctcatctcgaataggaagggagccccaaatagcgttcatgacaaggttgggttagcatatgtaaatgttgctgaaaagaatccttagttgcttgttaagtgttaggcgagaaggaaagaactgatttatatgtgtttaagtgttgtggaagcttgacaataacaattaaggtttgctcgacaaagtatgaggctatcatctgcaatgaacaagtgtgaaactaatggagcattacgagaaatcttcaagccatgaagtgaacctttatttttctcagtttataataatcttgaaagaccttcagcacaaataatgaataggtaaggagataaagggtctccctgtctcaaatatcattatgggataatattaccttaaaccgaaccatttagctggaaagagtaagtgacgatggagatgcatcggatgataagagcaaccagggaaggagcaaaacccaatgtgagcatcattccttgaataaaatgccattctactttgttaaaagctttgatcatgttaatttaatagccgaataaccttgtttacatctctttagatgtttaagggaatgaatgagctcaaaaacaataaggacgttgtctgtaataaggcaagatggcaaaaaagcactttgcgatttcaagattactaggaaagatgaggcttcatccttagaacaatggtcttgaataccaacttgtacaacacattacacaaactaataggtcgaagatgagtcattgactgaggctttttgatttttggaataagcgtaatgagagtagtgttaaaagatgaaggatctccaccatcattaaggactttcagaacagattgagtgacaacttcaccaataatgtgccagtaattggtataaaacatgaccgacatctcatccaaacctgggctaccatcgccagtcatggacttcaaagccgcataaaccccttctgctgtgagaggcaaggttagagcagagttaacctcattagaaaccaagcaagaaattcttgcaagtacaacttgtatagcagcagtattatttgttggaatttattttaccaggatcttagatctactcacaagtatgttgtttaa

SEQ ID NO: 309051 - DNA, 1180 bp, Cannabis indica
accttcaaatgattaagtaaactcgagccataatcacagaagtggcatccacttttaattcggatatgaaaatgaagtcaggattgaacgaccgaatcagggctttcagttcaagaactatagaggtctgccctaaccctctacagttacaagcgacacctttcacggctcctgtggaggaggtacaccggcctcctccacaggggtcaaagacaccaccgccacaccaactgctgaactagcaatcttcaatttgtatgcccacattgcgtggaatagagagatccatcagccgggccttcatcttccaagccgtgagtctctcagactgacccaccgagactagttcaactcctttacaagagggagaaacgccaatcttagcgcatccactttgatcaatttcgtcactctccagtggttcctcagtagattcatgagaggcatgatcacacaaattattatccacccgccccagtggtcccgtaccccgaggataatccctgaccacccttttaactctacgcatagataccaacggggtgactcccactgagttttttttcttgtataatatatatatacggtcatttacggatttttgtccagaattttgacatttatatataatatatatacggtcatttacgaatttttgtccagaattttgacatctaataatatatatcccaactttacataccattaaaaatttctcggattaagatagtgaatcaagatgtcctcttaaaaagttgtgtgttgtgttaaaccaatctaagtttgacacgtcaactaattttttatttattaataaattaaccattaatatatataattttttttccttaaaatactcaaattaattgctgtgtcacaataaaattggtttaatatactataaaacacaaccttttaacagaatattctaagatagttggattgaagagtttctgtataatttaagtgaaaattacatgagattttataaaaaaagttataaaaatatagtatttttaggtttgctatttctttatggcatttttttacatttaaatttttttatagtatttgatatgctatatttttataaactaatatccaaacacatatttgatgtttttgtttctagtttaattagttttattttttttttctttaatttattttatatttacat

SEQ ID NO: 309052 - DNA, 819 bp, Cannabis indica
caagttatatttggagaagtctattgaggtaaagagttggtttgcaagggggtaagaaggaaactagtaatgggaaggagactcttttatttgatgatttgtggcttccgaatggttcaattccaagtttagctagtttggaacctggtttggtcaataaaaatattagtagtatttttgtggtgggtgagaaaacttgggatgttttatgttgtcaaattactgccgaagggaagttctcattctaaaaatattgagctttgtagactctagaaaccaacgaagcaagcttagtgagaaacctccaagcgtgttcacccaacatagccaaattaaaatcatgaagagatcaaaaacccaatcccccaacctccttactacccgccattcctctcccaactcatccacgaaattccttggcaggaattcgtagatgacttccaccgaaaaattaaccataagttgttccaaatcaagacacattcccgcaaaaataggaaaacgctcatagcataagctggaagactttgagccacattacgaactagaacctccttaccaaaacacaacaagagtttaccattccaactttgtatatgcttccttatcttctctttcaggaagcccaatacaatagactagttttaaccgattatacttgggagatttaagtacataatattctcactagcttcatttatatttaacatagcataaacaacctcctaaataacatcgctcacattcctactaaaaaaaagtagtagatttactcaaattaatcttttctcctaatatcctctcaaaactatgtagaat

SEQ ID NO: 309053 - DNA, 2227 bp, Cannabis indica
acttaattatattaataacaatacgatatttaggaataatgctattagtacttttaagatgtcttttattttttaccttttaggatccacatattttttaagggcttttacaaaatacactaagatttttaacttttttatttttttactgtgggacagaactttttcaaaaatactgtattttttttaaaatattgtgtaagttttatattgtgtattatattaaatttttactattatttcacggttgtttttagttgttttaattattctgttttgttgttttatgattattttattaaaatacagtattttgtgaaaaattccatgtgacaattattataaatttttactcaaaatttaatgttttataaaaatcttaaatttttagtggcttagtttgctgggcctacccaagtgagaccaaactctcattttttttcttgcaaaaatggggtgtgtgcatagaaaaatgccttcccaaattgtaccatgtaaaaaaaaaaatagattcagttggaccagggccgaccctgagaatatatggacctaaggcgaattaaattttggggccctcagaaatatatataaaaaaaattaaaaagaatgttatgggattcgaacccatgacattgtataatatgtcatacacctcaactagggataagttgaaaaatacctcattttttatccattaatcaaaaataccctcatattatattttattaaaatatacctattttttgagtggtttgcccaatataccctcactctctacctaagtctagcatataatttacattaacctaaagagtttaatggggacatcatctataaaagtgggtatatcttacaggatataaaaatagaagtaaaaattaaaacagataaagtaaagtgggtacaaaatgtaattttctccctcaactaactaagctatgactatttataatttacaatacacttaattttactttaataaaaatcaaataatttttttttattttttattttgggccttcgaaaagagtgggccctaggcacaggcctagcccgcctatgcctaggaccagccctgagttggacatttgttagggaatttagaggaaattagactctgtacctttttctattgtcctctttgatttttaccatcttttttaaagtctatcatttttatttctttttttaaacactttaccaattttgcccatgtcactttaatatactcactatgtgactctcttagggtatttttggtaaagtacatataaaaagagatatttttcaattaaatataaattagagatagatttggttaattgataaataaaataggtattttttaatttaccccgggaatttacagtgtataatatttctttttcaaatttattatatttatattggttcattatttttttataaaaatattgtgcaaattttatattatatatggtatattttgtaaaaaatttccatttgtcacgtttgtgacaaaagtttgggctttttcattttttttttaaaacaataataaatattgatttgattggttttgtagttttgaattttttttaaaaaaaaaaaataaaaagctgaaatagtaagattaacactattttttcttccctattttctttcaatgtcttcttcttcttctccattttctcttctatattttctttcagtttcttatacctaaatttcgaccagtaataagaaactgacacgtgtattaaagttggaatatgaaccaactcaaactgcgcattataataaatacacattaaataactcgcctcgaaaaatacagttaatagaaatattcaaactcgccgccatataggcaatagcgagacatgaataatatacgctcccgaaagcagatgccttagcggaattggcatttcactttaatctcgataaattaaacttggtcccagtagaggtactagacgagcaagtatatgcaaggaagaggagcaagagattgacatgatagaggtgagccctaatatacgctctcgaaagcactctcacttatgttgacgtcgagatcttgctctaagaagagttggttaagttagttattgcctaactaacttaacaacctaaattcttccagccatcaactttaggatcttgatcctaatccttcaaatatcgctaacacttatcatttcaaacataacggtcaaattgagttttgagagagagagagaga

SEQ ID NO: 309054 - DNA, 628 bp, Cannabis indica
ccaatgagcagttccagtgcaacatttgaccaagaaagaaagcagccacattggcttttccatggtttaaagctcaaataggatcactttaacttcaacttcaacttgtatgtgtgtgtatccttgtaaaatttacacgagccattgaatttgtaaatggttcatgcatgattgaaattctaatttagttgccacttcaataaatagacagttctgaaacctcatttctgagctaagctgttgtatataggatcacttacaacttttatattcaacttttcagattaatcagccctttttttcataagaaaacaaatatctctgaattctgactaactaaagaagtatttttggtagttcagaaacatctgttaataacgatagatggactatgctcatttaaatcaggcctcaataaaggaatggagacaaattgtagttcaagactgaaacaggagaggttcatgaatcctaattttttgggaagtaattcatttattagaagcaaatgatcatgactaactcaactcaattattttctaggtaagcaacatattgtacttagttttctgaaacggatggcccactttaaaccaaaagtggtaaaaaaaaagcaagtcctagaaat

SEQ ID NO: 309055 - DNA, 745 bp, Cannabis indica
aatggggttgccgtttatgccattatcttgcagaatacaacttatacagggcaaggtcaagaaaaaatcgcattctctccatccaaaacccttttcaagaagaatttaaaaacaaaaattgaaaaatcaaaagacaattaggccagcaatccaaactccaatcacccaacttttcaaattcattcactctaaactaatttcatagagcacaaaaatgattttgattcaacatattttcctctgatagatatagtaatttttttcattttttattcctaatcagatgttgtaaacaccaaagctaagttcatggtcgaccgaattgtaagaagagagaagctcacctggtgctagggacgtttcttgggacttctagctcgagttcagtgggcaaacccagaaacccttctggcgctatcaaaggtcaggtgcgatacatgactcacgagaggtgggcattgtgattgtgaacgaatagggtcagcaggcgtcgccggtagtggcggaggtgcaccgccggtgatagagaaagacccgagtgagtgactgagtgagatcgagggagtgagagacagggagtgagtgagatgcgagggtttaatgtctgtcttatggtgagaggcgcgagagttttcattttttagccgtatttgcgacggtttagaaccgtggggcatagttttaactttttttttaaaattttttctacacttttaaccgtcgcctaatctatactagtgttaaa

SEQ ID NO: 309056 - DNA, 1990 bp, Cannabis indica
aggaccatgaaggagaagagcaagcagagaggacgacggagccccaagggaagagaggaagacgggtaggaaaagccagcaaggaactcagactcgagacccaaatcaactacaggaagatcctcgagctgggagacttcctcaggatttgggagctcagtcggcaccaaacctagggaattccctctagcattaccaacgttcgatgtagctctaggggaacattaagcagtgccttgatggctttgtcaatggccgagtcatgtttggatgacatttcaacgtccgactgattggcctcctcgagccctgccgttttgcttctcttacttttgcttttacgcttaggagactttgccatgaatctcttcagtcgggcggcagtttgggcctcgatttcttcgatagtcatctcagaaaacttcattttgggcagatgacgggggtaggtctctacaaggctggaatgatgcttagaaaattctatcaaaactgtttcagttatttgttttaaatgcttcaaggcgttttttatgaaattaggccaaataaaataagaaggataaggagtggggatacctatgggatcctgagtttgctaggccaggcagaggaattcgatcagagcttcattggatagaaggtacttaatcgaccgaaactttgagtccagggaagtgaccttacgaaccttctcagtaaaaatatctctgaacagtctctacgttgttaatggaagctgcacatgaaagtcagtgttaaagtagctacgaactaattaatgacaatacaaataaaggcaaaagcactaaaaacaaaagaaagtgggggaaaaacacaaagatatcctgacaaaaggaacgaagaaaatacatggagctccccatctccgactaatgaaaggggtagtggggtcatcgggaataaacttataggccctttggcaaaaaaacttatctttccactccttatgagaggtctctaaatcggtaatgagggcctaattctttctaggctgggcatgagagcacccttgctcactctccatcaacgataaaaatgaataatgtctgatacttcccacttaactccagccttatcgcccaaaactattaaacctaaaaggatagcccacacgttggaaagtaattaagcatgagcaatggagtagtgcgaaaggaattccttaattaatttaggaatggacagccttagcttaattttcgactcaaatcaataggaatgcaagcatagccattcgacttgaggaaagtcagccctcttgtgcgatttagggagtctaacctcgacacccgacgaaaagccataagaggacactaagaaatcaagttctgaatgagttaaaactgatggactacttgatttatggtctagataggagcacccaagagtaggttgttttcgcttggttttctgtaggggagggacgaccagagtaaccctttcggaggaaacagcttgagcattgatacttgcaccatccccagagcgagaacggggaacgattgagacactgcctaggtactcaacttttgggtttgcaggatcgtcaatgttctcgtcctccatggaaggggtatcagagactagcaaagactcaacgaatctgggagcgatactcgaggaaagagaatcggaaaccggagagaaaacgcctggatgatccacatttgccattataaaattgataaaataaaagcttgggattcagaatttaactaaatgattgaagaagaacccagtcaaatggtaaaacccatcttttcactcaaagacgctgagaaatggatacaacaatctccaagtagtcgcgattagggtaatgccaagacaaaactaatggcaaaagagcaatgaaacccagaaggaaggatatggaaccccgctttttttccttaaaatagaaacaaagaaaatgacatatatctctcctcaatgaacccttaaagttttctcctaaaaactaagg

SEQ ID NO: 309057 - DNA, 894 bp, Cannabis indica
ttgcttgtagtgactcatattctgactttgtatatctttagctagacaattagcttgttgactggaaattcctctacgtcgacgattgtcttagtgtgattcgaatcactctctctcaaaaaaaaaaaatgacacataaatcgtcagttgtaacgcatcaaaagaatacgagcaggtaatcctagccaccaaacttggggaatctctaaagagaaagcaacacgaggaagagaatgagccatgacattgtttgcccagttacaatgaaaaaaaaatacttaaaaaagaagaccaaacatgtttgatatcattaacaatagtagcactgactgtttttcattactagagatagctttcaccaaatagagacaattagaaaaactcgatagtcttgtgtaacctagccggagacataataacccctcgagtaaagtcgccgcctctgccacatgaggatcgaagacaatagttattggcgtagccgccgagtaaagtactgaacccgactagttagaaacctacctcgaggccatttttgcaatcatcccaacaaataaattgacattcctaacactatctcatatgcttgatcacctctagaaggaccaaccacgtctcttccactcaccaactctgatagagaagatgacgtttgtgcatcctgataatactaaagaaaattcattgaccattggcacagcatatcatttgaaagcaatttgtgatcatgaataaaggtattttgtctactctccaacaaagaacatcaaattcttctatttcttgattagagaggatagtaattaaaagctttttaagatttataataatttttattctaattaggatttttgtctcttgaattttgacatgtactaaattatgtcttctaaa

SEQ ID NO: 309058 - DNA, 1796 bp, Cannabis indica
gtagacaacacagtgtgtacacagggatagtccaacatggtacttaacacctaaaaatggatggaaatggctaattgctaacagaacatgggtttagggagtcttactacaaaaattttaaaattgagagttagttgcaataaactaagcacttatggagattatggcgcaaattactgttcaaaaatagacgactaatatgattgccaagataaaataaaataacgactgtttattttatactgttactaatggttctaatataaattatcgtgatttatatgtaggttctttaattacaataagtattatgttaacaattgtatttatagaatgacacttatattttcatttcttttacataataaaatacgtactatactaagcagttcataaaatattcaatcaaattctcaaagtgcgaatatctgcacttgtacggattggattaaaaaatttaaaacttaaacttatacaaactggatattaattgacatataaatataatcaatctaattaaattcacacatatttatatatatatgtatacatatgatacaaataaatttcaaaacatagtagctcaaatgtatatttcattcttatttatatagaaaatataatctaaaacaaaaataaacatttcttttatacatataactttttttcatcttccttcgaatatattattttttattttatttattttaattagttgttggagacattaaacaacaatagtttgttttattttgttgttagttaagtgagaagataatatatttttttaataaatattaaataattcaatattaaaaggtacaaaatctaaaataaccgacccatccacacttttgcaaattggattgggttggatttaagtttgttgatgcttaaaaatggccaacactagcttgctagattgatgaaataaaaaacgagttagctaaatattaaacagagacacaaagaatttatagtcgttcactccccatgtcgcgatggtaataaaaatacgtctacttcgagttttttttttttttatttctcacgagaattacaagagaattgactaagaaaagagctcagacttctagagagagaaagtagaaagagatgctctgaccttataggggcttacaagaatgtgataaatgaactagaaaagcagtccttttataaggaaggagatcctattaaaataataattaaataatacagaaaatatgaaaaatcatttaggcttgatcttggcaatttatgatgatctaatggtgaaaattaactcttgatgaaagttgtcaattttcaaagcttgaatctcatcccttggaccgttttagggtaatctacgaaaataattgcacttgtcttgggcccgatttcggactcaaaatctttagaattcgatatggctgtgagacttaacttgaaagattttgaaaatgcaagtttaaccgtgtcaattggatcaatattgagggagttatgactattttattgaaggttgtttagcacccaacacccaagttgacatcctagatgatgggtaagtaaaaaatgcccaaacttgtatttttttttatgtctaagtcatatgttggcaccacttagccaatttcttagtttcggtgatattgttcaccagttcttggagatgtcgctttttggtaaaataggtgtttactgagttttttgataaaccacataatattagagcttaagaaagtaatgaagatatgaataataagataacgaacaaaagacttttactcatttttgttggaaattatttt

SEQ ID NO: 309059 - DNA, 1930 bp, Cannabis indica
aaggtctctatgtgtggtacggcccgcatgctcagcaggggggcttttttacctcttcatccgtacttccaaaaactcacaaactactacatgatttgcccgacgcatttttcgtcgaaggggatcaagtacttggctacgttgtacatcttgtacacatagcaaggatggggatggccctcccctcatgacataaattgggtttttaacttgaagtctaactcgaagcaaggccgcttaggttactttcatttttcccaagttgattgctcttggttaaccagcacaaccgacaagaagatcttgaaaatcagtaattacgtctaggactattacaataattttatgaaaaaaataattaaaatttaattaactttgtatttttaaattattaaatatgtaatattttggcatttaacattcgttcaaataactagagtttgttaagatactatgcagtcaaacttacttgatcgttcttgatcaagatctatctacacaatatgcagtaaatcttgtacacctttccaattaaagggaattttgaaacgatcctatggtctgatcaggtaccaaaaacttgttacatagtggattgctcaaataactagagtttgctaagacaccatgtgtcaaatttactcgatcgtgcttgatcaagacatatctccacaatctataataaatcttgtacacatctcctaattatggggtacttcaaaaacatcctacggtccaattaagtatcgaacatttgctacaaggtggatcacttaaataactagagttcgctaagataatatatagtcaaacttactcaattaagaccattcggtgtaatatgtagtaaatctcgtacaccttttctaattagggagtattccggaacaattctacgatccgattaggtaccagaacttgctacacgatggatcattcaaataactagaggtcgctaagataatatgtgctcaaaattacttgatcattcttgatcaagacctattggcacaatatgcagtaaatcttgtacacctcccctaattaggagatatttcgaaaatatcctacaatccgattaaatatcatatacttgctacatagtggattcctcaaataactagagttcgctaagacactgtgatcaaacatactcgattaagaccaatcggtgtaatatgtagtaaatctttaactcctctcctaattagggggtactctggaatgatcaagtggtccgattaggtaccaaaaccttactgcatggtgaatcactcaaataactagagttcgctaagatattatgcagtcaaacttctttgatcattcttgatcaatacctattagcacaatatgcagtaaatattgtacagttaattaggggatattccaaaataatcctacagaccaattaggttttggaaacttgctaaatggtggatcgctcaaataactatagttcgctacaccattatacagtcaaacttactcgattgttattgatcaagacctataagcacaatatgaagtaaatcttgtacacatctcccaactagggatattccgaaatgatcctactgatcgattaggtattggaaacttactacatggtagatcgttcaaataacaagagtttgctaagacaatatgcagtcaaacttactcgatcaatttttgatcaagacttatcaacacaatatgcaataaacttgtacatctcttctaattcgggggtattctagaataatcctacactccaataaggtatattttttaatttaatttttttgtcatgatattttaaatattatttatttttgtttgatagattatatttttttaagaatatgaataggaagaaaattaaaaacacatttaatataattaaagatttatattttatgtaaaataaaatgattaagagagtgta

SEQ ID NO: 309060 - DNA, 1207 bp, Cannabis indica
cgtcactactatacggtggttccttttgcccaatacttatctgattatttagcaatcactgaatatattctggctggagtaatgggcaccccttccatccaaatcccatcttcattaacttcacgaattgctactgcttacgttttgcccataattcatgattattattctaataactcccaagctttgggtctcaatatctgtctcgatatcactgccctaactgctagtattgaataccaacaccaacaccaacaccaacaccaacaacaacaagagcaaaatcaggagaatataaatattaatgtcaatattcctgcagcgaaagactccgtaagggctctcaaggagttaaacgatgtgggtttgatgagtagttgcaattgtaccatatgtttcgagaagatggtgccgtcgttgggtgattcgtgtgatgatgatgatgatgatgatgagattgagatgagcagcagagtggttgttgagatgccttgttctcatgtgtttcacaaggattgtattgttcgatggttggagaccagtcatttctgccctttgtgccgttactcaatgcccactgccaattgatttcatcctcttcatcctaatcctaatcctaatcctaatcataatcataatattaccgttgtctatagctacctactatacatactgatcaattttcaatactatatctttgtgtaattttcaattttgtcatgattaacacatgaattgttctaatattagtccttttctaaagggaagatgatagtgaaatcttttattggacaagaatgtatgtgttcacttactcatttgaatataagtttgatttgttatgattcatttactctgttcttgtactttcaaggtccagaattaagaaattaatgtctgttgtgtgtgcaaatttcaatgattcaatgtagtctttttcttagttagaaaagggaagatgatagtgaaagcttttcttggccgagaatgagtttatttactcatttgtaatgaggaaacaatcatgatggagaaaagtttgaatggataaagataggataatgaataaaggttttgtttttccaataattgtgttgatcaggcttgtttatctctaacttatgattagtttactctgttctttcactttcaataaagtttagaattaagaaaacaatatagtccttttcttagttagaagatgata

SEQ ID NO: 309061 - DNA, 1092 bp, Cannabis indica
gccacataggacatgaagtaatgttctaaaaaggcctcaggtcacataggacataatatttcaaaaaggccataggccacatggaacacaaaagtgagtaatgttctaaagctataatgccacaggctttgcggaacatgaaacattgttatatgatacacacatgatgcttaatactacaaaaattccatctacatgtgtacaagagctgaatttggagccgccaagttaagatccacagtgtcaaacattacaattctggctggccactcccctcattggactgctttggctagccagacccctatatagatgtccaaggccaatcagccacatgcaaaaagcaccatggttggccagcttatatagtgccaagaagacaaacaaagttgaaagcgtaactcactagagaaaggtcctgaagtccgacggagtatagcctgtcaggcccactattacccaactctttcaaagccccatccaagaaagaaatagctctctctatatgcagagtggctaaatcagcagccttttaaccagaagttttacttgctcctctgttgggcctccatgtaccttggttggcatgctgaatcagaggttgccttgctggtgcaggcctcggtggagaggaaggtagtgatggtctactagcatctacaccacgggaggtcctggacacctaagccctcacccgtccggtaggctcatctaaaggctcacctgcaagacttcttaacaagaaagacatgtctgcaaaaagaaagtcacaaagtcagaatgcattcataaaatattcaatacaagaatataagtatggtgttatcaactatcaaataccatcatcatcagaagagtaactattagagctcacaactaaaaccttgcccttgcccctagatgtaggcacggggcttgaaggtctatcaaaaatctagcctctaggtccgatttgaagggaggtgtcacctactggatgctcacgggccaagtgcctatggagaggtctttctctctctctctcctctccaaattctatgcaatatgagacaaaggtacttcttcatcatccaagtcagggccttgcccatc

SEQ ID NO: 309062 - DNA, 1722 bp, Cannabis indica
cctattaaagaggggtcattcatcagggactcatgacgaggggcttgctgacccacctatggaggaggtggctggccaggacactaaccaccaggctagctacaatgctaatgatggggccgccgtagactctatcaatctcgatctcgcagctccagattcaactcattctgcccctgcacatatttagacagtttttttcattagtggttttcattattatgtttgcataacatatatagtattttcatgttctgcatagcctatggctttttatagccggtggcctatcatctttagaacatcacttacttttatgatctatgtggcatgtggcatttttagaaaattatttcattttcatgttccatgtggcctgagacctttttagaacactactttattcttcagccctagggccttcaagtttgtatctttggtccgataccctactttcttttttattcatggattgtatgactgatcatgtggtttttaatcctagatatcttcttatggccttgataagtaagggtctagatttactttgcgaagccaaagtatgctgacaggacttagagggtggtttaataggttatactaagcaataaaatttctctacataagttctttatgctagtttgatgtgttgtacaggtgcccccaagtgaccatggagacaagtctcttggtcacttaatattcaccaagcttcacagactttacttgggttctatcttatgagggtaccatactacgcatgtggaactaacagagtaactttaagaagttagtctttcagcaagtggtttagacacaatgaacagaatatatgcattgttatttattcattaattggtctttgttgttgtgcaacttacataatttaatctacaatttgacattacacatatttagcttctagatgtcaagtggctacccctgtgtgcctactaaagcagaggccaccattgaagaacgatgggagaccacgctaaaaaggtcatcggtgctagcaatttttgtactctaatgttgagtaggtagaattgctactgtggagtaaagttctaaaagcttgttactaatagtatttacgaaggtgctctccattctagtatcctggtaagaaatcaagctacatgttctcgttgtaccttcctagcttttaggctcccctactagttatctctgtaacttgataagggccttcccaattaggtccaaacactgctgatactaagtctttggtgttcaagaacaatctttggagcactaggtctcctccaaataatttcctactcttgacttgttgttgaagtaccttgctaccttttgctggtaggcttacagctttaggttggcttgttctgttctttcttctactttgttgagagactctttcagtagggtgttgtttattatttggtcataagttgttctcctctgagacggtggcactaactctacaggcgacatcgcctcgtagccataagctagagcaaatggtgttttcccaatgatcatcttcttggtagtcctatgcgaccataggaccttagggagcaattcatgtgagtttccttttgctttctcaaggtgtttattcagagtgtcctttaggattttgttgacagcttccacctgcccattttcttaaggatgggccacggcagaaaagctcttgatgatgccatgtctattgcagaaatcagtgaacat

SEQ ID NO: 309063 - DNA, 1630 bp, Cannabis indica
ggtttgggcggttacaaaattttttgtacagccctatagggtagggagttgtttgagttgacaatagattcattcaagggtaaaattaatcatggtatcaagatgaaaaatcagaaggagaaaaatggaggtgagtcatatgatggctggtacagagctttgggggtgtctgtaggtgtttattgtttggttttatgagttttgtcccgagatgctaaattgtttttacaaataagttgcatctagtattccaagaattctcaattggatgaatgatattggggccaaaagttcaacttttaaggttttaaaaggcatgatatttgatttgcctttaaagcagatgattcttagtttgttaactattttaatattgttgtttcccattttgttatttttttttaatattttttgttgttttgatttataacttttgtagttaaagttgaagaatattcgtcctactgataaaaaaggaaatctttgaaatttgatggcttatttgtggatgaatctatagatgatcatggtccattcaagccaaattttgagattagttcgtctttcaaaatatctaattctgacgatatagaaatattaaaagataagttagaattagttatatccagccaagaattgttggtcaataattttattgcgttaaggtcttttgttgatcttaacttcaagtctttgttgactgctgttcaagatattcagaaaagaaaagttactatcatttacgaccgcccttctgttgaggtattttttttttatagttttggataactttttttaattccttgttatgttcgtgttattttttttcttgttttattcagttgttttactgttgttaaacatgtgaagacatccgatgatattgatgaccttgattctaatgatgctgatgctgatgctgatgatgatgaaaaaggattaccagaatcagagaatattaaaattgagtctaggtgaagatcgtggtgatggttatgttgatgatgatgtgtttgatgataaggttggtgctgatgcctttgctattggtgtggtacaaggtgatgttgttgtaggtagtgaaggtgatacatccaaggatgttgatagtgtcaagggcaaagaatttgatataaagggagatgatttttttcaagggcataagccagcttaagattgatgatgatcaagttgttttggctggtttggaggttgttgcaaaaatcaaggtatgttgctttattatattttcaattttttgcgattgttttttagagtagttgttttacagttgcaatagagttttattctagtttttaacctatcaatttttacttgttatttttcttttcagtaggttccagattcctttcctgatgaggtagttgaaaaatcagatgtcaatgtttctaaagaagaagaggatgacactgttgcttatactcctcttgtggacaagagaaagcgtgcctcgacattgaaatctccttttgttgattttgggtcgtctgatttgaagaccactccaatggagtttatgtctccaggttcacaaataggagatgggagggattttaagattgttactgtaacgccctgtccagcagggacgccacgtgtgtgcacttta

SEQ ID NO: 309064 - DNA, 5124 bp, Cannabis indica
tggtaatttcatggatcctcgatttcatttcccctactatagttgatagtgtcatgtatatggaaggtgcttcttgcatctggtctgaattgcaggaaaaatttcatcaaaagaatgcccctaggattttcaaagtcaaaaggtcgatgcagacactaactcaaggatctaatgatgtcacttcctattacacaaagcttaagggactgtgggacttgttgcaagagtacagaccgcaacctgattgtacttgtggcgcaatgaagactatacaggaatatcaagatgaagacaaagttcttgaattcctcattggtcttaatgaatcctacctaaatgcccgatctcaaatcttgcttcaagatccactcccaaatgtgaataaagcttatgctagcataatacaagaagaaaagcagagagggattatcatacctcagattgaaagcaatcaatctcccaatgataacacatggcaatttgctggaaatactcaagcaaattggtgcaataatatcgagataatagacctgtatgttcacattgtggagtgcctggacatacaattagcaagtgctacaaaattcatggatattctcttggacatcgattgtatggcaaatttccaagggaaacaccctataaactaggaaaccagcagggtcaatcttctgctaattacacatcaggaaatgaaacaggtgaaaatgcaggagaggagcatgatttggctgctcagtgtcaaaaaatcatggctatgttagcacaaaaaattgcaagaaaccacggttcagcctcagcaactagaacaacttgtcatgtccaacatatttggtattgtttcttttgtccctaaatctagttagattattgaaattggtgccacacatcatgtgtgctccaatccctctttattttcctctactgaaaataacaccaagatcaccattgttggtttgccaaatggaaccaatactagagtttcttttgttggtaaggttaaagtttccaaattaccttgaccaatatcctttgtgttcccgagttccatcacaatcttatatttgtttgtgctttgtctgattcctttaattattctttctcatttttcccactaaaggtgtgattcaggatatcaccaagaatcgagtgattgggatgggtgaaagaattgtcaatctttactacttgattgagcagaaaactcctatagcatgttctatttttgattccataattagtaatgaaacattatgacattatagacttggccatgcttcttgtataaagaaccattcattgaataaagctttggaatttcagtattctaattgttctgattttcactgctccatatgtgatcttgccaaacaaagaaaattgccttttgttagcaatcataatatttccaaacatcattttgatttacttcatattgacatttggggtccttatcatactcaaactgttgagggttttaagtacttcattaccattgttgatgatttctctaggtacacttggatccatcttataaaaaataaatctgatgctcaaacaaccattccagcttttttgcaacttgtcaaaactcaatacaatgcacaagttaaaggaattagctatgataatgctaaagaacttcaatttcctgcattattttcttctttaggcattttccactatcattcctgtgtgcaaaggccacaacagaactctattgtggaaaggaagcatcaacatttgttaaatgttgcttggggagattgcataagtactgttgcttatcttataaacagaactcctacccctaatcttcaacacaaatcaccctttgaaatactcaaagccaaagcccccagctatgatcatttaaagccttttgtatatcttgcatatgcctctaccttagggactgcgagaacaaaatttccccccagagccactccatgcatattttaggctatcccatggggatgaaagcctataagcttcttgatcttaatacaaatagggtgttctgctctagggatgttatttttcatgagcaaaatgatccctttgtgttgcagggttctgttccttctaatttttttctttctttcttgttgatgcttcccaacaacatgttgtagactcctcttgctctcaacctgaattacagtcacctatacatcatcctagtacaccacctttcattcaaccacacattcttgaacctaatatcattggtatacctgaacatgtcactagtactcgaccatctagacaaaccagaaaaccatcataccgtactaacaatgtgcaatctcaagtacataatgattctactgctcaccctcttttttccatacttaactacagcaggctatcaccaaagtttcgagcaactgtgctagccatttctagtcatttcgagccagagttttttcaccaagctaaaggcatactagtttgggatgttgcaatggacactgtaattgaagccttagaaactaatggaacctagattttttgttagtttacctgctggccaccatgccatagggtgtaagtgggtttacaaaatcaagtataatgttgatggttccattgaaagatttaaagcaaggcttgttgaaaaggggtacaatcaacaagagggtattgactataatgagacattttcccctgtcaccaagcttgtttttgtcaagctcactcttgtccttgctgccattcaaggctggtttttacaccaacttgatgttaataatgcttttatccatggagattttcatgaagaggtgtatatgactttacctcaagggtatagtcctaagggggagatgccacctaatgctgtatgcaaattaaagaagtctctatatggtctaaacttctcgacagttgtttgagaagttctctacaactctaattaaggagggattttaacattcaacatctgatcgctctttgttcatccaaaggagtgaatcaagcatcataattctatttgtctatgtggatgatgttatattagctagcaacaacatggctgctatggagaaattagaagtgactctgaacaataaattcaagctgaaagaccttggagaattaaaatattttcttggtattgagattgctagaaacaatgaaggtatttttatatcccaaagacactatgctcttcaattacttgaagacttaggacaattgggatgtaaaattgctaatactcccatggaagtaaatcgcaaactaagccaagaaggagaagacaaacttgttgatcctaaactgtataggagaatcattggcaaagtccaatatctcacaataactaggcctgatctagcttatacaataaacaaactcaaccagtttttggtccctcctcaaatgaatcacatggatgctgcatttagagctctgcaatatgtcaaaggaagtcctggacaaggacttttttatccagcaagctcaaagattcaattcgaggcatacacagatgataattgggcatcatgtctcgacacgaagaggtctacaataggtttttgtgtgtttcttggaagatcttcggtgtcttagaaaagtaaaaaacaacatacagtatcaaggtcctcagctgaagctgagtacaaagccatgtcaaataccacatgtgagttggtgtggttaatatctctgttaaatgaactaagcattgaccacataggaccagacatcttgcattatgattacaaagtagctcaataaattgttgcaaatcccgtattccgcaaaaaggaccaagcatatagaaatcgattgccacttggtaagagaaaaggtccaacaaggagttattaagatagttcatacctccagcaaagaaaaaatagcagatatttgtactaaggctctacttcctaatcaattttaaatcttcaaagacaaaatgagaatttgtaacatatacactccaccttaacggggagtattaaagttagttgttgtaaggtgttgtgtacttggttagttggttaggaagttagttagaggttgttatgttcgttatgtgtgtatgaactgtatataaagaatgtactgtaatgaactccttgaatgaatgaatttcctttcatttctcatttctggtcctctgtttttctcttctgaaagtaaaacttttcaacctgtctctatcaagggatgatggataacaaaaaattatattttcgctcaagagattattcttgatttgtaacgtaggcaaggtcgagaggctattctaggtgtcaaatttgatatgtcaaaatcatatgatcgccttgaatgagattttattgacaaagttttccaagcttttgttttgatagtcaatttaggagcttcgttcaacattgtattggcactattagtttcaagtttttctcaatcggggttcaactaagatcttcttccctaaacggggtttatgtcaaggggatcgactctccccttatctctttataatgcacttatatgttctttttgagattattgatttaaaagaaaaatatgaatctcattcaaggtgttcgtctcataactagggtttcatttgtgtttttggcagagagagaaaaccaagaaagtgaaggtatgtaatttgattttttttatgagataaacataacctattcactatttatttgacttaatttaattaaagtcatcttccaataatctactaaaatttaactaaatataacttatgggaaaatgaccatctttccctctacttcacttaataagtaatctacatatttagggataaaatagtctaaaactatccacccaaatactcctgacattctaaatgtctaactatcttgcctcgctaattctaagatacttaactgcaactaagtgacttctaatggccaaatcgtcgcattccactgttaccgagtataaaatatgaaaatcttaaaatttatatataatatataaaatacacctaaaattcaaatatatctccataattgagaaattattttcatatgacctatttctgacaataagccctaatttctactatgaaacacataattataattaattataaaataaaattatcatttatcttatttattaattagactttacaaagtc

SEQ ID NO: 309065 - DNA, 1230 bp, Cannabis indica
ggaaatgatgagccatggataatgatgggtgatttcaatgagataatgaatgctgatgaaagaaaaggaaagagctcatagcctcccatcttagagattccgagactatatagagacttgtaatatgacagatttgaaattctcagaatcctatttcacttggaacaacaagcaaaagcctgaggagagaatattttccaaaattgatcgagcaatggccaatccgtattggataaatgtctttccttgttttgaagctgtgttttcacctgagctaagtttcgatcatagccctatcttggtgtctatttatgaagataaaagctatgggaggaagccctttaggtactataacatgtggaaactggcacctgagtatgatgagttggtgaccaagtcttggaaagaggaaagcagggggtcaaaaatgctcagtattgttcaaaaattgagaaggttgaagatagtgctgaaacagcttaatcaagcaggtttttcagagatacacaagacagaaatcacaacaagagcagcattggttgaactacaagccaaactgaaccaggttccaaaaaaacacagagttgatggaataggagcatgagttaaggaattagtttgttgagattagcaaggcctttgctagcttcatgtctcaaaaagctaaagttagttgggcaaagtttggtgatgagaactctcacattttccatgcttctctaaaatcgagaagaattcaaaacaaaatcttctctattgaagatgagcatggaaattggtgtgattcaccagagaaggttcaacaagatttcctagaatattatcaaaagctactggggtctaacatacaagcaagaaggaaagtctttcaattagttgtggatcttggccctaaaataaaaaatagtcacaaggagattttgctggctgattacacaaggaaagaagtggaagaggttatgtttgcaattgataggaacaaagcacctgggcttgatggttatggaagtgcattctttgaagaaaatttgggatttagcgggaaaggacatttgtagaggctgttctatcttttttaaattctggaaagattttaaaagagattaacaccactacaatcacactgattgcaaagacagcttgccctaagagtgtagtggattttagacccatctcatgctgcaatgttgtaatgaccgctttagtaatttgaattagtaaagacaatta

SEQ ID NO: 309066 - DNA, 1035 bp, Cannabis indica
attaaaaaaaataaaattaacttataaagctacataagtgcattattgtgctgataaaagtcaaatattcatctatcaaaaatgacttttgttagcgcgttaatgaactcgtaaaagtaagatagttttcagtgtacatttttgctagcaaaagttagatttttttgccagcacggtaatgtgctagtaaaattctaacttttcctagtgcacatttgcgctagcaaaattctaatttttactagtgcatttacgcattaagaaaagttatttttactagagcttcttatttataccagaaaaagttctaataccaataacgatttgttaacttacgctggcaaaaataaattttattttgccagtaaaaaatacgctgcaaaaaatcacattttttataatgaaagtaaaataaaatgtatctaatattattactatgtacacattattagggtgtatcctataatttataaattattttactaattatttattttagttcacaaattttttttttttttaaaaaaatatttatgtggatgagaactcaccgaaacaaaaaatcaaaactcatattcctatttttttttctttcttttttttttaactaaaaaaatagtcttctaaaatttaattttattcatgatttttgtttgttaggtgtgtgcaataacttgtcacttgtgagaaatacattatacgtgaaaagaaaataatacaagaaaacacaatatatattggaactcattaatttttgggatcatacaattgagtggacggagatttgcgtatgtgcttgccctctccaccatataaatatataaataggtacagtattaataaatatttatgatggtattagaaaattttaagttttatatttaggatatgtttaaaagtgattgtgtaattattacgtagtgtaattactaaaataataattatgcagtctactaattatactatattttaaaaatacaagtatatgtttggtatatgaaagtgttgcttacatatgaattcttaatatcttgt

SEQ ID NO: 309067 - DNA, 710 bp, Cannabis indica
gtgagaatgaggggttaggtgagtttgaaaccgagaaaggaagagagagaggagagagagggaagttagagagatgtgggggaattgaaatgatgggggtatttttggaagaaaattgaaagataggtatattttttctatgtgttataattgggtataattaaacaccatgtctaattttttagcatggattatcaaatttccctttatttttaatggatattaaatacatgatgagaagtcttatgtattgggatgatttatgcgccatagtttgatgactttgatgccttcaaaaacttttgcatcaataattatggattgctgcgaattatttaggataattttgtggtatgatcgatattattgtaggaaatttttatttttaaaagtacttgtttataattaaaataaaagttaataaagttttctaaattttaatttgaattatatcaggtttgaagttaaatttgtattttccaaattaaatgacattagaaaaatttagaaaataactatttgttttggggagacggtatactccttaatgataattaagaaaattgtcttattttatgggttaatgtgtgtttacccagaaatttgacccgacgacatgggcaacacttttgatttgtggaaagaagaaaacaaccctagggccctgttggaaattattttaccaggaacttagatctactcacaagtat

SEQ ID NO: 309068 - DNA, 2544 bp, Cannabis indica
ttaatctgttggaaacgttaaaaaaaaaaaacaaaaaatgaacgaaatagaaaatttacagattaagttgatttctttcagacgttcgcggcagtgtttatctattgcatgataggacactatcaaaatattacaccaaaaaaaaaactactcagaatattattttaaaggtgtttgagtattagcctatactattcaaggtgatactcaagcatttgtgtaagactctgttgaacatattggaacagatcttgataatgttctgttacagacatgaatcaatggctagagatctgaatgaaatgagtcatattattataatcactgtaaggatttcataatgcctaatgtgtttatttatcttatttaaaaaatttatatttaggatgttagataataaaattagtaaatttaaatcttggtaaaataatttccaacagcaagtgcaggaggtggtccccaggggacaagttgtcggttgtcaggtggtctaggcttacaggtgtagtggttgcagtgtgtcctttgtcgggccatcagggcatgcagatggcatgccttcaatacttgttcctaggggtgctcaaaagtatttacaaaccgcttaaatcaaaccaaataaatcaacaaaagatacaagcaaaaataatctaatgaaaatttaaatcgctcaatgaatatgtagggtggattaaaaattattctaatctgctcaattaacccgaataaactaaattaaccaatttatatatctttcaataaaaaaatttataatatattatatgaattacatttattagttaaactattttgtatttaaaatttagaatttatattttatagtgcttaatttaaaatttagactttataatgaataatttttattgtatttagatattgaagttgaaatttaaaatgtatatcttattattacttttttctatgtgtttggtgaatgtttgcttaatatttttaatatttacttaattatatttgtcactatcacatttttaagcttgaaatataaataatattattttatttttataatctaattatttaaatattagaaataacaataattataaataaaaaaaaaaggtaaagattagtttggacgggctaactcgaccaaacagataaaattattgggcgggttaacctttttttaatttttaattggacgggttacaattaaatatatgtaatctgatatttatattgggttggtaaaaatatgttataacctgaccaaattgacgggcgtacttcatccatgtgattgcaggaagcatggtcgtacttcatccacgtgcatgtcttgtccttgtaattccacatccactaatttccttctcatcacttaagaaagttttactaagtgttgaatgcatcctcgagaagtgcattattaagacactcgcaagccatggctctttgtcgagatccatgcaagcaaagcaccattgatggtgctgagatgtttgccatgccaaaaattcttgcaagcatgcaaggttggtgttgtcgagatgcttgcaagcatgcaagcttggtgatgatgtcgagatgtttgcatgcatgcaagccttggtattgccgagatgcacacaagcatgaaagattggtgatgttgttgagatacttgcatgcatgcaagccttcgtgtttctgagatgcttgtaagcataaaagcttggtgatgccaagattcttgtatgtatgcaagctctagtgatgttgtcaagatgcttggaagcatgcaagcttggtgatgttgtcattcttatatgtatgaaagccttggtgatgttgccaaaacgcttgcaagcatgtaagccttggtgatgctgcaaagatgcttacatgcattcaagtttactgatgtcgttgagatgcttgcaagcatgcaagcttggtgatgttatcgagatgcttgcaagcatgcaagcttgatgatgttgagattcttgcaagcatgcaagtcttggtgtcgatgtcgagatgcttgtaatcttgccttgccaagatttttgcaagcttggcctgccgagatgcttctagtctaggttttttgggatgcttgcaagcttggcttcttgtcttgacgctggatttttcaagttgagggacttgaagtggggatggcttcgacctcattatcctaagtttaatgatgaaacttagttaaagatgcatttattttcttgactaattttggaacattacctcgctaatttctagggttgacaattgtgtagtagaaaatttaatatgcacaaaaaatatgtaaaaagaatgtcattttttattaaaattaagtactccaatatataatattatttttacaaatatatttcgatacttaatttttattaaaatattgatgctttgttgaaacaatattggttctacataattggagctaagcaccccaactcaatctagggctgcacatttagatggtttttgtaatacccagaattaagaaaaggattagaaaaaccctaattagataattatgagttaattgaggaattatat

SEQ ID NO: 309069 - DNA, 1271 bp, Cannabis indica
tttgtatggtctgacaagtgtgaaacaagtgttcaagataaagcatcgattgatttcggctctagtgttagctttgtcatcagatcaagagaaacttatggtgtactatgatccatccatacaagttctgggatgtattctagtgcaagctaatagggtcattgcttgtgattcttgtcagttgaaggagtatgagaagctttacccgacacatggtttagaacttgctactattgtattttccctgaagctctggcggcattacttgtacagagaaaagtgcaagatttatacagatcacaaaagtctcacaaaagtctcaagtacttcttcactcaaaaagattggaacatgagacaaaggcggtggtgggaattggtcaaggactatgattacaaaattttgtatcataccgagttcgtggttggaagattacataacctgacacttcaatcagatttgttaagaaaggatacagaataatgtagttagaagactttgagctagtcaagattcatgaggaagtattggcgggtcggcctaagaacttctcgataatatggaatgttactttataaggctcagttttgtgtttagagcagtgatgggctcagaaaaaaaatacttgatgaggcttatactacatcttattcattgtacccgagtactactaaaatatatcaagatctaaaaccctattaatggtggtgcagaatgaggaaggatgtagttaattacatgtccaagtgcttgacatgtcagcaaataaaataaaacattagaaactagcagggttactccaacctttaacacttcttgagtggaagtgggaatatattataatagactttgtggttgagttacctagaaccacatgaatgtatgattcaatatgggtcataatggagtgttttacaaagtcagcacactttttcggtaaagataacttacatagtggattagtaagcgcagctataagtaaaagagatagtttgtcttcatgaagctccaaaatccattttttcagacagagatttgaaattcacatcaatgatctgggaaagtcttcagagagctatgggtacaaagctaatgtttaatacaacttttcatccccaaactgatggacaatcctagaggatgatacagattttagaagatttgcaacgagcttgtgttatgcaatttgaggtttcatagaataaatatttgttggaaattattttaccaggatctagatttactatcaagtatgttggattaacaaccta

SEQ ID NO: 309070 - DNA, 892 bp, Cannabis indica
atcgggagcaccgtgctcagaccacatccacccccaatggactccaagtttgttccttccaagccaaaaaaattcgatccccctcttctccctctcccgatatcactttctatcttcgtttttctattgtgcaacgacggtcttacatcagaactgtatgttgttgttgactatatgtacgtgggaggagaagttgcgccctcatctccaccagaagctgcaccccaactatgcttcacttagagtactaactctctttctctctctctcgtttgacgaaaatcactaccatccaccacccaccactagtgacccgaccgccaccactcccctccgcctcagtgctctctctttctcacacattatatatatttatttatttatgtatatttatttacatatatatttatgtatttatttatttatatattatttcaaattatataattatttttatattttttgaatgaatttgtttatctaaatatttagaatttaaaaatatatatttataaattaatagaaaaattaatttataaataattttttttggttttattgtatattagtagaaatttaagtgaatatataaatatgtatattttattttttagaattaggtaaataaataatttgtttaatttgtttgtggaaagaataattagttttgtaagtctatttttttaggtttaggtaaaaaaattatgttatgtgattttgtttaagttaatgtattaatgttatatgtaaacaaagtttagtatatgtggtgtcatctatagtttttatatatattttttattatatgtatgtaatgtgtttgaaaagttctattattattacttattttaaattattaatgtttaatttttttaggagttaattgaatttt

SEQ ID NO: 309071 - DNA, 1636 bp, Cannabis indica
gaaatttggtcaatatatttaagttttggtgaattctcatcctttccttttgcaatttcaatatgctaagtgttgtttgttgctgttgagagaagaggaaatcattggttctacagacattcagagagaaccaaagaaataggaacccatttttcatgaaagcgatccaacccattatcagttggctctgtctgagagcaaaacctcattctttaactatgagctctctctgttgaattttatatgtatatatacatgagtaagttggataccaatatttattggtggatggtgatagaaattatgaataagggctttcactcgaagaaaagttgccactgttaagtaaggtaaatcgtccttgacaatataaattatatatcttgtaatcatatttcttttaaaaatatattacatttatttcttgggatgatttgcttgtaatacctctttctaagttcaattttttttcaagtgcatttggcattaaaagtaaatctttttacataccttaagcatgagaatatgtgtgataatatacattgatgtactttattatcttcaaagcatatagacttataaattttgacataatatttgtagagtcttaatctaattaagttttattttcttgatcacattgactaacttagtagattaaataagaatcttttaaggtatggttgatgtttcttttgaagctttcatgatatgtttatgtgtataatatatggtcgtggagttttatggaatatatattatatttacacttcattgcgtgatgaaatatttataattgtagttttagctctccaagtttgatttcttatacatctaaaagtgacttctcgttattgtcttatattttcatcagtgttatctcatgattcaacaaataagaaggtagtgacaactatcaggtatgtctaccattgctccagctatactactttgcaattgacatagtcatttgtttgaaaaaatcttgcttgtcgactgttatagtttttttaatattctgtttcatgataaaatctaagatgcatgttgaaggagatgttagaaagaaacaatcaattaaagtcatgacaaccacaaaaatattgataacacgtttgcataagttttatactcttactcttgatttttattgttgacagagctattggacatttaaaatttagtttatgagtatagctaaatagtgatggagagctagcttggactaaataatggagatgaagtagcaggtcataacaagctctattggaggggaagcataggttgttgtccaaatgtatagttattattttgtattataggactaggaatatgaagttcatcaccttaatatactatttttattgttcaatttatgtactgatgaaaatgttattgatatgataataagattatgtaaagatactatttgtatataagtattgtttcaaataataaaattactatttgtgtatatatagaaatattttaatttatgatatttttgctcttattatgtaaaaagaaataataaataaataaaaataaaaaataatactattttctattttctatttttgctctgattcgcaggacgacggtaccctagaaggatcagggggatccctgccatcac

SEQ ID NO: 309072 - DNA, 1475 bp, Cannabis indica
caaacacgaagaacccagcgcatagggtcttcggggacaattggaaatgaccatatcttatcgcagaaaaggttggcgacgcaacgtaccgactcgcaaaactcgatggtactgcgattcgaagagcctggaatggcgagagcttaaaattttattatcaatagtactcgcactgtatagtttgtactcgctatgtatttatacttagtcattttttcataaaaatcctaagtataaggggtatataccattatgtactattgatcatttaagagttatgaaattttttgaaattttccaagtgggccatttatttgtactattaagcatttatttgtttttttaaatgtctttttcttcttcttttttctttctggctgacttaactgaataatactaaaagtgttcacccaataaaagtgggctgagctaaataagatttgttaacctatgataaaattaaaaattgatatttttctaacaatataatttttttaaaaatcatgtttcccactgtaaaaaattaatatatgacaaaattaagaattatatttttctaacaaaatagttagagtaattcctagttacagtaaattaaaaattataattgaaaaattgatatttgtcaaaaaaaatctgtaacagtaaagagttttaaactaaaagcatttttgtgcaatgtattacaatgtgctaccgccacctctttctcaaacttcgactaactgctaatttcattctccaaacccattaattgatcacatatttttctaggtaaactaaaaaatatgggtgtaaagaaattactcaacactgatttagtagaaatgggatttaacgccggcgatggagtcatcaattggttccctaatcacatggccattagaaatcgactcaagcaagctgaccttgttgttgaggtccacgattctcgaatacccttgttctctgtaattaggatcttcaatctcacctctctgctaaatgatgtgtgatttctctcattaagagaaggcccttgctaatcccaatattatgctggtaatctttcattgaattttgtgtattatcttttattttttgttatttctgtttatttgaattcgtttatgtagaaatgggttcgccattttgaattgtttcaacaagattgtatatatacctatttgttatcccaaaattggcactctgacgtggcatcacgagaatggtgacacgtggactctacttagagcatctggtcggatcaacatgtcgagcaggatccctcgatggcatgtccatgatggaatactcaacgagccgtgcagaatgagcaacacttagcgaattcaaccaaacgcatcgtgagtcaccagctcaatccctataactcagggatcaccatgcgtggatgtggcttacacacgatcccattatcagtgtattcagcctcaatcccacgatcttagcattcagcattgatcacacgatct

SEQ ID NO: 309073 - DNA, 2387 bp, Cannabis indica
attaattatttttaacttgtctttcaaattatatattttcacaatttttctctcccaatctacattgttaccctctgtcgcaggtgattatcttgtttatgtcaccaccaaagatgaatcgagagatcgtcgtcaaccatggactgctgtctacaaaactaaccttaagacttccaaaactagtcgccttactctaaaaggttgcttcctcctctcaatttttattattaaattgccctttttttttagtgatatctaacttgaattgtgatagtaaatattacatatgttctttataaattttaagtgcattttcatattttggtaaagttttggaaaggtagatcaaagaactatgaatatatagaatgttatcttgaaaaatgtaatttgatgtggtatattcaggccggctggctaaggtcatttaaattttgggatcttactttcaaaaatatataaaaatatattgaaaaaaagagctgagatgtaaaatgactctaaatttagaaataagttagtaaatgttttctatttaaaaaaattaagaaaatagctaaatataataaattagctaataaaaattataaaaatacatttgtcacatattttttttaaaaaaatatatgtaataataaaattaagttatataaattttttagtattacatattattatattataacaaaaatgaataaatatattacatcattaaatatatacaacagtatttgatatatcgtattactaaaaattaatataccaatgtaataaaattatataccgcacaaagaaattataacaatattaaattcatgctcaaaatatatacatcatactaacagaattatatctaccattattaaaatatgcatacatacaaaaatgtttatatataatcatatatacagtcaaatagaaactaaatacaatcttaaataaatgctatactgtacacaataaaaactatatatcatacaataaaacatatatgcctacaataataaaatcaaataaagtcatataatattattaacaaaattgtatatccatattaacaaaattatatatgttgacctcggaaattttccaaccgacagcgaggtcgtattaatctgatgtttgtcacgtgttacacaattagaactagaaagtaaagaacgcaatgatttttatagaggttttgcccccttagttatcaggtaatgacctactcctcttttagttgtattgatacagagagataacactattcacatcactataggtgggatctgatatagctctcttaaagttacaaagtaggaattaaaaaaaggaaaattttaagggttgagagaagttatagtaggcgtgtgatagagagagagattgttatcagactttgagcttgacaacttaaatgagacttaattacttaaggttttcagggttgagttaaggctctttatataggagagtttaaatctaattaataaaataagtagatatttacatgttaaattggtaaaatacaaaaagactaaaatatcccttaaatataagtattttccatctactttattaggttgttaaggcctaattcgcagtttagcttacagtccacgtgtaaggcagtgcaccaaaatcctaccaggtctaatcctggctggctaggcacctgtagaagcaggctagtcgtcctgatgctatccagaagctggcttgccagcccccttgaggtggttggtttgtcactcatcatcccgtttgagtgcaggacccctattggtcgggatgctgacttgatctccttgttggtgagctgtactgccacatgacactaatattttccacgtaagcatgccacatcaggtgggaaaaaattgggataacatttaccccctaagtccctacgcggataaagacttactagctaagttagaactgatgtagactttactaaatagatgttgctacaatttagtcttccaaatacctgttcttgactgtctgatctcatttgttgcagtaacttgactgctttgcacttctacatgtttttttggttgagtactgtgtggcaagtgaaggagtagtcccacagaaagtatttatgtcttttggggggaaactctcgtcactttacacttttcattctctcactagaaatagaaacttgaagaagctcctccttctctgtagaagcgaaacccacaaagctttattctccttggatttttgtgttgtttgacaatctaagcttcccatcttctttatcaacagtttcttgttgtgggtaagctctgtattctcgctattcacttgatttagttgattttgtcatgaatgcatgagccttgttcttttctttgaatgtctttagattcccacgttagattataatc

SEQ ID NO: 309074 - DNA, 3866 bp, Cannabis indica
tcacactcttcttctctcccatccaaaaatacaaaactatcatccgcgaagaagagatgagacactttgaccccttctttgccaaatctaatgcctcggatttttcgagccctctcctctgcttggattagacatgaaagtccttctgaacaaataaggaataggtatggggataatgaatctccttgtcgcaaacctcgtgttggatgaaaattccctatcctttcccccatttactagaacctaaaaggaaacacttgtaacacatcgcattaccttttcaatccatccttccgcatatccaagacctttcatcatagtaacaaggaagctccattcaacccgatcataagcctttgacatgtctagttttaaggccattttcttgccattaccaaatcttctagttttcatgcaatgaaggctttcaaaaccaattatagcattatctttgattagtctctcccccacaaaagtgctttgttcttccgaaatagcttggtgaagactagctttcatccgccccgctagacatttagccacaatcttataaattacattgcataaactaatcggccgaaattcagacatttggttgggcttgtcgttctttggaattaagcagataagagtgtcattaatgtcatctacctgctgtccttcatttaaattccccaaacacaccttggacacctcctcccctatcattggccaatattccctataaaatagtccagacatgccatcatttcccggagcctttagaggatgaatagcacgcatagcctcataaatgtcttctgaagtaaatggttccaggagaagatcatttgttgaattagagatcttgttaggaataagccttcgaaactcgtccagctcctctcgggttgctgggttggcttggaaaagatgttggaaatacttgcaagctacttttcccaccttcttattaccactgacccaatttgcattactatcaagcagcccttctattgtatttttcctctttcgggtactcgcctttctatgaaagaatttagtgtttcggtccccctctttcaaccaaagagcgcgactccactgcttccaaaaagcctcttctttatctaataaaacattgtgtttccgctcgatgccctttaaatgactccaatcttttggatccgttttcctggatagtgtattaattttatcttcatactctttcagcttcatgttcagctccttcttcttcatcttattccaattttggagggcgtttccacacttggctagcttcatccttaactccctagttgtaccattaccactttcagccccccatgagtcatgaataatctccgcacaatcttcattgttagcccaagcactctcgaagtggaaccgagagtgccattaatttctaagagtttctcattgactacttttaagattttgcaagagaagagggcagtgatccgaattaatacggtctaggtgggtaactttagttgctggaaaaagatcaaaccactcttcattcccacaaactctatccaatatctcaaaaatgatgttgttttgtcttccattgcaccaagtatacttactaccttcgaaatcaacttctctgaggcaacaatcatctaaagctttgcggaaattgttcattaagtatcctagtttcggttggcctcccaatttctctttttttcgcaaaatttcattaaagtctcctccaatcacccatggacccgaatacatcttcccaactctattaagaagtctccaagaatcagttcttcgattagggtctggatctccatagaatcccgtaaaccgccaccctttgtcatcctcttccttaatgaaagaatcaatatggaaggatgagaaggactgaatggtgcaagtgacctccgtagaccaaaggagaatgaggccacaactcttaccgatggcttccaccacaaaacaaccaaaaaacctaacatcactcgcaactcttcagctttagactttcgtaatctagactccgaaatgaacaccaaatccggtttccaacaaacaacaagggatttaaggagcggatcgtccaagggttccccatcccttgaacgttccaaagtaaggttttcatttctgtaggcgaccctgcatagcagagttcacctcttcttcatttgaacctactaccgaatcccctttttgagaaactttatttggcatactctcgatcttgcccttcttattcttcgaatctttcttgacagccacctttcgcctttgttccttggaaattgttttttggctaggaccaaagacaaaggatggctctccttcctttctcattgattcctgagaataatcgattggaacttcaaacaaattccaagcccccggcatattcttgagagggttcactgttttttggagcttccccactccccactttccacaattcttcttttgcctctgtcgttctcatcttggtgtaccaaatttcccacatttcttttctcggtttcatcacggatccccttttcagttgtttcccgttccatctccaccctttaaattctttcttgatttttctccccttgtacctcattccgacccaccatctcctccccatcagtttctacaagtagtgcaaaggaattcgaagttctcagcccctgttgcgattacaattttccttatttttccgttgcctccaactgaatttccttccttgtattgtgtccctcctcatgaaacccatcccttattgcattgtccacttttagccatgtcccataagccttagcttgttttcctccctcccctgtaatttctttaaactccgaagagcattctttttggctatgcccaattctcccacatcggaagcacatgaacgagagctcctcatacttgcaggctatccacttcttggcacccccacaaggtagtaagtaaccaggccacaccggtttgtttatagatatccaaatttggaatctgtaaaaaccgttcatcaccattttcgctacatccgagttctgaaccgtgatgaccgtccctgccatagaagccaatctcaaggtattcttttcagttagataatcaattgggactcccaaaattcttccccaaataagaaaagctgtaagatcattcttccaagattcattagtattcaccattttcccccaaaatcaaaaccccattagataaataccatggcatctttgatagtatccttgactgatcttgttcagaagcaaaagagaacgttaagaacatacctgattcaaatttttcctgaatcttgatattccattccgcctcttttagcctccaaattctccccacaaccttcttcgaaaaaaccctgctatgatccacgtttgaacacagtcgccctcataaggtattcttggcaatagttgaggaaaaactctgatgcacctcccaatcatcttcatccgagacttgaagttgattggtctttgaaagtagttcgtccatagcgggggtgatcggtcaccaagccggaactccgatagcccttcgttgccgagggaagaaaaaaccagtcaagccctatcagagagagagccctcgaaaaccttttttgcttttttaaacaattgtctgttgcatatatatatttttatttatatatatatatgtacgcatatatataaaaattaaattgagagagtaattaattaaaataataatatatagtgtggtctatgggcagatcatatatgtctaatggtggcattccactggccttaaaccttaaaaatatatatatttaaaatggatcgggttatgtaacaccctaactaacataggcgtattacgtgctttttaaacatgctgtgcagctc

SEQ ID NO: 309075 - DNA, 2139 bp, Cannabis indica
atccttgtgaggcgattagacgcacaaggcggacaatacttgaggcccgttgggggtcaactgggtcggacttatgtgctaataatttgcaatcttcttaaaatatgggagcaagtgcagcattgcaccttgtttggtgtgaactcccaaccaagcacaataaccttctttagggtcagtagccaattggctggggagggaaggaagcattcaacactccccaaaagaccatccttgaaaagattattcaacttcttcatggtcgccatagatggtggagaaatccatttatctcatggcagacctctcattctcaaaggaatagcctcggtgtattcctcaacaacgtagtcctggctagcctccagaacatcgcttacctcaaatactggctctttttcatcattgtagccaccaaatggtagcatgggagctaccccttcttcctcatctccttcagcatcagaaggagtagcaggacggacctctcccaagtcttccacttcttggacttcgatgtccccaatagtatcctcctcttcagtagcaggatgggtctgttctgctttaggtagagtggcaacgcgaacaatatgtgggtcactcagtgaagattttcgtacaatctatttagtttgtgccatgatcttatgcttgggcagatcagaagtgtgcctggcaatggtcacaacaaaattggcaacaggtctgcctatagtggcagggtttggccggcccttgggcagggtgtcaaccacgtttggatggactttatacgtccagttagtaggaaggtaatgcctccaccctttcttgagttcctagatgaaacgatcgtatccttcaccttgaatttggtcgggataaaaatgatgttgcacctcgggctccggggaagatgtgttttcgctacttacttcccagtcttcaaagctagatttgaaagattgtcactagatgaagatgggctagcacgaagacaaagatgatccttgtatagaagttgaagcagaccctggtcgatatgatatttgcctccccaaaactcactagggttcatctacaaaaggtaggagacaagaaagtgagagttggtcagagcaacgaatgaaaaacaggttgaatatattgaccaggtttgattgaggaatcaaaagcaaaggttttacctagaaattgaattttcaatcccaaaagttcaaaacttcgaattggaatctaattttcactataatcctaatggacgagtgaaaatgggtattgtaaggttaaactttgaagcacattttgatgataagatgttatggttaaacataaataagatttttgaatcctaaacctaagtattctatggttaacctagaacggttcaagcacaagcgagattcatagtaagaaatccagaaattaagcatgcatttcactgcaaaaatttaaaagaaagaaatgaagaacttactcactggtttgaagctgcttattctgctcaaatgatgtcgtcaagagttttcttgtgtatccttcgaagaatttgagagaacactcgtctaaaaaaattttgctctgatttttcaagagttaaaatggctaaaaggatcaccaaaggttcctagtcccatttataaaattaatcatttcaaaattaaatttatcgaattccccccaaaagtgtacattatgtactcattacatggagagtaattgccaaacacgcataagcatcgaaccgtgatttgtggcagaactgtcaataagcattaaatgggcagaaattgaagagagccctagtcaaggtcacatcagtttttcatccaacacctaggactacgcatcacccatcgggagaagactccaagctgagtgaagtccacgtgcgaccaggaaggtcatgcacagacttgggggcaaatgttatcctatttttggcaccttgacgtggcaatagaactaaatgacatgtactattagagaaaatacatttagtaacactatttttaactaaaaaaaattgaaaagcaacactttcaaaattgttgcctcctaccgtgttgctaaaaggctaagtctttggcaacatttaaaaaagtgttgccatatgcttacttaaaaaaattatgatatcacaccttacaacaacac

SEQ ID NO: 309076 - DNA, 1103 bp, Cannabis indica
atatatatatttatagataaaatactcacataaaaaaatacacaaataaataatttaaaaaatttaaaacctagaggttaccttgactaaaagagagggaggtgtgcgattggaggcggcttgagcgaaggctcgccagagatggatggtgttaggcgctagaggatttttcaggagattagatttttcagttttgaaaatggggttattaggggttttggggggtttaaagggtagtggacgtaggtaggtggggcaactttcttcagtcttttgttggtgcaaatgtgcactgaaaaaggtaaatgaactcgtgaaataggttaattggaaaggcggttctatctatgacttttgtcggtgcaattcgtaaattgtgccagtcaagggtagtttcactgacgcaaaagtgcgctgacaaaacgttataacctgaataattaggggctttgttgcccctcttttgccggcttatttagccatgcactgataaaagtgaaaattcttgttgcgattacataattgtcaaatgtgatatcataggttacatattttatattaagatatgtaagttctcatgttacaattcttatgtatttattacattatatcttatataatataacctccaagcattttcatatatattattctcataataatatatttatcacaatttaatcaatttattataaataatataacaaaataaacaaggcacaaaaaccaaccttacattaaatgcataattaaataagtgcatatgtcttaagtcaaaaatcacattatgattttcacatagttgaatcatgttagatatttatagaaaattgctaaaaaaatatcactaatgctagacctttttcagtgtcatactattattggtgtcattaaatatcaagtctcatataatttaagaaaaatagctcttagaaaacgctaaccagggccggccagagggtggggcagccggggcctcggccccaggccccacaattttggaggccccgaaaaaattaaaattgatatatatatacatataaaaaaatatataatatataaatatttaacttattaaaatacatgaaaaatgtatagcacaa

SEQ ID NO: 309077 - DNA, 897 bp, Cannabis indica
ttctagtgtaactctatttaattgtaacctctcaattagaatataatttacttggtctcaagtgtattcttaaatagaggttctattgtatatatatcaaaacttatcttcatatatatattttttttttgtagataaccccttagcctaaccgcataaaagagtgaaccattataaaattcaagtattaattattttctaatatttgctctttacacttactattgtcgtttccgttattttcatagtcaacataaatatgttgaaaacacgaaagcaaattgcttcaaagctattttatatgcacatgacataaatagtttttaatgtttattttttggcaccataaatcacttataatttcttaaaaattagcgagagtagtactacaaattgttatataaaataattgaagttataatttcttcacgtccaaaaaaaaaataaacacattaaaagttatggcccgaccaattttttcatcatatatatatatatagattaattttgattggaaaatttgattttttatgtattttttaaggcataattagttaggagaacaaatagtatgggtaattgttaaaataggacccttttacataaatcccaatacccctctcaaaattttaaaccatttctctctcctcccctcaatctctctctgcctcttcgccacacccctatcgcagcaacctgaaactccatcggagcaaccctaccactccgacccacgccgcccgcccacacccgaccgcccccaccgtccacgcaggccgcccacacccgaccgccccaaccctcaattttttttttttcaattttttccttcaatttttgatgcttaaattcatgaaatagattaatatgttgcaattttgtgtgaaatctgctagt

SEQ ID NO: 309078 - DNA, 610 bp, Cannabis indica
ttttttaaacaaattgtaaaaatatatttcttattttatcgtaattcatggataatttttgcttataataagtgtccaaggttttattataactttatttgtaaatccattattaaaagaaaaaaaaaacaaatagaacaaaaatattatcactgatatgaatggtgctccctcaagtgaaaagcggcgcccatacttatttatttatttttatcataattcaaccattttatttgtttttatttttatcataattataatcacaaaactattttaaaaataaagaatgaaatggatcgaaaaagactagtaataaagggatagaactattaattttataaattataacaaataaacttctttagttattttttgaatgggttaaaattgttaaaaaaaaaaatagatatgcatttttttttgttagaggtcactagtatttagctaagaaaataatttgaccattagattttagtatttctcttctatttataatgaggtcatagttatttataatttactattaaaacggatgtactgataaacccctacttgtttcggtatctaaaaaaaatttagtctaattttttttatattcatgtatgttata

SEQ ID NO: 309079 - DNA, 1274 bp, Cannabis indica
ttttttaaaaataaagtattaagtttttatataattacttttataataataaattaattacattttcaagtcttgtgttgtacaaaaagttatatctatagaatattatctattctatttaaaacataaaatgctgagagcttttgtgataatttaatcttatttagaactttttttattgggaatctgtttgtttaagtaatcaatcatcatgtagaaaagaaggtgagaattgtaattgatcttaaagttagtacaaagaacttgtatttgggtttgatttcattggaggtgttatggtcttggattgttagagattagtgtagggaataatatgtctcattctccgattttatcttaaaagattaacctattgactattcctataaactcattttcatttgttgttttgccaatctaagatttgtttgtatactcaactcaactgtcctggctcggtggctgcctaaagtggagtcaggttatttttgtgtgtggaattagtaaactaactaaaaaaaaaaacacactagtgtttgaattaatcaatgatttgcaatgctaaatgatgggacagggcttatgtatttgtaagtgtggttcttattagtgttgtaagtttgtgcgtgttgtgttaatccaactcatattaatatgtacctttaaaaaaataggccgtattgtgtcgtaccatagaagatatgggtcataccaacatttttaaagggtaggtctagcacggcccgtaaatctaatatttttgtgctgtgccaacccgtatttcttaaataggtaagtctatttttcatatcccgatttaaattcatattttctttacaattataaaagtatatgtttactttataattttagttattaacattattaaaatttaaatatttattaataaatactcaaatttttatatcataccatataaataaattaatatataattttaatttttcatctcctcatagttttaattataaaattataatattcattattatatttaaattttattattattttaacttatttataattcataaattcatatattatttataattaataataaattataaggttttttaatatgttatactttgtttttcgtcttgttgcgtgtcgtaatttttgagttagtctattcgtgtttacatgtcgtgccttgtgtgcttctcgcgccgtgtcgtgctaaacgacatattcttcatgatatgtcatgctaatttgtagtatcgtgccgtgtcgtgctcaagcttgta

SEQ ID NO: 309080 - DNA, 1378 bp, Cannabis indica
aaagacgaagttctccttgacccatacagagtcgctgccgaggcgactaatagcctcatcgcggcgattgtagaaagttgaattccaggctttttgtagccatctcgctgcggtcataagtcatgctcgttgtggccatgaatattggtctccaccaaaatgttcctacttcgatatctctaagtaaaatatacataactttcacatacaaactccaaatgagctgatttaagatgcgttggaaagctgaaaaagagatctaaaacttttatattttgacattttccaaaatcagaacaaaacatagttgaattcacgcgtgaaattttagctttacttttttacaatttttttttttacaatttttttatttattttatagatcactgttttccaaaatttgaccaatttatacattccaagtgtcaaaacctgaaaccaaacaaaataagcgtaattatattccaaaaataataacaaaaaagaaaaataactataaaaagtaattgaaacttaggctaaaatagcataacaaaggcaaccaaagcaacaatttccttgcgaacagttgaggggtcacgatcaccctctcgattgctatagggttcaattatttggctcccagctatgagcccaacgctactggggttctccgtcataaccaaatcttctaccttccagacgtcttcagggatcttcttgtattgcatttcctttaatgcaaagatttgggaaagtttttgctcggtgttgactgcaaaactgaggttgtctcaattagaaaaatagagtcaacacacaagaaaatgaagaaagagatgtaaagtttggaattcttactaggagtggagaagtccagagataacattggaaccctcttcaacgggaattaaaaggtaaaaaactagtagtcccagaagtcaaagacatacttggtgaagctagttgggcaagttgacctggtggaacatttttccaacttataaaatccaattttggttttatttttccttatcggctgtgactgactacatagaaataaataatttcttctgggcttagaatctctagcttctagagcttacacaaacgtaccatccgaccagaagtttgtacgattgagggataagtttgaaagttgcaatccttatatgcgcataaaaattggcaaagtaactttgcaggagtaggtgggttctgtaaataatatgtgcccagtgttgagaatattttactaggatttaaatttactaacaagtttgttgattaacatcctaaatatgagttctctaaaataatgaaataaacacataagggtttaagaaaaccttacattgattgcagcgaaatattatgactccttccgttcaagatctct

SEQ ID NO: 309081 - DNA, 1269 bp, Cannabis indica
aagataaattaaatgaagctcaatctcataaattgcaatttatttgtaatagaaaataagatattattaataataaaaaaaatgtattgcaacattatgagaaaaacagggataaaaatcccaaactaaaaattcgaagttgtcgagttaacttgctttttcccaattgaagttgtttggctatgatcaccacgaggtctgaatcgtcaagttggctcttctctccaacattatcaccagcggctttgtcctgagggtcgtcttcaagcaaatctagtggtgtgtcctgagtgttaccttcagcgtcatcagaactactttctctagattttgcatcttaaattatggaatcgtctcgattctgatcttcatcctggtgacctttttgtggaccagttgcctcatgtggatcattggaggctattgctttggtgccacgactagtaaaatgaagacctgacttttgttcgggtgaggaccattattacttggacgtaatctataaatggtctcactgcttcctttagctctcaatgaaagcaccaaaatatttatcgagatttttgaaaacttgttataaatgataagaactgaagaaacaaaaagagaaaaaataaaaagtgacaaacagttgtttacgtggttggggtgttaattaaccttagtccatgagtcagtattattcagtagttctttagcttgaaaagcctttaggaatacaatgaatatatgttctcaagtttacttgagcaagttttgcaagagaattcaacccttaatacataggattcgatagttatttttagtagtttaatacatttagtttccctttccatctattggggagcttacagtgaataacatacttgggctacttcgttaagtctagcccacgaaggagaggatttgctgactaggcagatcatatttggttggatttggtcaacaccgtgtactttaaatgtgggaaattaactgtgagttaatttcttaatgtctgttttaggaagtttacccatttagcacgatatgttcttctgtcgagatcttatagctattgtttccttatttgtgcgcaggaataaaatggaaaacctaatcaatcttttaggaacacgttgtttcaccctttcgacctcacggtagcgtacttgcttccgagaatgagttattaatggcgggaggctctatgtgttggaaattattttaccaggatcttagatttactcacaagtatgtttattaacaccgtaaatatgaactttctaa

SEQ ID NO: 309082 - DNA, 597 bp, Cannabis indica
aaaattatgatttagactaataaaaaattgacatatggcattttattagtatttaatatatctgttaaaaacaaaaaaaaaactaaccgacttacaaaaattacaatgattactaatgaacaagtttatttataaggaaagagaaaggaaggttaacacccaacaaaaataataaagaaacaaaaaattagacctaaaaaaaaaaaaacttttccattttcaattcaaaaataatacctctatgattgaaaatgtagataagtttaacaaaattttggcagatttacaaagtttagatattgaaattatgaatagttttattgttgctaaattcattactcgagagatgtgaacatttaactataactctgttatatgacaaaaatgagattaaatttataaatgtttgtaatggtttgataaataatgagtaccagaagagaagaaagatcaacatgatcacagaaactctacgcagaagcactagcactgactacaaacaaaggcaagtggatcaaataagaagaggcaatcttgatcaaatactaaacgagtcgttaagaggaaatcttaacaaaagccaaggaaacaaacaag

SEQ ID NO: 309083 - DNA, 2712 bp, Cannabis indica
gggatttgaaaattcttaaattattgctaatattattactaaaattttttgctttaaattagattttattttgtttgttgcattgtggttcagtttatgcgaacaaatcgaagtgccacaccactcacaccactaaatcgtgagattgaaagaactctaaagcagttgaaagcaaagaaaaatttagattttaccacgacagccaataacaacaatggccctaataacaaccaaccaacacctgctgcagctgatgcataaccacgagttgttcgtgattattgcttacctgcggtgaatgaaaattttactggtttctaatccagtcattgctgctaataattttgaattgaaagctgctttaatcaatatggtgcaacaaaatcagtttggtgggttggctactaaagatcccaatatccatctagccatatttctagaggtatttgctactgtgaagatgaatggtgttactaatgacatgataagactacgactctttcctttctctttaagggataaagcaagaagttggttacaatctctgaaactaggttctataactacatgggatgaaatggctagaaagttcatggtgaaattctttcctccatcaaagtctgcacagttaaggagtgagattgggcaattcagacagtttgatccaaagcaactttatgaagcatgggagcgattcaaagatttattacgtccttgtccacaacatggctatgagagctggattcaagtttcaattttctacaatgggtcgaatggtcaacctaggtctattattgatgctgctgctggaggagcattattgtctaaacctgcaactgaagccattaatttactggaggagatggccactaatagctataatcggccaaatgaaagaaatactccaagaaaggtagctgggttacatgaagtagatcctatgacaaatatagcatctcaaatttttactttatctaatcaagtggctgccttagttgcttagaagaatacatcaactgtagaaaatgttgctgctacatccacatcacaagtgcctgagatgagtatcaaacaagcacaatgtatggccaatagactttacaataacaactaccgaggaaatccaatgcctaactactaccattcggggttgagaaaccatgagaatctttttatggtaacactaaaaatgtcttgcaaccaccttctgggtttaatgaacaacaataagaagagaagaagtcattagaagacattctgggtactttcatgatagacaccaacaagagatttaacaagaatgaaacaaggttggataacatggagactcacttgtttaatattactgtttccatgaagagcatataggtggaagtgggacaactggccaatgttgtgagtgctttgcagaaaaactgtagtttccctagtgatacagttgtcaatccgaaagacaatgtaatgccatctcactgaggagtggtaaagtacttgatgggggtgtagaagataagtcaattggtcttgaggttgaagacatagtagaagccaaacaagagactcatgaagagaagcctactgacaagtctatgaagaaggaagatcttccaatgtataaaccgccaattccttatcctcaaagatttatgaagaaaaaacttgatgaggacttcgctgagttcttggaaattttcaaaaaaaatcaacatcaacattcctttcgttgatgaattagagcagatgcccaattatgttaagtttatgaaggaggtgttgacaaagaagaagaaatttagggattattcgtgagcttaactgaggaatgtagtgccataattaagaagaagctacctcaaaagcttaaagatctaggtagtttttcaattccttatgagattggtgctttgagatttgaaaattctttatgtgatcttggggctagtataaatttaataccgcttttggtaattaaaaaattttgggtaatggtgaagtgaagcccacaacaatttcgttacaattggaggatcactcattcacttatccaaggggaataatagaagatgtgctaattaaagtgggtgagttagtatttccaactgattttgtggtactagacatggaagaggacaaggaattgccattgattcttgacgtcctttcttaacaactggtggtgcacatagatgatcgaagaggtcatctaaccgtgagtgctaatgatgaagaaatcaagttcaacatttataattcttataatcaagcaaatactgagaatacatgcaatatggttgagtcttgtaattctaataaagtcaatcgagagacttatcataaagaaaagataaagaaacctccagataaaaagaaaccaaaggaggagcttttaatagcgcaagaagtgttggtgattcattcaaaatttatatccttgacaattaacgttattttgaggtggaaaaatcctattaaagctaaagagttacttccttgtggccttgtaatacttaaacatgataaaggtgggattctaaaggttcacaagcgtaaactgaagggatgcaccgatgatagtggagtgttgactgaacatctccttagtgaagaaacttaaagcaacaacaacgtctagctaaagacaataacaaagcactttatgggaggcaacccatattatttttttttcttttcttttgtttttttagtttttag

SEQ ID NO: 309084 - DNA, 4174 bp, Cannabis indica
cataaaacccaacactttcaacatctacttacggtgtcttggagctcggagcaatgcttgtaggaagaggaacttctaccttgattgtttggcagataatttttggccagatgcatcaccagtcctatttctgagtgcgcatttcatcttatttgacatggctgtaagaagaaaacacctcttaaatatttaaacaagtaagaataaataaagataagtacaataatagctaccaatgactttagggggagcacccttacaaataagaaaaggaagggcatccttgttagaagaatccctgcattttccactaatacgaccttcatcttccttattatagtggcggtagaacggccagctacctcagggtcatatctaatcttgataggcgagtgagtcggtacttgatgcccctagggagttttcttatttttttggagcctcttgctcagttataatctcctcaactacgtatttggattgttgaacctccttggataggtaaatccaatacttaagaaaattggctatgggagaaaattgattaccaagagcgtccactagatctttccatgagtcgattaatttagggagagcttaaggtgccatcattgagctagccatctcattgtagcaaggaatattctacacctgacgtcgtctctcacaccttgaagatcgatctacacttcgaagtagtggatgtgagatagtggatcttccttcccggtgtattgatgccaggaaggattcttaaactttggaggaatgggaagggctttgattttcttagagagtggtgagcataattctcaattgagcttaaatttagaaagcttaggtgtcgtgatcccctttactaagttagctaaggtatcaaactctatctgattgaccccgtgaatggtggtctacatcctaaatggagcttctgtcacctggatagggtcttctctagatatcccatgttcatcgttcttcttttgttcaagaggtcatgcaggtctctttgccttcaaggtcgatcatgtactctggttgacccgggtcttgtaattttctcctaaccacaaggttgtgaaggcaactctagtgaggcctccagaatgaactcaagatcatctccagatgacccactgtgagagtgttcattctctcaaagtaatcttcagtaatatcacaggtacaaagataattgaactggtcactcaggttaaattcctctccaggtactcaagggaaatactcgtattattggccatcggggccacaagcaaagtaatagcacaactcccctcttcaatttcaaaagtacttctaagtatgaaggctcattggtccttactcgccagatttcgtagcctcttattttgaagtagcatctcctactacttctttcaggttaagtagtaggtccctttcccattccagggtctcgagtcctggtctcttgagaacgttaaggaggacttggtggaagagtcttgttggttctcttgttgtttcaaggtctttcaacatcaggtggaggacccattgattgaccccgttgagcttgagtccttttcagctcttgatcgaagatactttctctttgggagctctccatgcttggtgtttgcatagtgcatgctctgttaccaggtataatgtttatattccaagcattcatggttttgccttggacactagttcccatgttaccagctggtcaacaatgtgtctctctcaccaactccaaaatacccctacaagaagcagttccgtgattagagcaataagcctctctaatctgttgagacgggttcgctctctgtttttcttggataatgcgttggctttcaatgttcttctaattttccatcaactagtgttaataccgttcgtgttgcttatcgagagagttgcgcaactattgttgcaagtcaaccacagttttgttgagctgagcaacctgaggattgacctcctcagggtcttctatctccacaggtggctcctcagatgggatctggtcattggtgccagtcccaggagctgctgctagtggccttggaggacgagttgaggagctggttttgaggcctgctcctgatgccaagggcacatgagtagtcccagtagtatctccatcaattggcgtgcccccagttgattggccaggtcctggagtctgtctatcaacacttatagaatatgtttgtaatgactccataattaaattatggattagtagggaaactaacattaattatctttattttataactatatatgaataattgtgttgtgggcccaattttttgaaatgggtactagagatataatttctcaattccagagatttattaaactctaagtgtattatttatactatatgtcaaaaaatataatttttgctcagtgatgatgaaaaattcaatgggtggtcattagagtcacatgggtgagtttagaaccttttatctagtgggagaaacataagcaatgtttataatatcgtaattaggcggggttatggttttggaccattttacccctatacctatatgctgcttaagcttgaagtaaaggacaaaagggtctttttgccaaggacttagtgataatttttaaataattctattttatccttaatattattttcttggctgagttaagaaagtaattaatgaaattagttttttggttagataataccaattagatttctctctcctcactaaactctctttctctctctctcagctccttcaaaccccaaaacaaaaacaaggattttaatgtcaatggaagccttcctcagcaagtttaaaaggggaaattgtaagcttaacctacggtatgattctaacctttgttttctttgaatttagtaagtttttcttaggttctaggatgaaatttttcctagaatggttctgttcgaactagtagcttttgggtttgaagtttgggtaaacttgtggttaattatatcttgtttgaagttattttaaaccctgattcttgagttgagcaactttgagatcaagaactcaaacttggctcaacaatggaagattttatttttatgtatgtatgctattgttattgcttgaattttactgttgggtgtctttgcaggtattctagaaagttttgttgagtttaggattgatttgagtgagatttggggttttttgggttctctacagagaaatggttaatcggttctatagaatcgattaaacgtttctccaagtaggaccataaaaactagttatccattcgggattccagtttacagatttgggaagtttctagagccttagttttgatgttttctcaatatttagggtattgccacgctatttattgataaggaaacttctagttttgagtttaggtccccaaaaagggttttggcaagttgtttacccatttatgtgattgtgacataggtcctccattgaacgcgtgatttcccattcacgtcgaccgacacacttgaatttggaaacgaggtaagactagcatagaatatctatgtatatgtgcacgtgtattttatgtatgttgttatgtgattcatatactaccaacactagtatagtagttgtactgagtgcatttgtagagtatatgacttttaaagggtatgattcggtgttaccaacactagtaaggttaagtacatagtgcatgtggtacaacactcagtagtactcgaagtacggttcagccctaccaacactagtatattagcagtacttagtgcatgtggtatagaggttggacttctgttaagaacattcttgatcgtctatttagccttatggataggtgtatgggcgcctaaatacaagtcactaatatatatattatgttatatacttttcttaatgactcttttgactcacatatattattttcatgtgtaggtaaaggaaaggctaaagctgaacattagtgtgtccagagctcagggacgattctacatgtcaagatggtgcaacctggagagttcagtctcgggacgacttgggcttcattttatagttgctatgtgacatgtttgtaaattttattttgaaaattaatataagatttaaaagcgggatcttagctttttgttgttggaaattattttacccggatctagatttactaacaagtatgttggattaacaac

SEQ ID NO: 309085 - DNA, 1684 bp, Cannabis indica
aataccatttatctttatagcaaaagtctaaaaaaagatttcgccaatgacctatttcaactcagggccgggcctgaatagaagcaggcgcaaccgccacgtcttcggtgtatcaaaactagtccatcaataagagggatgattgggaagacaacctgaatttttatttgcattggtttattgccattgcagccaccatcgtcggagaaaaagccactgctgcggtcattggagaagaaagagatatcttgaatgtgaagtttgacttgatttggttcattaccactgtggctgccatcatcggagaagacaaagtggtcaatggagaagacggtatcttggaagtcaagtgcttctcgagcaaattaagattggagttccgtataaatgtaaaaaaacatagtcaaaatcaaaaatctccgtgtgaggtgtgaccctataattgtgtaattttttcttgacacttagtaatacatgtaaaatttccaaaaataaaaggagcatggtatttggcgttccacatttattgactgtaatggccgtgtatgaattatgatgaaagctatactgatttaataagtaataaatattaggctaattatgatttttgccccttgaattttgacatgtatcaaatcatgctaagatcgttaaaaatgccccctaaactattgagtttgttggatttaaggacttttttccaattttagaaaaaaatctaacatggacgaaagtttagagagcataattaaatacgtgtcaaagttcgaggggcatgatttggtagatatcaaagtctggggagcatggtttaatacataaacaatcattgaaatagtaaaattgaatgaaattagacaaaagtccttaaatccaacaatcccaatagttcaggggtatttttaacaaccttcaaagttcagggagcataatttggtacatgtcaaagttcagggacaaatatcctaattagcctaaatattaaaaacagctaactcgcaagtgttgtaaatttgtgcgtgttgattcaactcatattttttgtgtttttttaaatatgagtcgtactgtgtcatgttcaaaaaaaatatgggtcgtgccatgttaatattttcaaatggttggcccaacacgacccattgacctggtattttcgtgtcagtccatttttcttaaataggttagtccgttttgatatccgggcttgaattcttactttagctttctatatatatatataaatatatatatatatattacaattaatgagttaattactaaattatatgtatattttatagtttcaattatatttatgtaatttttcaataatattttagagacaaatataaaaaaataattaaaattattaaaatttaaatatttattttataaatacttaaatttttatatcatactctataaaagtataacttagttttacatttttaatggttttagttataaaattataataattagttttatgtttaaattttattattaatttaatttatttataattgataaatatatatattattataattattaattatagagttttttaatgtttcgtactctactttttggactagtcatgtgtcgtgctttttggattagtctaggaaaatttacatggtatactaactttgtcatttttttacaaaaatactgctaggcg

SEQ ID NO: 309086 - DNA, 616 bp, Cannabis indica
gagtggaatgaacttctaaggctctttggattgctttatcccttaggtttttgcttttgataattgttttggcatcactaaggaatgtagagaggataacagataggttggccatatattatttattttttgagaagatatattattttgaagaatatgggaagaatggaaaaaaaattaaaaattagtataatttaaagatagggcttttttcatgtacatactaaaatgacaaaaatattacacaaatacattggacagaccctataaacatttatacaacttaggaacaaaaatttacaaaaatacctcttaatctatccattcagcctcactaaccaccttcttcaacaacgacatcttccagcaaccaacccaaaaatctaacacagccaaaacgaaacccaaaagtctgacgactttacttgagaagatgaccgaaatcaatcaaaacaggggttgttttgaattcataaaaacaagttcaaaaaaattattacaaactaaaatcaaatagaaattcagtttaattcgcataaagctaatgtcttgactttaatttttagatctatgaaatgcaaattcaaaaagttgaactggagttctcaaataatcc

SEQ ID NO: 309087 - DNA, 728 bp, Cannabis indica
ttttgtttttttttatttttttactaacatttttgtttataataacatatttgtcgaatcaactgtccaatttatgctacaatcaccattaatgaaatttattttttgggcattaaatatatgttatcaaccatacttcgtttgtattatctacttgatgtataagtataaataggacaatctcctttttctaattagtttactttacaaataaaataatatcatataccactactaccaaattgataacttggagaaaaattactataaaatagcataaatattgtttaaggttgtcattaatacataaatataaaatatttaggtaacatttagccaaagctacctaccgtggtggctcttttgctcttgaagttattgaagtaatggacatcaagaaagctttaagctaagtcaaaattagaaatggttggcagcaagttgagttagttactgacagtttgctctcagttcaagctattcacaatcattctcatttaagttctgttattggtattattgttcaggaatattatcaatttttattgctttctttgtctcgtgttaaaattcgttttgtaaaacggtcagcaaaccaactaacacataaccctgctaggctagctcgagtctattctgattgtagcatttatgagtctgacactttgactactatgttagttatctttatatttgcaatgctaaatttaataaaattgctatttctt

SEQ ID NO: 309088 - DNA, 2021 bp, Cannabis indica
tttttttttttttaataaaaacaacactttattaagaaatatcatccaaaactaaggatgaaacataataaactgtattcaaagagtattcaaacaaaaactacaatttaatagaaaattggattattcctaaatatttgaagtttaagtccaaaatagaaaacaaataatttgaaatttattcattattggtatttctaaatatttaagtccaagagtactgctttttctttttgtatacttcttttcttttttgttttttcttttctttaattacccatttagtgttagggtttgggaatgccttatttagaggaaagaatatgatctcatgctttggttttttttttcttttgttcttttaaaaaaaaaaaatttgaaagtagaaaaaatgagtactttgaggttcatgaagtgtgttactgttggcgatggagctgtaggaaaaacttgtcttcttatctcctacacaacccactacaagaaatgtcactttttccagcacatttttgtgctggcaaaagttagtattgtgcttgtaaaatagaatttacttgtgttgtgttggcaaaaaggggttggcaaattaatattggtattagaattttggccagcataaaatgaaaagagctggcaaaaatgacttttccttatgtgctggtaaaagttagattttagccactgcaaatgtatgctggtaaaactttgacatttttgccgatgcagtttgcaaaatgggcagtagcgaactgtgctggtaaaagtgatatttcttgtagtgaccacagccaaaacgcctgctatcaatgaacacagctccgtcaatattaactttgatctgtggataaatcggttttgtccaatgcttaatctcaacctgccgagaagcaaggttggtaaatggttaaatcttttgagcattactccattcctcaaagcttagcttagctaacagacttacatcatcaacatttggttgtttagcattccaaaccagttggtttcggtgatgccatatcgaccaacacatcatagcagcttcaatagtttcacctgacgtccactaccttaacccttcatcaaaccactggagaacatcatagcagcagcaccaactgctgcaagaagtgcccggatgcatccagataagtcaccaggactggatggtatgaacccaactttctttcaaaagtattgggatattgtgggagttgacatggttgagacagttagacaattctaccatatggactctatgctaatttgatccttattcctaaaaagaagtgccctgagaatatgagcgagttgcggccgatctctttgtgcaatgtgattgcctaaatcatatctaaagttgtgacaaagagattaaaaatgtctattgggtgatgttatttcgagtaatcagagtgttttcgttcttggccgtcttaaaactgataacttaatggtctcgtatgaagtcctccattatttgaaaagaaagcaaaagggtcaagatggctatatggctttgaaactggatttgagtaaagcctataatagggtagaatggtcctacctgtgtgcaatgttaagccggttaagtttcgatgataagtttgtccgtattatcatgtacacaaacaaactgattctgaggtcccctctccggctcaactcaatctatataattcacatgattcattatttggttacaccaatatgtgtatatagatttatgaggttatgaatatgaatgttaacttaaaaatatatacaactaaatgcgcatgaatattgttattaggtatcttagggccagtttggcatagctgtgctgtaggaaaaagcagagttagctgtgctgtgagaaaaagcagctgtagaaaaactgtggaaaaaagttgagctgagtgtttggtaaattataaattttaaagtaatgtgagttgttaagatctattataatgataatgataatgttataatctagtttattataatcacaaatatgtaagaacttattttatataata

SEQ ID NO: 309089 - DNA, 1439 bp, Cannabis indica
ttataaaaccggttctaattttattatagtttgagttattttgttttatttatttttattctttatgttacagaaccagttatatttcaattataatcgatttgagttattttgtgttatttattttcattcattatgttatagaaccggttataatttaattataattagtttaagttattttagtttatttgtttttattttttatgttacagaactggttatatttcaattattactagtttaagttattttgtgttatttattttcattcattatgttatagaactggttctatttttgtttatctttgagacatctacttttaatgacttttttagtaactttttccagggacggtgacttttccggtgattttttcgacaccgaagacttttccaacaccagtgactttttcgacaaaacttattattatttacaaatatgggattttcatctttttttacaaacatatggcataaaaaccccatataaatattagaaaaaaaaacaaaaaaaaccataaccccttagcattatgttgacctcgcttttagccaacgacaatgggtcttatttagtaagcgataggtgatttatagcaatcgatatataataaagcgatgtaaagacacaagaattttatagaagttcagacccgagcagctcgataatagcctaatcctcgttatttgtgttgactcaagaacaaggagaaaggttcattttcttatagctcttacaacagtatatctgtcttcctaacaacatattccaacaatttattatcccaccttcctaacaactagtttggtctattaaagaaaaattcttattcatatgttatatatctttcttcttctttaaccctagagtattcgtctcctctaagttgtatatgtttggtaattctagttctgcaagccatgacgagcaggttcgtagattggtggatcattatctagctaggcaaaggagcgatacgctatctaactttgattggatgcacaacttatgtgctaatgaagggcaaaacatcccccttcgtgttcttgttgatgttaaatgtcaagtcagacaattgagagcgaaacatagttaagaatattgttgctttcagcaaagagagaaaagggaatgtatggaatggtttgaacgtgaaagggtggaaaatgagaggaggttcacacgccttcaaaggaatggtgatctcttttttccacccccaaagtttcccgaagggtgccgttgttgcaaaataaatgtggttaaaggcgaaccggtcagacttgggtggttgtgcatgtatttgcatgaatcatcgagacttttaaatttaacgttgaggggttacttttaaagttcatgattgttagtgttgacttcgcttttagccaacgcaatgagtatttttgctaagcgatgaacgatatgtcgta

SEQ ID NO: 309090 - DNA, 4180 bp, Cannabis indica
ttacaaagaattacatacaactttagagaaatggtagactcaaattccctcagcctattggtaataatgacacaaatggtccgcattccaaacacgagggatctctgacccatccattctcttgagttgaaatgtttcgtttcccactttgtgttgtatttcatagggtctttcccagttaggtcctaagacctccactcctaattcttgcaaagctggaaagactcgccttaaggcgagatctccaacgtcaaatgtacaactcttgatttttgaattaaagtgcctgacaatctttccttggtacatcttgagttgaacttgtgactgctctcaaagttcttgtattaagtctgatgattcctggagaaaagactggttccatgtagggtcgtaagtgtctcgtctatgagagggaactgtggttctattgggatgaccgattcacatccataggtcttctaatacgacatgtgtcccattgaggttctctccattgttctgtatgccacgaggactcgtggaagttcctccaaccaatgggctttacaagcttggagttttttttaacattgtcttcaagatcttattcacacatttgacttgtccatttccttattgtctagccatagtggagaagctcttgagaggatcttgtgtggaagttcaaagcagcacactatattcttaataacaaagtcgaaggccttcttggaggtgattgtattcatgggctccgcttctacccatttcgtgaagtactcaacagtgactatggtgtacttgactcctcctattacagtgaggagggatcctactaaatcaatcccccaaacagtgaagggccatagactgctcatgagagtgatttttgttggtgctgctcattgaacctaggcctatctttgagagtgtttgattttttggagggactctatacaatccttcttcattgtggaactaaagtaaccctgacgaaggatctttttggataggcttggtctggaagtatggtctccatagaagccttcgtgaacctcatgtatgatagcacttatctcggacccagctacgcacctcaggtatggcacagataacccccaacggtaaagcttcccatctaatatcacatattaggaggcctggtactagatcttctaggaagcagctttgtccacgggaagttcctctaaatttaggaactggtagatggacaatatcttggagttagaatgatcgttgatggtatttaccccctgtgtatcaatacttgaactttttagtgggccacgggcatcactccatattgaatgatctttgggtctgtggcaagttttgctagcttatccgcgaatgagctttggtcctagaggacctggtgaatgttgtagttcttaaacccttatagaagctcttgggacatcattaaataagcatccattctttcacctttgctctgatattcactagatatttgatttaccactagttagaagtcattatgtacttcaatatgttgggcttcaacttccttagcatgttgtagtcccgctagcatggcttcattttcaactttgttgttgtaggtagggaatttaaaatggagagcactttggagctgatgcccttatggatagatcaatatgattcctactcttgctcccttttcattcgattctccgtcaatgtagactttctaggtaggtagctctaggactggcccatctaggaggtcactcaattcgaaacactccaccacgaagtcagctagggcttgacctttgatggatacccgtggctgatattggatgtcaaattggctaagttccattgcctatttcaacggctcgttggatgcttcttctttctgaagcacttggcagaagggatgattcattagtaccttaatgtcataggcctaaaagtagggtctgagctttctagagaagactagtaaggaaaaggtcagcttttcaatcaaggggtacctcaattctatacccagtaatcttttgctaatgtagtaaatcggtagttggacccttccttaatcttgcactaaggctacacttatggcgtgataagacacttccaaataagggtacaaatcttcaccttcaactagctttgataagatagcaactttggtcaaatgttcctttagtttctagaaggcctctttgcatttctcagtccattaaaacttcttgtttcctcgcaacacgttgaagaacgagatgcaattatctatggactttgagatgaaactactgagggctgtaatccttccaataacaatttgcatgtccatgtgcctttttggggatggcatgtaaataaaggctttaatcttctttgggtttgctacaattccctgagagctgatgatgaaacctaggaacatcctaaaggagacaccaaatgtacatttattgggactgagcttcatctcgtacctttggagaaccaagaaggcttcctcaaggtctacattgtgatctttagatgtcttagacttcatcagcgtgtcatcgacatagacctccatatttattcccaactaatttttgaacatcttgttaaccaaccactgatatgttgctctaacattactttgtagaaataaacacctttatttatttggaagctggtgtgttcttcactagctatatgcattttaatctgattgtatccggagtaagcatccatgaagctgagcaactggtacccagaggtggcgtccaccatctaatctatctgcaaaagagggaagcaaactttagtataggccttgttgaggtttgtgaagtcaatgcacatcctccatatgggatacaaagcttcctagaggatctcgttcgtgatcagcttatccacttctgctttcatcgcttttgcccaactgggtttaagggtctctacttctggtgaacttgtgttgcatcttcattgatgttcaaagcatggtagatgatataacaattgatcctattcatatcagaatggcttcatgctagcacatcctattccttttgatagtacttataatattttcttttgccattaaaggtaggtttcttcccactttgatggttttggtggggtctacattacaaattttgacctcctccacatcctcaattagttcgaccattcttttaaaccccacacgggggtctagctcatcttcaaagtcctgccaaatgacttcaacttctacttgaatctctatttcaggagcaataggtatctcttcccggaccatgaacacgcagagacattgtaacaacttcttgcactcttctggtcacccctaactactcctacacatccattatcatagggaaacttcatacatagatgccttgtggaagttactgctcaaaaatcaattaagactagatgtcctagtatttcgttgtatgtcatggggaaatctaccaccttaaaagtataatgcttgaaagcacaaacattattttctcctttgagggtgatagggagttagatcttccccattggcatcagagcatcctcattaaagccttatagctggatgggataaggtggcaagtctgccttatgagcctaattgcctgaaaagcaaatttgaacaaaatgttcacgaagcctccattacccaccatgactctagaaactcttttgtaagctatttgggcttcaatgaccaaggggtcattatggggaaagtgcacatgtcaggtgtcctcctttgtgaaagtgataggcagattcattgttcgaggacgttgagctagtgattgcaatatgacacgcatttccccttccccgtctaactcccttaaatacttttttgggagtttctagtgcttcctggaaggtacggccctctaaagattgtggccacatgttcatctaccagtggtggagctaagcctaggggatatgggttccccggtatcgaagccactatggtcagtgtagtcatagctagtggagcaggatgtgctagaagttgcattctaaggactcgagggtgacctaccttttgtggaggatttacggtaccctactatcctggaataatcaattgcctatgagtgaccccttattcgggatatatgatgggaatatggacccattgcctaaactttcttgctctgaccaacatctcaatttcatcttttaggtggttaca

SEQ ID NO: 309091 - DNA, 991 bp, Cannabis indica
gtaaatctggttattttgaaatgggttttatttagcacacaaaacccaaaatttaggcacgagtggcagtgacatcttagtgttgagttgtgacacgagcttgcctatttaagcaatgtattcccatcagcgatactgattagacacgggcagtaaagacaaataagtgccaagttatggcacaggctcgtctagttagacgatgcaatacattggtgcaaaattatggtacaggctcatctgaatagttgatccagcgacataatgtatgatgccattatgatacgagcttgtcggattaggcaacacaacatatgactgcttttattcccatgcctatggatagttatgttatccactcttgaatgttattgctttatcattttataatagtgaaatgaatatttggttattccatgtatgatcttttattacttttcttgttgattcctagtgactcatgggtgtgctgtggtgcaagtaaaggtaaaaaaaatgctagatcagccatgaggtgacaatcttccctagcaatgtacatactaaccctaccgtcatgtgtgccgagtttctaggagttgtttttgggctgatctgccttgtattttgatttagtattttaagttattttcatatccatcctttctgtaaaacatttacagtagaaatctccaaaacacaattttagtgtcgttatgatgtcaatttttagtattttattttagtaaaatttttaatattatcacatattttaataattaattactttattagcactaaactagtttataaaataatatacatggcactgggatagggcattacaaaaaccacactgcccaaaccaccctaacttctccttcttcctccttgcttcggccattccaccaccaccacttccaccacaaaaactcttcagacctcaaccacaccattataaaccatcactgtcccaccatcactgcatgttagattttgtgccctaaataaa

SEQ ID NO: 309092 - DNA, 1699 bp, Cannabis indica
ataactaattagattgtaaagggttttatttagggcacaaaacccaacagtttctaggtggtcatctagcaccactccatattaaatgatcttcgggtatgtggcaggtttagctagcatatttgcgaacaaattatggtcttgagggacttgttagatgttgtagcctctaaacccttacaacaactctcaagacatcatcacataggcagccatcctctcaccttcggtctgatattcccaagatatttgatttaccactaactgggagtcactatgaacttcaatgtgctaggctctgacttctttagctaattgtagtcctgcccgaatgacatcatgtttaggatcgttgttggatgcagaaatatgaaacagaaagcactttggagttgatgtccttgcaagagatcaatataattcctactctaactctcttttttatttgatgctctatcaacaaagactttccagataggtaactcaaggactagctcgtccaggaggtcacctaacctggaacattccatcacgaagtcagccagggcttgaacattgatcgacactcgtggttaatactgaatgtcaaattggctaagttccattgccattttaacagtctattggatgcttttggcttttgaagcacttggtagaaagggtgatttgttaatactttgatgacatgggcttgaaagtagggtctcagctttcaggaggcgactagtaagaacaatgttagattttcaatcaagggatacctagattatgcacccagtaatcctttgttgacgtagtacaacggtagttggacccttccttcttcttgcactaaggtagcactaatggcgtgatcaaacactaccaagtgaaggtacaaatcttccccttccaccggctttgactaaatgggagctttgctcaaatgatcctttagtctctagaagtcttcaccacactcttcagtcgatttaaacttcttgtttcctcgcaacacattgaagaacgagatgcacttatttatagatttgaagatgaacctactgagagctgcactccttctaataacactctgcacatccttgtgcttttggggagatgacatatcattgaaggctttaattttctctgggtttccttcaatttcctaggagctgatgatgaaacctaaaaacttcttagaggagataccaaatgtacacttcttgggattgagcttcatttcgtaccttccgagaagcaagaaggcttcctcaaggtctatactgtgctctctagatgtcttagatttccctagcatgacgtcaacataaacctccatatttcttcctaattgattcttgaacatcttattaactatcctttggtaggttactctagcattcttcaaaccaaatggcatcatcctgtagcagtacacacctttatctatttggaagctggtgtgttcttcatcgactatgtgcattttgatttggttgtatctagaatagcatccatgaagctgagcaactgatatgtgaaagtggcacccaccgtccgatcaattcacgaaagggggaagcagtcttttagataggccctgttgaggtctgtgaagtcaatgcacatcctccatgtggcattgggctttgggaccaaaactggattagcaagccaaataggatacagagctgtttggttttgtgccctaaataaa

SEQ ID NO: 309093 - DNA, 5342 bp, Cannabis indica
ttgggcctccagtgtggtctccatagaatacctcatggacctcttgcctgatctgactagcttcaggatccgacacacaccttaaatatggcatgctaaacccccttcaatagagaacatcattgatcattaaatatcagtgagcttggtactatatctttctggaaacggtcctttcttgaggcagttctcctatcgttatgtacttaatcataggatccatccagctcgacccttattcattagtagccactacttctttggtcctaatgctaggttccgtgaggtgttcaagaggtaccacccccagcttctctatctcgctatttgaggctagcttagccaagcaatctgcatgggcatttcattctcgtggaattcgttccactttgtattccttaaactcttgtagcaattctctgacaaccaacacgtaagcatccatcttttctcctcgagtcagatattcccctaatacttggttgatcaccagttgcgagtcactgtatacctctaccctgttgacccctacagccttagcaaattttaatcctattatcagggcttcgtactcagcctcatttttagaagccagaaatgtgaaccgtagggcagcctggagtcttagtccatcaggagaaatcattactattccatcccccgatctgttctcatttgacgctctgtcaacatataccttccacgtaggcacatcctgagccggcacattggcgctggcttttattttattgcattctacaataagatccgtcagtgcctggtccttaatcgaaatgcgcaggatgtactgtatgtcaaatgagcttaactccatggcccacttaagaagtctccctaaagtctcaggcttctataagacttgtcgaagtgggtggttcataaataccttgatggagtgagcctggaagtagggcctgagctttcttgatgcaatcaagagatataaatctagcttttcgattagaggatatcaaatttctacccctatcatgcgtttgccaacataatacaccaggtgttgaacttttccttcctcccggagcaaagttgcgctaactacgttttcaaaaacagatagatataaatataagtcttctcagtgaacgggttttgacagcactggtggcttagtcatgtgctctttcaacttcttaaatgcttcctcacattcttcagtccattcaaacttctgacatttcttcaagatgttgaagaataggatgccgttatcgattgagcggtagatgaagcgactcagggcggcaaccttcaatgttaagctttgcacatccttgtgtctctttggggagggcatactcaacaaggcttgtatttttttttgggtttccctctatcccgcgttgacttactatgaatccaaaattttttcctgatttgacgccaaaagtatatttcttgggattaagtttcatcccgtacctttggagtacttcaaagcacttcgtaaggtcgtccgcagggcccatgcacactttggatttgaccagcatgtcgtccatgtacacttccatgttacgtcccaagaggcccttgaacatttggttgaccatgcgttaataggtttcttcggcattttttaattcgaatggcatgaccaaatagcaatatacccccttgtcagtcgggaagatggtacactcttggtcggcgacgtgcatcttgatttggttgtaccctgaatatgcatccatgatagataatagtttgaatcccaaggtggcatccaccatttggtcaattttaggtaacaggaaacaatccttaaggcaagctttgttaagatcggtgaagtctatgcatactcgccttgtcccgttgggtttgggcaccagaaccgggttggccaataattttgggtaatacacgtcgtggataaaaatgttggacaacattttgtccacttcctttgttagggcgtccactttcactgggtctagcgaacgtcttttctattgcactaggggcatattagggttaacatttaagacataagtgattacatgggggcttatctcagtcatgtcctcatggcaccatgcaaacacgcctgttaatgtctttatggtgtcgatgattttgctccgctctcccggttctaggttcttacccaatcgaataactttagatgggtcacggtcacacacccttcttcaatgtcttccattggttctaatgatgctttgaaattgacacgagggtctaattcgtcctatttcgctgtgaattccaatttgtgacctttattgttaggactgacaagtgcaccgcaacgttataacactgtctcacctctccttgattacccctgactgttcctattcctacctcctgggtaggaaacttaaggcacaagtgtcgtatagatgtgatcgctccaaagtctactaaggctggcctttctaggatagcgttataagcagtggggcaatccactaccacaaaggtgcaatatttgaatgtgctttgcggggtgctcggatacaaagtaaccgggagcctaacctttccaatagggatgagggttttctcattgaatcctgtgagttgtgaactgctagaggagagatctttgtcagtgagtccaatggcagtgaaagcatcttgaacaacaggtttactgagcttccattgtccaccaatattctggccatgactttgtttgcgatttgagtctcaataaccaaggggtcgtgatgtggaaaccatattggctttgcatcttcctcaatgaaggtaatgggttgatccatgaccctgggcctttgagccggaagctcagtaacatcccgtatttccttatcatgttttaggacttcagcataacgcttcagctcatttctagtggttcccctaatatgaagacctccagagatcatagcgactcttctgttagtctagggaggcagttcgggtgcctactgatggggcgtccctccagaaggtacatgccttctggtgccatcgtgggccctccttgaggcattgggactccagtttgggctagattcaggtgtggcaacctatttttgatccactcagacaattggcctaatcaaattaaactttcaattttatccttcaagtttttgcattcattagtggtatgaccaatgtcgttgtgatagtcacgccttttgctagggtctctctgagaactgtctctgtacaaaggaggaggtttcaggtaatgcgtattttgtcgattcacgaaatacactcgctctcgactatccttgagttcggtgtactgcgtatattggggtgtataccctctcctttgcctcttatcctcaaatcatgtactacctttagaagaccttttactctgggagctttgaggcactcttgccattcttatggcaggcgcaaactgagttggaaattgcacgtttatctaaggggaattgctgactgggacccctaggtgtggtcgtgccgtagcaagggcaagattctgagtatatcccagagtggcagagaattgtatcacgtttgcttatgggttggcagggagcgcagctctaggaagctgtgctcctgccgcatatcctaatactcccgttgggtaatactcttcgtaagccactatttgtgcttcttccaggttaatgtacttctagaccctcttctgaaagtcttggaggctagcggctccttcctgctgtagctcattccaaaaaggagtcccggtctggattccggcttggagtaaggccaactattgtccatcatcgaccttttttatttttgaagcttccaccttgaacctctttatgaagttctttagggtctctgttggtagttgttttatgttggttaggacgcttacgtcgaggttagtcttccttgctgccacaaactgtcgtcaaaagctgacttgtagcttgttccaacaatctacagatccgggttccaacttcttgaaccatttctccatggatccacccaacgttaatgggaaacataagcactttgcatcattactgactctcatgacagtcattactctgttgaattgagacaaatggtcactggagtccatgtctcttgtgtatattgccattttgggcattttgaaattttaggggagtttcgcctccaagatattcctcgcgcaaggctctcggtcctcacagttggactccgagtcatctcctttctgtctccgctagactctggcaatgtctttgcagaggattgccaattctaccaagattccctcatttagggcaccctccaacaccgatattgcatgcttctttttcttttagttgctttctaaagtcaccatgcttatcattaagcttttgtcttaaaacgccacagggaatgcttgcgacttcttctccctctctctctctctcggttcctggtgcactgatacgctttttcggttctctcggtcttgagggccagtgctctctcgagggagcctgcccctctgcggacatttcccttttgggaaatcacagcgaacttttcgcagatcttgggcttttttgtattttcaaggaacgatgtaggatttctcttagggtttccttcaaagggataccgtttggggcttggctccctattcttatgcttttgagtacttggtgaggactcttcatgtgtttcttctattcctagaggcacaaccttagggtgcacgtggatcccagccatttccatggccttttgcatggcaactattatttcttgcatcctcctattttgttccttttgcgcggctagttcggcctcatgatcagccactttttgccttagggccagtaactgggtatagctgccatcgtcgtaagcatcataccttcttggttctcttcgtactcctcgtcgtttgttttgtcgcgctcctcagaatccatgtttactcgtgaagctgcttcttcatcccctaggttctgatgaccttaggggggggggggggctgacggatatggttttgagtctccaccaatgtactctagatcttttgttgtcgtcctctggacaatgctatccacaactctcaatgaaagtaccaaaatgttgaccgaggttttcggcaaccatatatctaacataataatgagagcttaaggataattaatgcaggtagttgttatgtggttcaagcattaatgagccatagtccacgagtctctgttattaatgagtgaatgtttcttatagataatgtttttgtgtgttttttccgatcccctcaccaatttttgtgagggatatttatagcgatttgtgagaagaataaaaggggtaacttgttttgttggtttgtgccataaataaaaccc

SEQ ID NO: 309094 - DNA, 1110 bp, Cannabis indica
ttagtacatgtcaaagttcgaagggtatgatttggtagatatcaaagtctgggaacatggtttagtacataaacaatcattgaaatagtaaagttgaataaaattagacaaaagtccttaaatccaacaatctcaatagttcagggggcattttcaatggccttaaaagttcagtgggcatgatttggtacatgtcaaagttcagggagcaaatatcctaattagcctaaataataataataatttttttaaaaaaaatttgaaactaccaactcttatattataaaaaatctaaaactaaattcaactcttaaatcttaaatctaaaactaaaatcaactcttatattatatatcttatattatatataaattatatttttcgcaagccaatcatttactttaatgtatctcttatattgaaggtcactcatttttctatctcatctattttatgcatattatttcttttgcttgccacacactaatgtaagaatttctatgttcaattctaaatatcttcataaaacctttttatatattattttaatttttaagagtaactacatgaattttgaagtcatattataatttatagtttatgtacaatacttgtttaagtaattaatttttttgattatttgataggcacaaattagagatattaattattcagataagaatatggtacaaaaaggactagggatatcaattattcagataagaatatggtatgaaagtttaattattgtatttcaagtttaatcaaaatgcaagattatttttttattgccatcttaacattttatattgtttgtatttatttattaaaacctaattaagttttaatggaggattatgtagatctacatactatagtgtgtaaatttataaagctgctctaatttcttaaaaatatattatgtttgattgaatgcacaaataagatacggtgataacaacaactttaaatgtagtagtgactataagtgagatatagtgaacacaacatcttaaagttattctttcggtatccttattattctttttagggtaaatgacggtaaaatccccaatactttggttttggtttcactaaacccccacaacc

SEQ ID NO: 309095 - DNA, 1757 bp, Cannabis indica
tgaatatagacaatagggacaaagttcatttcataccaatgtacaaaatgcgaaagggcattttagcgtaacaaggatgttaggtacatcagatcacctaggaaacaacactatcatgtgttctctccatccacaatcgtgccacgggtcaactggtcaactttgccaagtcttccatcttgtcttctcctaacaccaatcccatggatagaatgagtttttgtaatttgttggatcttaacaatgagtgtttcgtcagtaaatatgtcagggtccctcaatgctctggaagaattgaccaggatgtgttccactatcttttccagaatgtctcttccaagatgagtgtgtggaactctaaatatttttccagagcttgtaaggaagccttcatcaaagcagttatccaagttgtcccttcctatgtcaggtcttgtttcaaaccaccacttcgcactattaagcagttgcaaagcctcattgcaaatttttgtggggttcctctaatcacaagaaaaaaaatacattgaaaaaattggaatagcctttgtgtttctaaatttgctggaggtcttggcttccgttccattacttagcaaaaccaagcgttgttggctaaacatgcttggagagtctagtctgaccatcctcccttctatcctctttgcttaaagccaaaatattttaaacatgattatttcctctcagcctctattggccatagcccctctcatacttggaaaagccttctttggggaagagaccttctcctaaaaggcctcatttggagaatcggaaagggtaactccatcccaatcacggacaatcgatgggctccagatttacactaccaaagtttttgaacaatgccagttgagtgacaaaactgtctattttttcattgataatgataacacttggaatcgccataagcttcagcatcatcttcccgatttccgggtcgatactattctcccaattctgattgatccttccagggaggatagcctcatttgggggcaccatcaatctggcttgcttactgtcaatttagcctaccatcttgcaaattccctagccttgacccattctccttctccatcaaatcaggcgggtttaaactcttggtagaagtatttgtggtctttgaagatacccccccccaaaaaaaaaaataaagcatttctttctggaaaacctaccatcatattctgccatgtgcacttaatctgttcaaaaggagaagtattgcttctcctatttgttctgcttgcaagactcatgaagaaactatttcccatgccctcttagactgtcccagagccaagacagtttgggagagaactacttttaagcagttttataaaaataaaagacagtgtaatattagagagtttctctttcgaggttttgattatcacctggcttatttggacaaaaaaaatgaattacttttctagaaaaaaccttattgttttaatgatttggaattctatgctcacacctatttgcaggattattttctatcacaacactcgcaggatacaatttcttctaccgaggggattgcaactacccccaccatgagtgaatcaaccactgatatagctcataaccattcccagatgtcttatggagaatactgtcttaatgttgatgcagccccagacttcaaaaactatcgtacaggcttgggtgtagtgatcagagactggaatggtagcttagttacaactctctcttcaccaaaaccggga

SEQ ID NO: 309096 - DNA, 1162 bp, Cannabis indica
aatcgcttggacacacaccaagctatctctttgtaacatgactctatcccacgaatgagttgcaatccaactcaatgcttctttaatgcctattatctcagtaatttcgggtacttgaacacatccaatcattcccttcttgaatgcttctaccatagcaccatgatgattctgagctatacaaccgatgccaaaagacaagactcgaaccagaaaaaactaaaaggataagactaaaaaaacatgtcaaaagacaagactaatgggaaaaactaaaaggaaaagactaaagaaccatgtcaaaagccaagactaatggaaaaactaaattagtttcaacacattaacacgatcaaagcaaataaaatcaattaaggaatgtactcgttataattctaacccaataaaatactaaatgaaactaaactaataaaaagtgaattaaaaagtgaaaacaaaaacttaaaaagaggagcaacagcaggtgccgaaatcgaaccaatctcaaacagtggccatgtgttatatatgtatattttagtcaacttttataaaggtaaactacaattgtggtgtataaagttatccaaatttatcatacgctaaaagttgtgccaaatattttaacacaaaatatagcatggcccaaattttacacaacaatagatattattattttatttactcttttgtcacttattaatgtaactattcaatttttacattttatttatatatttaatagaattttataaacttttgttgacacagattttcgtttattaaaaataataagcctttatgtaataaatatgtcacacaaataataagaaataataaatgtatatataaaaccagatatttttacgttgcagttaaatctgcatactccacaagtctatcttatttatgatattttctgaatacaagatacaaatgataatgtatcttttgttctttctaaaattcttcgtcccttattttgtggaatctgcccctatttacatgaatataggttgacaattatttacatttgggatttatttgaaatctaacctatcataaagcgtggacaattcccacgttttatttaaataaatgtgggataatactgaataacggcttaactactttttattcttatccttatagatggttaatg

SEQ ID NO: 309097 - DNA, 880 bp, Cannabis indica
ttttttttttttttggaaattatcttataggtgtatgtgtataaaaatgtgtttttctaacattaagtttttaatatttttattagaaatttgaagttgggtttgattatgtaatgtattgttatttgttttccgaataaaaaagaaaataaggtaatgaagtatgggtattgacatcatatggatatggtggtggtggggaatgggagggttagtattccatggttgaaatgagcacgagaatttatgggcaaagcaataatatggtcatggtcaatttagaagacttttaacaaataattattggtggagaaaggtttattgcgtaacctaataaacgttattacaatattatatatcaaagttgttcaaaaataaaataaaataaaataattatatatgagaggactctgtgttttgtctcaatgtattaataatgttttagtatctttatatattaaaaatttcatcaaaaatagttatctaactgcaatttttaggttaaccgatttttttttaacttcagttaactttaacgaaactgtggtgtaaactatttcttttcatctttccaatcgttaacttcaaaaaaaagaaaaaaaataatacattgatatttcgactgtctacaaactcagaaattcgttcagtattatcgatgatgactagactaagtagaataaaaaacccaaactgtcgactgccttcaaacccggaaaggcgaccattcagtcgtttttaggtgagagaacttaattaagtttcaataataaatcaaataatattccagcaattctgattttaccaacaacttttgataacatatgtcgctggtaggggtgtacatcaaaccgcccgcaccacaccgcaccgcaaaaaa

SEQ ID NO: 309098 - DNA, 563 bp, Cannabis indica
aaaactactattggtgaacactaagaaaaagatacataaaaatgtatggacaaaatcaaatgatgtggtttagtgttgtgtcaacactttttacttacttatcttttcaagtaatatatatatatattaattagtatataactataaacataatacgttagcgtatgaaacattcttggtagacaaaaaaaattatacctaacttattattcttccttttcctcaccaccaatgatcaatctcttctagctatgacaaaattaattacttttgtctagtccctcttaaatttgataccatcaatttagttgtttatctaatctaatttaatctgtattattttactcatagtacatctgatctgtgcagattttatattttggatataacctaattcgtgtcataggtgaaatttaatttaactcaatctacaaaagtacgaattagattggtaattattttagatagattactttttaatattaaattatttaatatttattaaaaaatattttttttacataactaacaacaaaataaaatgttattttatgtctccaaca

SEQ ID NO: 309099 - DNA, 3193 bp, Cannabis indica
acaagaaaacaacataaaagtaacaagaaagtaatatctaaataacatcaaaataataagaaaaactaacatacagataacaaaaaattaaacaacaaattaacaagagtacaacataaaaagaccgcattttctgtaaataaaatcaaaaaattcgtaaatatatttaaaattccgtaaaatcgtattttttttaatttttttgttatttttgtgtatttgtgaaataatcccgatattaaacctcataaaaatttaaatacaatctcataataacaaatacaatatcaaaattaatgttcatacaaataaaatacaataaagtaatatctataaaaaaaaaaaaattaaatgtgttggagagtggtttcacaaaaggagtcaacattgatacttatgggtggtattgaatctgtaccgtccaaagaacaattggactttgggctttaattgttacataagattgctatattgggcctaaaattattgaattggagtccaaccataatttgcacgtgaatatatgagcaaactcaaaaattaaacgttagtgaagaagaaattatattatatacccattttactttatttattttaatttttttaaaatatgcccactttttagaggatgtctcaattaactacttaagttaatgtaaattacatgctaaacttaaatagagagtgagagtatagtgggcaacccattaaaaaaagtaggtatattttaataaaatatcatatgaatgtattttcaattaatgatacaaaaagagatacttctcaactttaaaagaaatataatatttttttaaaaaaattacactcaatatagaattttaaaacattatttcataagtacggtaacttaaatttgtgtactttttatgaaatttttatgattttcaactatttatagaattagtttagtcatattgatctaaaagttatttagatatgtagaaattacacaatatatgagaaaattataagagtttatttttctatggcttaaataaataatactatgggattatgatttttttttctttttttacgtttatatgagattttttatgccacatttttgtaaaagaaaagatcgaaattccatatttgtaccataataataaattttgttaaaaaagtcaccggcgtcggcaaaagtcgtcgaaaaagttagtgacatcggaaaagttagtgacatcggaaaagttagtgacattagaaaagtcactagaaaagtcacagttgcctgaaaaagttactagaaaagtcaccagaagtaaatatctcagatataaacaaaaagaaaaccggttctattacataatgaataaaaaaatgacacaaaatatggtactataacattgttataacgaataaaaaaataaaaaaaattacaaaccgattataactaaaataaaatcggttatataacacaatgaatgggtatttttagggtaaatatggtatgtgtgtaattattttggtgaattggagcatgttgaatggatgttaactagttcataaatataactagtttatttatattatatttaagtcgttgtgtgttattctttgtgtttctttattttgttatgaaaccgattcttttcatatttatgccttaatatttattgaaattaattcccatttcttttaaaaaaaattataatcgattttgtgaggtattatgtgttatgaggtattttgttgtggaactagttttgtttttaatttatgtttcagtgtttcaggaactaattttctttttgttttttaattgtgatcagttggagttattacgtgttatttgtttgtattcattatgatatctaaccgtttctattttagtcatagccggtttgacttatttcatattatttatttttattcattataacattgttatataaccatatctactttaattataactagtatgagttattttgtgttatttttttattcattatgttacagaaccggttatatttcagttataatcggtttaagttatttatttttattcattatgttatagatttggttctatttttagttatatctgagacatctacttcaggtgatttttttaatgaattttctggcgattttttcgggacgatgacttttcggtgactttactggggacactaattttttggcgacttttccaccatcgatgacttttcaggtgacttttctgtcgctaatgacttttccggtagaacttattattacatgttttattaaatttatatattttttcccatattttaaatattaaatattttttaatcccgtatttttctcattatttatttatgccataaacagtaaaatatacactcaattctcatatttagaaaattcccccaaattaattgtccaaaatgaattttctctatttgaggcgttatgaatatacaatgtacatggtggatttgcaaattgggcttcggtcaatttacttggtgatcttgccatctttcacttttaccaatttgtacatcaaatatgaaaaatagcacaaaattcgataaattatatattataaaatagaataatttttttattcatttaaagtcatgacaataaataatttaattctaattattcacacaaaaatacaattaataatactttattttacacactaatcataactccaaccaatttattgctagtgtttaataattcaagcgaaatataatgtcaacataatattttttcaggtccaaattataaaaattacacatgtattttgtaagaaaattacaactaacagtggagaattaaaataatgaaactctaaacaaccaaacgattatcaatgacaatattaacaaatcaagaacaacaatctaaataatgggcaacacaatacataaatacaaaaacaataaatacaaaaaaataaagaaatcaacaccaagatatatatggttcaagtcctatagatcgatgtgatttatgactctactctagttctgaaacaccaccgtaatccttctttattaattgagtaagaataggtacaatacagtcgagagaagattttatgttgactcctcaataagtgttactctcacacttttccttgactgccttggtcacattctcacctggcttctcaggagcctcttcagtgaacacaaacatggcattttctgttggaaattatttt

SEQ ID NO: 309100 - DNA, 2166 bp, Cannabis indica
ggaggtctcaagttcgaatccccctcctcaatattaaaaaaatatattaattatttaccgagattttcaaaaacagaataaaaataataagaactgaagaataaataatcaaaagagaaagtatcaaatgagacaaacagtttttaacataattggggtgttaactagcattagttcacgagtcaatattattcagtaaatcttttgcgtgaaatgcctttagaaatacatagaatgtatatttttcaggttttgcctaagcaaagtttgtaagagagttcaacctttaatccataagattaatggagtatttatagtagtatgagaattacattaggtttcccattcccttctactagagagtttatacttaataatactcatgggaattaatttctcttgaactctagcccatggataaagttatatgctgactaggcagatcgaagttgggttgatctggtcaacaccgtgtacactgattgtggacaattaatctgaattaattgcacaatatttgctatagaaagtttcccctttaatcttgatatgatgcactattttgatttgataactggagttttcttatttgtgtgcaggaatataaagggaaattggaagggtcttctgggaacgtgctgtcttgtctctccaatttcgtggtactggacatgttcctagaaggtaaaatctagatgggctcgacccatttgcctttaatgagggtcacactgatgagtcttgaatgttgatctggagcccacatgtccaatgccaaaaatgcggataacatttacccccaaacttccagaatgttgcgtatggtggaagcttgcatcactgtatcttaatttagacatgtgtaaattaaagaatgaaatagtgacatttcaaatgtcactcgaccgtggaagttggcttccacctctgatgatgatatgtccacgtgtcagttgcgtgtgtgtgacaaggcgcgaccatcgaggagtcattttttagaaacgactatattttgatggctgttcaattttcggcgcaaaaattgaaaaaaagagcatttttatcattgatttacacatttattctagagtgcattgaatactaggatatgcatagattgttggtgttggattttgtgccctaaataaaactcatttcattataatcagatttactaattaataaaagattagaaatattttatgttgcatggttcacatgatttatttcatgattatatatttaatgtataaattctattaaatctagaacatatagttattcatgagtataatgttgtcaatacaatggaatataatcatgattatatgttttaaagtttaagtctcatgattgttagtacattggatttagactgacatgataattagcaataaagtatacttagaccttggcaaagtatgctaggatcaaatgtatggagtatacatcggtctgaaccgatattatacttggataagatatcataaacttaccgttatatctatctaagtaaatatcagttagataattttaggtcaatatatcttaatcttgatatggttaggttcgatctcaaatgtattatttatgttcttagagttgtttgttaaagctcaatcgacctaatacttaaatcttgggaacatgatagtataattaagtgggagcgctaatcgtaaacatggaatctataacttctataaatgattgagatctcatttcagtaattatattagtttatcgaaatatcatttataggcagctaagtattttaaggataaaatacattgaagggtagaatagtaaatttgtccctatttgatgtagatcatctatagaggatctctgactatttggattcgaacgatgatagttcatagcgtatttatatcttggtacatatagactgttctatatagttaagagtgcaattccaaatctatagtggcgcaaggaggaattaataagttagagactttacttggtaaattctagttctacttattggaagcttgattatataggctcatggtccccacactagttgacataatactgcttgtagaaacaattaattggtttttattaattgattataattataaaattagactatgtcttgtttatgaattttcactaagcaagagcttaattgtaaagaaa

SEQ ID NO: 309101 - DNA, 954 bp, Cannabis indica
agagagagagagagaaaagagggttgttggaagagaataacccagaaaataaaatttatatttgcggaaaattacattttaattgaaaattaattaattggtctaaagaccaaaatgcccctaggaccaaatataatcataactatataatcaagggtagagttgtcatctcaatcacacatatataacacaacaattcaaaattttcaattcatcacataaatgccataaataaattccaaaaatatattttgggtcccgaacctggttctgcccaaaatactcgattgtgactataccgcgctggcttgttagaaaatacctgcagatagatagaataaacatactatataataatatattccataagcacgatatatcattaaattacaatttttcccatctcagatcaaaattacgaaaatactcctggtacaccaacagggtcataaaatgtaatttatcagtacagtttcacatattgatttatataataatgtaatttcttattaatacataaacaaactagtatgggttgctaatctgatttgataaaccttagggtattacaattatcccctccttatagaaatttcgtattgaaatttacttgaacaattctgtatattcctgctctatatctgtctcaagttcccaggttgcctcttctacttaacatttcctctataacacattgatcagtgcaattgtcttgtttcgcaagactttttctcttttgtctaatacttgcaccggttgctcttcgtatgaaagatatggctaaaaaactaatgcttcatatctcagaatatgggacagatctgagacatatttctaaagcatcgaaacatgcagcgctagaggcatagccaacctgtacgctatttgccctgtcctctcaaggatttcaaaaggtccaatgtgttgggttttatgccctaaataaaactcttt

SEQ ID NO: 309102 - DNA, 1476 bp, Cannabis indica
tgaaaataaattcaatgttataaagttaaaatctactcaatgtaagaaaaacaagttgagaaatttcaatattattctactaatcaagatcattttttgaaattatctcttcttgcggagatcattggacttctcctcacgctaattctccctcttatggatttcaagcttcttctttactttaagtgcacgcttgtcctatccaactttcagaacctcattaatccttttatcatatagtgttaataaacaaactataaaataacacaatagacttacccctttgcggtcaaaaggtcttggagctactttctttttggtcataacatatcatttgttcatacccttaaaactacttcttattttagcttatcatataatacttacgattttactttaaaaacttgaaactaatctaatgacaaatacagaacatgtcatcctcaacaaatgaaagttagtcaagtaaacgcttgtgagctaagtgccttgttttaaaatggtttaaggtcactaacttgcgaggatcgtagatagtcacagtacggtcagctccacctattgcaatgtcaccaattgtagaactgcagcaacataatatatatcaccaacagaaccacaaatccgttgcaggcaaccaccattagctttcattctcaagtcccataatgtcagctacaataaattagcaaaaggaagcaaataaataaaaatctaataaacaaataaagagaagaaagctcatatcagaatttagaaacaatgtaatgtagcattttacctggaaaccttcaggaacagctaaaatgttacttccactcgcattacaagaattatgcataaagctcacggctgatggatacaatagcctgaaaaaattggcaaaatttgattaaaaaatccaaaaatttgatggaactctatcactgtctctgtcactctagccacaaaaaataggaaaacgttcatcttcctcataaacagataacgaaagcacaactaatatttctttctgaaaggaaccatcccaacgaatcaaattctaagaaaataaagaccatgacacaaaataagaattacgaaattgacgagtgaggcgacaccttaatgccaacataaagttcagtcacattagtttgattgcagaaaatccatttatcttttaactcaaccccatatatattagtgacagtgagagcaagattttcataacacaacttcataacaagaaaatatgtgatctaatcatcttaagacaactttctccttttagaaattgttgttcttaacattgtctgtttctgtttctattttattattttgttaactaattagtttaaatactactattcatagaaaagcttagtgactatagcatatcgcacacactactcattcaatagtcacatagagcattgttaagaaaaacactcacatatagcataatctctccgcttctcttccacacacatatat

SEQ ID NO: 309103 - DNA, 778 bp, Cannabis indica
atttctcgtcacgctttcttttttttacttgacattgggaaaaaggaggaaaagaactttgatctcctttacaatatgaagaaagaaataagggtcgaagtttagaccgctcacagtagttctacctatagaaaagatcatgaaagaggcgatcagaatggtactcgaatccatttacgatcccgagtttccagacacatcgcacttccgctcgggtcgaggccgccactcggccctaagacggatcaaagaagagtggggaacctctcgctggtttttggaattcgacatcaggaagtgttttcacaccatcgaccgacatcgactcatcccaatctttaaggaagagatcgacgatcccaagttcttttactccattcagaaagtcttttccgccggacgactcgtaggaggtgagaagggcccttactccgtcccacacagtgtactactatcggccctaccaggcaacatctacctacacaagctcgatcaggagatagggaggatccgacagaagtacgaaattccgattgttcagagaatcagatcggttctattaaggacaggtcgtattgatgaccaagagaactctggagaagaagcaagcttcaacgctccccaagacaacagagccatcattgtggggagggtaaagagcttccaacgcaaagcggcctttcattcccttgtttcgtcgtggcacaccccccggctcaggggggaccagaaaacgcctttcgttttccccccttcgtcggcccttgccgccttcctt

SEQ ID NO: 309104 - DNA, 602 bp, Cannabis indica
tgggaagatcagagaaaccaatcaatatacaaaggaacaaagggaggagttgctgtgtctattagtgcttgtgatgatcatcaaacctcggccgacacagatgtgagtagtagtactatatatattattattagtatatttatatgtatgaatgagtagtaattaattaattaaatgaaggtgcatgcaggctttaacaggaggaaatgcattggcaggagcaatgacatacagcttcatactagcagtgcagagcgaaccaggactgacttatggccgcctcatgaccgcaatgcgtaacaccattcgtgaagcccaaactggcatacgcctcaacggtcccattgctgctctcgttaacaaaattctacgtacacaattatcacaggtaaaatataatttggattttttttctcgaaaattttgacatgtaatcatgcaccctgaatttttttggccgttaaaaatttctcctgaaactattgaaattattaaatttaagaattattgtctaatttcattcaattttactgtttccgtaattatttatgtactaaatcatgctacctgaactttcatccatgttagaatttttttactaa

SEQ ID NO: 309105 - DNA, 1334 bp, Cannabis indica
caataaatagcacccaaatgttcaagttacaagatacaaaaaaatcaatcggaggaaccaatgtgttccaaaccaaatcttatccattccaatgcttttttagttaatgcatgagcaatggtattgctgcctctaggaatatgataaacttggacactagtaaaagaagataaagataataatactctgttaactaagtcagaaagcggagatctatctttccacttgtgcttgattttatttactaatgccaggcagtcagacctaaccgaatccaaaggaaaattcacattttcgcaccattgaagagctgaatagagagcttgagctttagccataataggagaaaaatcatcaagcattgataagcagaaaccagcaacaacatcgcccctataatcttgaataacaacaccaaaaccaatcttcaagtcatctttactaagtgttgcatcagtacttaggataaacatctcctgttgcggtaaaggaagtgactcctgagcagaatctgaggtattatggactgcaatgttggaaaccccttgagatcttgaataatcctgcaagtaagtaagtaaccaattttccacatctgcaataggagctatattagcattaaacaatgaatgatttctcccattccagatggcccaaagtatgctgaaaattaaacatagatcttccttactcaaattgtcgaaacctgctaaaagaaaatcttttatgtcatcaagcttatgatcgttataaaattgaaaaaatctagttttactccaaatttggactgctatggaacaccctaggagtgcatgagtgactgtatcaacatgattagagcaaagggagcagtttgggttatcaagaattttcctattgaacaggttgaaggaagtaggaagaatatgtttaaaagccttccaaatgaagtgctttattttcggagggatgttaaggttccaaacagttttctgccagcttttaaaaattagttttttttttttttttgatgaataaggaaacttgtattgctcaaaacaaccaatttacatcacatgattttgtacaaacacaactgatactactaccatctgctataactctaaattctgctataactctaaattgtctaccaatttacaaattcaattacaaacacagcacccaattcttgtcctcatcctttgctttgcttggccaaacccccacaatccttctcttgctttcctgctgcacccgattgacaattactgtggtttgccactgtttttggttccatagcacatcattgcgtgcaccccatatatgataaaccaaggcagctaacatagtta

SEQ ID NO: 309106 - DNA, 546 bp, Cannabis indica
gaagagagagaaaagagagattgagtgagaagagacgataggggggtctgtattgttgtttgtcttttgttttttttttttttttttttatttattatatacatatatattttataataattatttatttattatatatatctttgactcgttcaaaatcgagtctttacaccatgttcttatatacaatgtccacaatattatctcttaaaatggtggttatttttgctcacattcttaaacagtatcggagtggacatggtccacttacctgcaagggatatgactctaatatcatattgagaattatagagtttcattttaaaaccaattagtgataagtatagtaactcatagttttatatatagctcattactctaccatttattctaattgtacaatattatagcactaaaccaaccattcatattattaggaacacatagaataacgatatatatatatatatactagcaaaaactacgtgcgagacacgtatattaaattttatgctagtttttttctatgtcatttgaaagtgatac

SEQ ID NO: 309107 - DNA, 636 bp, Cannabis indica
ttcaatattgttttagaaaatgattgtttctaatttctcattcaacaactctttttttgaaaaaaaaaaaaagactagaaacaaataaagtgaagagagttaccgagaaaactttgttgcaggctccgtaagtgaaagcaagagagacgagtgagaggaggtgaatcgcaaagctgaatagcagaagtgaatcatagaggcgacgagagagtaagagagattgattggcttcagatcatatatgggtatatatatcaaatcgacatttccaggtgagcgagttctcaagcagcgaacaggtggtcttcctcaggcgacgcggcttcttcttcctcgtggctgttttggagttcggtcggaaaagtaggtcaatgaagatttgtaagccattgatggatcatggaactgctcagatccagcagttttggattttcttgagaaaataaggagaagaaaatttaattggggtgcggaagtaggtgtgtaattaataagtagggtaattaaagagtgtagtaattacactatattttaaaatggatggtgtgtttagatatgaggtggtaattacatatgaattcttaatatcttgtttggcaaaatagttagtaatttcatgaaaaaaataatattttt

SEQ ID NO: 309108 - DNA, 881 bp, Cannabis indica
aattcacaacaaataataaaataataaaaattagtgctaattgcctttactaatccacattactagagcggtcattacaataaagttctgattgtactataaaggttagtgtgtcagatgtatagtggaggagtgttggtcgaatgtcaacttgtacctagagtaaggcaaatggtgtctccactacttgtacttgtagtattcgttgtacaaccacctcctctcttcaagttttgttgaaggtattttagctttaacagacttgcccttagtcgtacatccctttggtatcttttccattacaacttgtacttataatgagggagccacactaggaaatttggcaaagtgttgggagagggagaaacacttggtattttaattgtattgggagagggagcagcattggtaatttggctaagtgttgggagagggagcaacacttggtaatttggctaagtgttgagagagtgaaggggaaaaggaacttgaggagagatagagagatgaagagagtggggagaggccagtggagtggggagctactttagcgcgcaaggagtgagtgaggtggggagctccctttggtgggtgcagggaatgacgagagcgaggagctcccttggtgcatgtggggaatgatgggagtgaggagctccaactcccttggacacgcacgaattgtggagtggtagtggggagctgcttatgcggagagctccactcgagccttgactccttctcgtgtcggcttgcccctttacatgggtcgacttatatttctgggagcaaaacaagaaaaatgcccgagacaaaatcaaatcgaatcgatggaactacatgttgttatacccaaaatttggctgccatctcagtggagg

SEQ ID NO: 309109 - DNA, 530 bp, Cannabis indica
gcatctatatgctgcatgaaaataagaggaaaaatcatcaaatcaaatacatgacattgcaattggcattgccatatgtcgcgatttgtcgcaaattatatcacctttcatcgtaacataaatcgttaattaagtcgcgaaaccatcgcgaaaatgtttataataaagcaaaccatgtttgttgcgacagtgtcgcaacatgtcaataaaaaaaaaacagagaacaaaaataaaaaaaaaaattataaaagaatacaataattaaatacttacatcatcgtccaaccaatcccccatcggcaaccattttgtgaagaactttacatccccttggccagtgcacattcctaggtcgggtattgtgaatatctccaatcaaccacctcttaaacgtacgtagcaatctacggtttgctggtctttccatatctacgttttttggtaagaagtcgcctctttttttttccttacgtgtagtccttcaagtacgtaggcagctttgttggtttgtgcctaataaacccacttac

SEQ ID NO: 309110 - DNA, 930 bp, Cannabis indica
tctgaaaagtaacgaattgggcccattttccttattgacacagaatcttgcccggcccattttgacttatttgtcaattcaatagggaaacttacaaaaatactgacttttggtccaatctttacaaaaatactgccacacggcagaaataacttttatattgtattagcccatttttttttctttttatactgtaaacgccagaaaataaaatgagacctccatcttccacacccacggacggaacaactataggaacactagaacaatcagaaaactaccattaatttcggtgagattaagaaaaacagtgaaatcaacgacaaataaataatcatggcaaaaccactgtaaaacaatactaagacaaatcaaacagaaaagaaaggaaaaaggttaaaaaaactaacaatgttctgcacaacctcaatacgagcccaatcttaaaaaatcaaaataaaaaaactaactaaaacaacacaaaaataaatgtaaaacaataaattgatataaccacttagaaaaacataaaagaactacaaacctcaaaactttttttctagtgagctcgttaaatgtatttataggagaagcagaataaagaaactacaaaataaccataaagaaggaagaagaaatgtattttatagcctccatcttctatactcacggataaaaccaccacaccaccatgagaacacccaaaaaacaattattaattcaagcgagatggagctagaacaatgaaaatcgacgtcaaaaaaataaattatagaaaaaaacggtaaaacaacactaaaacaaataaaaaaagcaaaagaataaaaatgattaaaaaataattattttctgcacagtctcaacactagatgtaatagaggttatacagtagaacctctattcaagaatactctattcaagaataacctc

SEQ ID NO: 309111 - DNA, 1086 bp, Cannabis indica
agatcgggactcggaacacgaacccaaacccagacacggacttggacccagaactagatgtaagacccgtaccgagattaaagacttaaacctagacccagatcccagactcagattcgggacataatcccaaaattagaatcgaaatcaggaccctaaaacaaaaattagacctgcacccaaaaccggatctagacgaagaaccgaacatggacacaaacccaaactgagatccataccaagacccagacccgaactaagacccagacttgcaccaggacctgcgacccaaaacctggaacccgtgacccgagacctggaccagaacccagacacgtaccaaaactcggacccacacccagacccacacctagacccagacccaaacccagacccaaacccggacctagagctggactcgtatcagaactcgtactcgaacctgagactcgaacccagaccgagattaggactaggacccagatccaaactaggacctagccctgaacttggactaggaatagaaccaaaattgggatcgggacccaagattgggactgggacctgggatccgagacttgcaccaaggacttgagaacaaaactgtcacctagatgggggacctgaccccaaacccgaacctagacccacacctataccaaggatcaagacttgtatgggggacatggaccagaaactggaccctggaaccgagaccaagacccaaaactcgacccgaaactcgagacacgggacctgaccttagaccctgaacccaggacatgactacccggacacaaccccaaaccccgacccaaacccaaacttaagacctggcttgggacccgggacccaagacccgaaccagaacaagactgggatccaagatcgagatccgtatcttgacttgaggctttgacctgacccatagtcagtgtttaaatctaggacctgcacccagatttgtacccaaactcggacccgaactgggatccaaacatgatcccagactcggaatgggaatcggactgggatgagaactgttggatgttattttaccaggaacttagatctactcacaagtat

SEQ ID NO: 309112 - DNA, 1517 bp, Cannabis indica
atgtacttcttaaggctttttctaggtttttgcttgatatttttcaaacaactaacgtccaagttgaaatcatttgctgctatgaattgtttcttaagaattacctgtagatccttccatttacaaacagattcgggagataatctttcccattagtcttctgcaaacttggacaaagttaaagagaaacaaaggcactttgcatcattacttgcttttgccacttgcatcattctaatatattttgatagatggtccttggggtccattcttccttcataaaactccatttgtggcattctaaagtgttccgacaactgtgcatctatgattctcttcacacatggttatgtgtcctcgtcttccaagtcaaaacagttccattttactttcgggagatgcgctccgtgatcctagtttattccttaatcttacgttctagacgttgagtggttgcatattgagactctcttcctcagatttgatcattgatgtgaattctcaagtcattctacgaggtctggctttctcatttctagccttctcctttttggcattcaattgtgcccaataatcatttattgagagacttcacttctatcatctgataccggatgaacttcattaacatcatcacttcggctcgtggaattctcaggatcatttttatctttcttagtggaagactttcatgcttatacatgagagttttctttttgcgcagatctgcctctagaatcagtctggtgaccttgccctgaagcattggttcctttctttttcttaggaggttgtttggcaggattcactcacttttgtcgatcattgggagcagctttttcggaggtttatcctattctccccttccctctatccttaggaggattatgagggtcaggatctttaggatttgtttttttagaagtgttcccctgaggattagtatcattaggtatatttttgtcgtgattctggttttctcctccaaatatctcttccaacatcacaaatttctccaacatcagtcgagaaaactcttcttgttctgccaaattttgtttaactgcttctagtttttttagccatcctaacaactttaggacttagttcagggtgctcatctcccttattgacatcatcatcttctgggcctatgggatccaaatcttaagatacttcttcttctcctttatcgatgggttcatcatgaaggttggttttatcacactgatctttccctttttggtgactagtcacctcagtgggatctttgtcgaccccggtctttggatcatgaagactagatttgtttgggtgagtaccataattattgaacataatcttagatggtatcactgttttcttcagctcttaaatgaaagaaccatatatttacagaatttttcagaaaactaattattaaatataaaagctaaagaaaatataactcaaagagaaatatatgaagaagacactcagtgtaatgaccgctctagtaatttggattagtaaaggca

SEQ ID NO: 309113 - DNA, 4246 bp, Cannabis indica
cgcaatttcagtcaaaaacaaaatcggattcctcgacggttctattcctaaaccttctatttctgatcaaaatctttacaatgcttggtatcgtaataataacattgtgatttcttggatcttgaattcggtttccaaagaaatctcatcaagtatcctttatgatgaatgtgcatcgggtatttggaatgatctaaagacccgttttcatcagaaaaatggtcctcatatatacaatttgagaaaagatctcatgaatcttaagcaagaaaatcagaccattagcatatactttactaggcttaaaactatatgggaagaactaattaattacaggtcatcatgcacttgtaatggatgcacttgtggaggagtcaagagacttcaagaccactaccacatggagtacatcatgtcattcttgacgggactctccgattctttctctcaagttagaggtagcatccttctcatggaccctttgcccaaataaatcgtgtatttcatctcgttactcaagaagaacatcaaaggggaactacctcaaatagcaacaacaataattctgtcatggcatttgctttccaaggggacaaaagagggaaccaaaaagatgataatcaatccggaaaatcccatcctcctaaaagaaatcgtccatattgtactcactgcaatatacatggtcataccattgaaaaatgttataaaatccatggatatccctcgggttttaacaagcaaaacagatctaaggaggctgctgcaaaccaggtgcaaaatggggaagaaaacaactctgctgcaactaaaaatcatgctattctccctcagcttccctcggcccagttttagcagctactcaacttacttgcctctcaaactaacggtatgaatggtagtaatcctagtacttcagcaggtaatacaggtatcattctatcacaccattcaatttctccttttctgaattcctggatagtggacacgggagcaattagacacatatgttcttatattaaaatgtttcaatgtatatgtaagacaacaccaactaaattaattcttccaaacaatgatagtcttactgtgaatcaaagtggatatgttgttctaggaaacaacattgtcttgactaatgttttatatgccccacttttcaaatacaatatcatctctgtaagttacctcactaaaaattctcctatttccttttacttcactgctgatgagtttataatgcaggacaaaaccagcaagaagacgattggaagaggtagtaatgtcaaagatttatacattcttgatactacgccaagtccatctcaagtcttctctgtctcagctgaagtttggcattcacggcttggacatttatccaataaatgcctgaatttgcttaagaatactctcaattgtaacacatctgatttacataaaacttccccttgctatatttgccctattgctaaacaaagaaaactccattttccaaatagcaatacaatttctaataaagtttttgatattgttcattgtgatgtttgggagccatatcatgttgtatcacactcaaatcacagatatttttttactttagttgatgacttttctagattcacttggatatttttgatgcaacacaaatcggatgttagcttcattttacctcaatttctgacttatgttcaaacccaattcaagcaggtttttaaagtttttcgttcggataatgcaccagagctggtgtttaaggatctgttttctaaacacggcattttacatgagttttcatgtgttgaaacgcctgagcaaaatgccgttcctgaacgaaaacatcagcaccttctaaatgtagctcgatctctttattttcggtctcgtattcccattaaattctggaatgagtgtgtgttaacagcagcctatctaataaatcgaatccctactcctttgctgaataacaaaactccatatgaattactttttgataagttacctaattaccaacatctaagatcattcggatgtctggtttttgcctcaactttatcaaatctgaaaaataaattctccccaagagcccgtacttgtgtctttatggggtaccctcaaggtgtaaaaggttacaaactctatgatatcaataataaacaaatgtttgtatctcaaaatgttgtgtttcatgaaaacatttatccatttcaaaaactcaataatgagaatgctaacatagatcctttttctctcactatacttcctcattctgtaacaaatgacttacctggctgtgagtatcctacaggtcctagcaatgcctccaatgatgcacatcacatagacgaactcattcttaactcagatcaaattcagacagcttctactcccactggtgcaccagaaacttcatctcagcatgcacctgccaccacggttacaccacaaatttcacctacaccagcagtttcaccacaacaaacaacacaggaactgccaagaagatcaagcagacaatccaaaccaccaggctacttgagagattttgaatgctactcactcatccaagaccattcttctactccacataaaattgataaattcatttcatattctaacttgtctgaaactcacatagctttcatccttgcagtttcgtccaccaaagagccaagatcttactttgaagccatacaaaccttggcttggttggaagccatgcaatgcgaattgaaggcactttcagataacaaaacttggtctatagttcctcttccagccaacaaaagagccataggatgtcgctggatttataaaattaaataccatagtgatgggagcatagaaagactaaatgctcatcttgttgcgcaaggttacacgcaacaagaagggctagatttctttgataccttctctctcgttgcaaagatggtcactcttaaattacttcttgcaatatcaaccattaagaattggcacattttacaactcaatgttaataacgcttttcttaatggagatcttaacgaggaagtttacatggaaataccacaaggtctaaccgtgccttcttctcttaatgcaggaacaaaactggtatgcaaattgcacaaatcgatttatggcctgaagcaatcttccaggcagtggtacaagaagctatctgatgctcttctccaagaaggattcaagcaatctcaagtcgattataccttattcactagaggatctgaagacactttcatagcccttctagtgtacatagatgatatcatcattacgggtccaaatgtgtctaatctacaccagctgcaaacatccctacataaaaaattcaaactcaaagctcttggagacctcaagtatttcctcagttttgaaatttcccatgctaaggaaggcttgtttctttgccaacgcaaatatactctccaattacttaaggattcaggtttcataggcagaaaacccagcaaaatacccatggatcctaagcaaaaactcaacaacgaagaaggagaaagtttgagcaatccatcccattatcgacaacttgttgggaagcttctctacctcaccttgtcaagacctgatattacttatgcagtaaacgctctcagccaattcatggcgaaccctcgtactactcatcttcaagcaattcatcacctcctaagatacatcaaaggcaatccaggacaggggctgctctattcaagaaattcttcactgcatctctgtgggttctctgactcagattgggcatcttgccccatcacaagacgatctacaaccggtttttgcatttttcttggaggttgcctcgtttcttggcgaacaaagaaacaaccaactatctccaaaagttcagctgaagctgaataccgagcgttggctgctacaacaagtgaaatcacttggctacaatatctcctagatgacttccacatccatcaaccacaccccacattcatctattgcgacaacaattctgacatccatatcgcaaacaatcctacttttcacgagagaacgaagcacatagagctagattgccatttcatccgtgacaaaataacaaactgctccatcagactaatccctatttccactactctacaacttgtcgatgccttcaccaagccactatcttcaccaattctccattctcatgtctccaagatgtcagtgtacaacatacactctccatcttgaggagggggtattaagttactggttactggtt

SEQ ID NO: 309114 - DNA, 1187 bp, Cannabis indica
agtatacgtcgcggatcatgctgttagtcagaagcttatccacctctttctctagggcctcagctttcaccaagtcgagagggcgtcgcttttgttggactggcggcatgtccgggttgacgttgaggacgtgggtgatgacatggggacttatgccagtcatgtcctcttggcgccatgcaaaaatgtcgatggcgccattcagtgtttttattatttttcttttcctccggatctaggctctttcccagccggagtactttggtggagtcgaggtcgcacactgatatttcctcgacatcctccattggttccacaattttttcggacccccgagaactcatcttcttcagccatttctggctcagtggtttcccggaccatcagtacgggcaggtgggttgcaacattgtaacattgccttgcctccccttgatttcctgtcaccgtccctattccagcttcctgggtagggaactttaagcacaggtgccaaatggatgtgactgcgccaaagtctacagctggagtttaatgtttgaatgagacagaaattcaatgtgtggctgagacatattacacaaatctctttatgacttcttttccatctgatgatgatattgaagctgccacttctgttgttcaacatagagtttcggatgagatcaatgagtctttattgttacctttttcggaaaatgaagtgactcagcagttttttccatggctctagataaaagtccagaagaggatggtatgaatgcaatattttatcagaaccattgggacactttagggccttcaatcagtgaagcagtgctggaatgtttaaacggaaaggctgatcttgcaatcgttaattctactgtggtaaccttaattccaaaaactaatagggcgaataatataagtgattatcaacctattagtgtatgcaatgggctgtataagattatttctaaagtgctagtgaaacagttacaaccatggttgaatcatattatacatatagctcaaagtcttttattgaaggccgacaaattacagacaatgctatggtggcgtatgaactattacattctttaagggcattaaattgagggcgtaagttagggctgtacaaaaaaattcgtaaaccgcccaaactgaataacccgccaaaaccaaaccgaaaaaaccgataaaaa

SEQ ID NO: 309115 - DNA, 1089 bp, Cannabis indica
tctttgctcgaatgagagagaaatcagagccatcctaaatgactatttcaaaaatttgttctcctccaacggtaatgtctcttttaagggtttggattctttgattaatacttctatttcctccactgagaatctgttgctcacggtcgtgcgtgacatggaagagattcaatctcatgtctttcaaatgcatcctcttaaagcgccgggtctagatggctttttggggtgtttttaccaaaagtgctggagtttggttggtgacgatgtggttcgatgcattcaacagttttttacaacgggagttttggagcatgggcttaatcattcgttcatctgcctcactcccaagggtgttaatctagacagtgttgatcgattccggcctattgctttgtgcaattttgtgtataaagttattgccagaattattgcctaaagattgagattggttcttgatcatatcattgcccccatataatcggtgttccttcctggaagatggattttagagtcatccattctcatttaagagattgtgaatgttattaagaagaagaaagggaaatgtggcttattggcaattaaaatggacatgaataaggcgtatgaccgtttagaatgggggttcctcaaggttgtgatggagcaattcgggttctgcccacattttgtcaagatgataatgaattgtgtttttaatgtctcctactctatcctacttaatggaagacctgtgaagaaatttcagcctggtagaggtattcgtcaaggcgatcctatgtccccataactatttattctgtgcaatgaagtgttttctcgtttattattccatgaacaaagaaggggcttgtttcatggtattcgagtggctcggaatgtgcctgaaatttcccatctcatgttcgcggatgacaccatcatattttctagagcgaatctcaaggatgtggaaactctgaataggtgtatcaaaaggtttgaagattggtctgccaagtttgtagtaagcaaaaatcatgaattttcttctctagtaactgttctactaatttgagggagtccattgaaagcaatttgaggatt

SEQ ID NO: 309116 - DNA, 1656 bp, Cannabis indica
agattcacaaggcaaacctcgcaattctcaaaccaaggggcaggagacatcccagagatatactcagaactcttaggagatgcaacttgaggaaactgaggaaaatctagagacgcagcctgcgatatgcggaacatcggatggaaatcgccaaccctctcttcaagttcataagaaaggaactcacacaaaccccaatagggaaaaaggtgaatcagaccttaagaggaagagcagaacaagaagaggtgaggggtaccacgaggcatacagtatctcataatcgacccgtgcgaggagaagagaacactcgtcacagtaataatcaaaaaggcataatacaacatgtaggacggggaaggtccgatgtcattcatgaccaatgtgacctacgagaacatttgaacttgagaaaacctgatcctcgtcaacgactcggtccaaaacaacgggatttactccatttgcgaatggacaagttggagaacaagttcagataacatcaagtcagggaactcggaatacaactggggtatgattctattgaagagttcgagtcagaagcctcaagatcaaaaaggaaagatgattccaaaaggcttcccaaggataagaaacaaaagaaacacaacaaatatgccgagctcaatgaaactccgaaagatatctatctcgcacatatataggaagtcgcttttagcgagccaaagcctatgaaacatgcgagatgtaaaacgcacccaactaaaaggtgtgaatatcatggggatattggtcataccacggaagagtgtcgtcagttgaaggatgagatagaaggtctcatagaacaaggacactttcaacaatatataaaggggcagggcaatgcccataattagctcaatctgcccattaacttgagagaccagggattataaccctcctctgcaggaggaggggacaccttggttatctcgagagggagcgcgtctcaagaagacaaggggcagttaattcgttaaagcaattttgtaaaagaattgtgacacgagtagatgtcggcccactatggttgccatatcaagctgccacgtgaaaagctggccgccaaccagtagcagtcaaagacaaacaactaaaaccaggattagttcacctggaaccccgtgatatgtcaaggattgaccctggatattgaaacaattgtgggaatatattagggattgaccctaaacatcagattctgttttatcaaaactagatgctcctggaagattggtaaaataaataattgaactagggaagttcttataagattaatgattgtaaatcacattgctaatgtaatattttgaacttcagttttgaataaaataatcatttctctcaacaagtaattgtaaagcgtaaaccctttaaaaacttaaggggcatatatgtatgaccaaccgaaattaatatggaaatacatagtacaatgcaaacccattacttcaaaaaaaaggtcctccaccaaacctttttgacgaaagaggggttgaactgttataactccctcaccaaacctttttgacgagagactggtcgaatcgttataacgctttgatcaaaccattctgacgagaaactgatcaaaaaactgtaaatttttgtttaaaacctatctgacaagaa

SEQ ID NO: 309117 - DNA, 1435 bp, Cannabis indica
aagttcatgggaaagatttggaaaaaggcaatgtacgagtacgcataattgaatgtttgaatgaaaatgctcgtcttcctgtccatgttcgtgatgatttaatcttcgtaaaagatgcagtccaaagctttgttgcatggccggaacacttaatcatctttggtgattctgaggtaaaagaaaatagtttgatttgtatttagcctttctattataattatttattgtttaataatattttaggcattaaaaactatggagaaaaatgaacatttatctccacacatgccaactcagaaagcttcaacaagttcgatgaatgtgaaagactctcctgttccatttgttatgcccaaaatcatcccaaggagcgtcaaagctatattgttaagtgttcaatatcgcaaaagtagagaagagtatcgtattgaaatggatccaaatatttttgggtctgatcaagatttgtatattgaacctaaagatatagttcatcttggcacaaatgttgagattggagctgagtgtatcgcattttatataaggtaagagatttttttatcatattttttaatcgcacacttaataacattatttaatttggtattgttataatgtttaggatcttacatgaaaggttaaaaaattcaaaaagagagaagtattttcgttttattcatccaagttgggcttctatagtgggatcctatttgcagcaaaatgtagaatcaatagcagatcgattagcaagcgcaggggagatgcaactttcattgatccctattaatttagggtaagattaacttaaattattattttagctatatagtaatatatttatatattaaaattttttcttccatcactagttatcattgggtgctaataataattgatccatcacgtgagatgtgtttctggctcaatccaactggagaactaccaagtgataccattaagaattttatcgcaatgtaagtgaataatatttatcattagtataataagcatcaaattaaaatttatatgtaatagtgttgatgttaatttgtttattatttaggatttttgactattacaatgcttcaaaaaagaaaactccaagagcagctggtattatatggaaaattataaaagtgagtagtctttatctctcaaaatatataataaatttttgtatttcacaaatatttaatgattttacaacaaaatattacttttaattatttattttaagagattcttacacatctatataaatgtgcagtgtcctcgacaacccaaacactttgaatgtggatattatgttatgaaatacatgcgggatttatgcatggattcaagacctctcaattggttaaatactaatgtatatgaaatatacatctttttcaatatatatatataaataatatttaagttcactaatatttat

SEQ ID NO: 309118 - DNA, 1317 bp, Cannabis indica
ataattaatcataattaactgataatttccaaattaactaagcgggctttacataagtaataaatgataaaataatactagatattttacgtggttttgtagttaaaatttacgtactccacgagtccttcttattagagatatttttgagtacaaaatacaatattagtatttgaataatagtaatattttatctcaattttgtcgtccctttctccatggattctcccctatttgtaggagtataggtaggcagttcttctttttgggattggttcaaatataattgttcatgaaatatagataattcccacgttttatttaatcacatatgagataatatctaataactacccaatttctctttatttctatcaattagacggttatgctaatttggaaggttgtattttgtcagacttgagttctcattcttgtccatcttgataggaaaaatgctaagcgttggaaaataattcatctcgtcgcatccttccatttgacttagcatttcaaggcgatcttctcgctatgtgcaatgcgaggctattgtgtgctattacatttattctacttgagtagatgcatatcctttttttgtctatttagttgtgtatattccgaggcagacatatgtctcgttaatactagtttaatagttattattcttgtctcgattaagactatatatagtcaacgcgtttgaatattatctattcaatttttatttaattttaatgagttatttgattgacatttaatgatacaacattattatattattagaactgattcacattcctcttatttgacacatgtcatcttctagtacataggtgaatttcgggtataacactctatataaaagcatataacaagtagtaaccccataaatttagcaaaaaagaaaaagttgcatagttcataatgagcaagcaaataataattttagatgttatttctatgaaggtaaatctcccatgtctctctcttttaaaaagtaatggctatgagtaaatctctaaacttattatgaaacgttgaatactttttgtgttatctttaatttatcaaatcttgtagagataaatgttatctataatattcaagtaaggtatgttagatcaatatatatatatataaatatatatgagattttgtgaatttttgaatattttctatgtattattatctcaaagagagggaatatatatacaacttagaatttgacctaataaatatttagaaagtacactattaaaatcccttaattttagaaagaataaatatacaaaatatttggtattaatacaaaat

SEQ ID NO: 309119 - DNA, 1224 bp, Cannabis indica
tgttagttgtatttatagattagggatataaatttcaaagtcggtggctgcaaaagataaatttttaagttatttacaacttaacaaactccttgtaggaatatctccacgttagctcaagttaaagcgcttccggatgagatgtacacttcctagaagatagaccaaagtgtacgctgaagggacttcctggataggaatagcgacactggatttgactatctggaactcccttccagaagggaacaactagtcatctggaactcctttctaaatgaagactgcctttccctggaaactcctttaggatggacaattagactttcagaaacgcccttctggatgacatccaactttccattaagatgaacaactttcagagaccttttcatttggaggaactataccacaaattacacctagtctcttcaaattaaaatataaaggtgatgaagaaagaatgtagccatcatcattggtgttccagatatctcagtatactaaattctgagaatgatcaagtttaagcaatacttaaacttgtttaccgttaagaccttagtcccaacatcagcgggattaatattttctaatctaaacttttctaattcaaccaatccttcttctatcttttctcaaatatagtagagtcttatagctatttgtttactcttttcatgataactgggttcttacaaagatagatggataaataggtatttgagtacacagtcactcttgtttcaattcacagaattctctgaagtaataaagcttccttgaacacttccgtagtagctagccataaattctgcttccgtagtggaaagagcaaccatgtcactacaagaaatgttacttttgccagcacatttttgtgctggcaaaagttagtattgcgctggtaaaatagaatttacctatgatgtgttggtaaaagggggttgacatatcaatgttggtattagaactttttccatcataaaataaaaagtgctggcaaaaaagatttttcctagcgcgtaaatgtgctggtaaaagtaagattttagccactgcaaatgtacgctggtaaaactttgatctctttgctagcgcagtttttgaaatgtgctggtaaaagttacttttaccagcgcagtagcgaactgtgctggtaaaagtgacatttcttttttttttttttttgtatgaatcagctttaatttcattactccaataaac

SEQ ID NO: 309120 - DNA, 4598 bp, Cannabis indica
cttttgaaatcacattgtggctaccctacgtagcttaacaaagcagaggcaattattgaagaatggtgggagaccacgccaataagtttgtgggtactagcgcttttaagggttcctgcatgatgaaatgttagaggaacttaattgacaagttggccagtgagagtacttaccgagatgttccctctttcaatttttgggtagaagttctgacttcaagttctcgtcgtactcgcctgacttgtgtgcacctttactgttatcttgtaacatgatgcgaacctttttagtttggtccggacatgcttgctataagggattttccatctagaaatattcttcaaggagtaattcacttgtgaagaatttttttccttgacttgtttatcgacaggcctagaaactccttgtgcgtaatcatgctgctttgagttggcttggtctcttcttctttctgttttttcaagggatcctattagcaagatgttgtgtacctcttggtcactatagactagaactatgagagcacacttttggtggatcgagctagccagggcaagactaggtggtcagccatattgagggagcactgtttggatgattggatgaggccatggccggccagaatgtagaggtggtggctagctagaatatggactctatggctggccagctttctaaaggcctagtcgatgctatggttggatcctatcttcattcgattggctttgccccctggcataattgatgtagaacctttgtgcactactgtcattagctatacaacctttttcttggaaacgctccttggtggtgttggagaaccacttctgtgtattacgatgtgcaggattgaacactttgtagcggttcttctagtccatgctctcgagaaaggtctttgtttggaggtaaaccgcggtaggtgtcatctagcatgtcgatctcctctgtgataacaatgttgggttctaggaattggatgggcactgggtttgctttgttaggtactactccctaggcaagcaagtgaatctattgtgggattttgttctttttgaaataggacttagttctttgaataacttagagggtacaaagttttcattggttcaaggtacagctggctagttgagcgagtgcgtcggttgttgtgctgtctttgggggcttgcattctactataaccgttgagttatcttaacagctctagtaggccaatattttattatattgagttgtatattcaccaaagacatagcctatgactagctgagactcgtggtgcatgtttaggttgttagcccgcgcttcgtgtgctagctgagggctagcattcagagcttcatattcagcctcgttgttagaagctttgtaactaaccttatttcctcaggccttagtttcccccaagtgcgttgggggccatgcttacatcgagcaggtggtcaacacacctcttgggctcttgttctcgcttcttctccagctcctacttttctcctaaactttaagagatttgaggagatatgcttctatgattacccatgaagcttgttagagcttggcctttggtggccatgccttgttttgaggtgcttttatgttggtcgagtaataattgttcacttgagtagttgggttgatgctccaagtttctatagaacctacgacaactgctgattggtgtacatgtttatagggttcatctagaagtgtggccttagtattttggaagctaatagcaagctctgggtcagcttctccatgagtgggaactgacttagtgtcaattcgtttctttcttgtgtagtatatagggtgttgtacactgtcttctctcttatgagggcaacactcatagcatgtcctgtgactgctgggtgcacgcctagctcttcttcgtttagagatctgggcaacatgggtggtcgagccaatataattctttagctcttggaatgcagtttcacattcctttgtccacttgaatttgtttttgttgcttctgcttcatgttgaagaaggatacacatccatctgtatacttggacataaatctgcttagtgcagtagtgcgtcctatttggctttgtacttgcttcattgttgtgggagacttcatattccaaagggcttggatctatgtgtaggtttgagtttcttcatgttgtagttgtggaggctttttgaaattgtttgccaatcctccatatacccctaacctttttggacttgacaagcatgttgtccatgcacacattcatgttgtggttgataggatcattaaacattttgttaataagcttctaatgtgtggcccctgcattcttcaggcctgaggggcatgattttgtagcaacacaagcttaagtttgtcacgaagcttgtatgctcctgaattggtgggtgcattctttttcttggcttttgacaaagccaaggtatgataggaagatttttgatctcctcttgacatccacctcatgcctcgttgggaaataaaggaaaagatggtagatgggtgatgtcgccttcacgttgtatagggccgatcatcccatcatggcattggaagtcgagggaacgtcgatcatgatgaactgcgccatcagagttctggttgttggattttctccaacattatggggtaatctgatatacccgatgagtttgatgctttggccagagaggccatacatcacttgattgtagggtaccaagtcagcgagttggagcctcatcttttcatgtgctgattttgaaaagaatggtgaaagaggctccattctccaccatatatcttgctgcagtcatattcccaatttgtatggtaacgaccaggggtcattgtgggggaaaatatcttgagcatgatctcctcttttgagaaagatattgtgggctttccaagctttggttgcttagagccttgttcttcacctactaggaagttgcttttgggctcatgatgaagtgtccaagcatagcactctctggatttgttggtctcagatgtaatatggggtgcgccaatgtcgacccctaagtgtcctgccatctgaggtttgggcatagtttgttgtacttgactatacgactgaccaaagatggtggcccacctttggagatgcggtacagccttcggaggcagaggccagactttaaaggtggaggtcaaccttctgtgatggaggccagccttctatgatggaggctagcctttggaggcagaggccagacctcagaggtggaggccagccttctgtgatggaggctatcattttggtgggacgtctggtcatgccacattttgggatttttgatagaagagttaagcatacacacttctcctccttcttccttagagttcattgcataaaaggattgttgaatttccctctattgccattatctttgttagtgccattattgttgcgcttgcctccaccattctcgttgtttgagaattgatagagatcatctacggtggtcggcatgctagacattgttcggggcgcgatgaggccctatgtttgttcgtcattgtcctgctctctcgcctaggcttttcggaagcttcttctaactttatgaagacattagctcgctcaaggaactcctccatattgctcgttgagatcatcctgatatctttctagaagtcactcaacgacaggatgcctccgagtatggctgtatattatccttcttctgtcaagcatgtgaccttggtggcctcagccatgaaccattaaatgtagtccttcaaggattcatcttttctttgctttatttcgataagatcctcttgttgggcaggtatttatcatgaaccagagaactaaagatagaaccgtcgggagagctcttcccaagaattaaatcttcttggggctagcttgaaataccattgttgggctatttccattagagttgtcaaaaaaattttgaatcgcacatctccaaatatttgtaggagatctttctggatctcaaagtactttaggagtactagagggtcttcttttcccatgtacatcttccaagttggcatcttgaatttgggcaagggcaaggtattgatgtatgccgagaatgatgatcccttagccctatctagctcgagttctgaaggttttggaccaactaggtgttggaaatattttaccaggatctagatttactaccatgtatgtttcactaacatcctaatatgaattctaaaacaatgaaataaacacatataaagtttaggaaaccttacattgggtgcagcggaatataatgactccttccgtttagatctctagcccttgattcctttctgtagcagaacgtaatcaagatctgaacatggatctctttctctccttcttgctgattggattctacacaatcttccatactttgattgagataccgcttgatgtgtgtgggaactcactcattcactcaaggttcgaaattgaagagaagaagagagaagaagagcggcggctaggaggctcaggtttttctccgaaaggaataagatgcaagtcttagtttcctgaagccatcactttctatttatagaaagccatctaggtttaggtt

SEQ ID NO: 309121 - DNA, 1396 bp, Cannabis indica
ctctctctctctctctcttgttcgaagacagatgcgtgaccatgagcaccggtcaatcatctctatctcgtccactctttcttgtaacttctttattatttttttttatttaggaatttatgtatttttgagattttttgtatttcataaatcgttggagatctcgactatttggggatcttaaggccaaacgaaactcctatcttggtatcgaggaggttgaaagcaatgatttttttggaaatccacgatgacgatgatttaaaattgtcggctatactataggccatggtttaaaaccttcgcctatagtataggagacgattttaaacaatgacctatagtctcaactatagctgacggttttaaaccatcaaaaattcttttataccggcatttttccactgttgccaattctacctagtattcgcgatgcttgtataggcgataaatttataaatcatcaagaattctttacaagatggtgtaaaattgtcaagaattttttattttttaatagtcttaggccctgtgtcaaatgtcttgtggacaaggttgatggtcgggcgatgagttccattagtgatagtggcaacataaggttgcatgaggtggttttattggaggggaggccacgagtatgtggttcgtggttgagaggaggattgttgggctatcaacccaagtcccacatcagaagaataggcaagagttactttggatataagtgttctacctactctattagtatgaggcctttggaaaggtgtccaaaaacaaaaccatgagagcttaggcccaatgcggtcaatatcatattaatgtgggagttaaggtgaggtagcagcccgataaagtagaagaacggtccccaaaaatgggataaattatgttggcataaaactgagaaatgtcaacattaaattcccaatgtttggaacaacaagatctaggactccaatactccaagactttgaaactccaatgctctaggacttcgagacttcaagaccccaagactctgggaccaacttgtttcaagaccacgttagtcacccgggctggcttatcgccatgccaagttagtctcagactatcttggtccaagacatgtcaagttagtcttgggccaacttttatgacaccttctcgctgatccagttggtcgtccaagaccttctcgctaacccaataattttgtaagtttggtcgggttaacccatctaactgatcttttcttattttattattgttaattttttggtgcttaaataattagaattgaaaaattacatgtgccgtataaaaattttaaagcttaaaagtggtatagtgcaaagtaatattaaaaacataatataagataaatattaatggaattatttcacaaatacac

SEQ ID NO: 309122 - DNA, 2620 bp, Cannabis indica
tttatttttcacaattaattgtcgacatggtctaattatgtgtatacttttgtacacgtgacacgtgttttttgatacacttaatattattatttaaaaattgttatatctgaaattcggttatattccaaaaactgatacgtgtacaacagaaggaatatgaatcaactctaataatataataatattatattatattaataaatgcatattaaataactcattattattacatagaggtttaatagataaatattcaaaactagttgactatataggcaaaagcaagataagaataataattattaagttgagattaacgagacatatgcctgcttcggaatatacagacaagaagagaatgtttatccactcgagcagaataaaagtaataatataaccgcctcgcattacatatatcgagaagatcacctcactctatatcaagcgagatacaacattccaagtgagcaataatcatctaaagaataagagtaaaaagtggttgagtagttattaaatattaatccacatgtgattaaatgaaacgtggggattgtccacgtttgattaaccattatatttgaatcaaccctaaaaaaggtaactgtcaatctatactccaataaataggggcagattctattagaaaatagacgacaaaattgagagaaaaaatactattatttaaattctgatattgtattctatactcaataaatatccctaataataaggactcgtggagtatgtaaattttaactacaaaaccacgtaaaaatatctggtgttatctgatcatttattacttatgtatatatttctgtagagaatttattacgtaaaggctattttattttggttaacgaaaatttgcattaacagtttggtactttcattgagagccttggtgataaaactcagaaaaatccttccttataaacttgatctaatcacattcaatggctaatgacaatcaaaacgatagaaatccccctgaagatacaactcgtcgccctggaagagcccatgggatcccaaagaccccataccactgaaacatcacgttcgaggaggaacgatggtggtggtgatcaaattcttgaaagaaggaatgaagataccaataattatgccagatatgtgcctaggagtgaggatgcttatgacccaactagatatttaccattggtggagttggggaataggcaacttcgacaatatttagccgaatctaatcgacaaaacgttgagttggagagagaggctgcagtggccagggcggcacagggaataattcctcaaaatcaacctgatcttgtggtgagaagaccacgaggatgacttcgaggctctagaaccaggagacaagaaacaaactaggggaatccttaaaacatccaagaagaacaaccttgggatacaagggatgtcccaatggacaatcaaacaaataatcaagaacaacggcgagatgttcctcaaagttcccagggatttacaaactaagggaatgaccgaactgatgtgccagaggcatctcgtaagaatgaagaagtgagatagccacgactagggaaccagggaatcccttgtggtagtgagagaaaccctaggaatcaaccaagatcaagtgagctacctccgagacacccccaacgttcttctcgagtagagagagaggatgtatatacgtacttgaatagaggacgtgtatctaacctctttcgtaggagaaggccgatacaagatgaagcgagttcaagttcggggcgttcaaggtctcgaggacatagtcgatcaagtaggcagacgcgagaaggatgtagatctcggcgttattatgttgatcaagaaagcatgagcaatacgcaaagttatcaatctgaaagttattcgaagacaaaatctgtgagtaattattagcgaaggcagcctgatcttcgcgaatacttaaattgaagacagccagatttttgtgagcgtctgaatcaaaatgcacctgatttgcaccatcaacttaatcaaatgcaaatcaataacaagtggaccccatccaactgcgaataattgaactagaggataaatttaggaaatatcaagatgcagaacacgataaatttccaggctacgactcaaataaggaaactgagccattccatccagatatcctaaattctaaatttccctagggatttaagaacccacatgtttcgcagtacgatgggaccacagacccagtcgctcacttaaataactttaacactattatgcaagccagcaatgtcatgaataatttgcattgcattttattcccgacctctttaataggagctgcgaccaactggttcgacaaatctactcatcattccataacgtcctgggaacaattgtccaaggactttaaaaagcaattttaagtcgcaagagaccgacgacctgaagcattgtccttaaccaatataaaactacaaccaaacaagtcacttaaggcttatttaagttgctttagcacagccactgcaaaggtcagaaatctgaatgacattatacaactcacgacacttcaggcaggcataacaactgacttatccatggttggaggcaaattatgggatga

SEQ ID NO: 309123 - DNA, 1565 bp, Cannabis indica
aacaagacttgggttgttgtaccgaagctagagaataaaaagattgtgaagtgaaaatggattctcaagttgaaagagagattcaatgagaatgaaccagtgtggttcaaagccaagttaggggctaagggttttactcaggtgaaagtaattgactatatactgaaatcttttcacctgtggtaaaataataaatgataagattgatgttgtccttagcagctcaaatagtttttgaagttgaacaacttgatgttaagactgcttttctgaatgaattcttggaggaagagatcaacatgaggcaaccacctgggtttcaagtggaaggaaaaggatttgagttagtttgcaagctcaataggtccttatatggtttaaaacagtccccaagacaacagaacaaaatatttgatacttgtatgtaacaaatcgagttcaaacgatcaacatatgattactatttatatttcaagaatctcgagtaatctacagctgtgttcttattgctctatgtggatgacatgctcataatgagaaaagaccaatcattgatcaaaagtatcaaagctaagctcaagagagagttgagatgatagagcttggaccagttcaaaagatacttaacattgatgtttcaaggaactagaagggaccatcagcttgaagcagtccgggtacatcaagaaagttattcagaagttcaacatggaagatgcaaagagtacatccactctattaaggggacaatttgttttttcgaaggaatagtgttcgaacagtttgaaggagaaagaggaaatgaaggatgtaccatatgctatggtcttaggatatttaatgtatgtgatggtgagcactagaccggatatagctcacgctctaagcatcctaagccgattcatgtccaatatgagcgttgaacactagaaggccctcaaatggttattaagatactaaaagggtacttagattatggtctggcctatgagaaagtaaaaggacaattgaagttaaaagagttcgtggatgctgactatgcctcgaatagagagaccagaaaattaaccacttcttacattttcttgacaaactagaaatgtatatgctgaaaagcctaattacagtctgtggttaccctttccatcatgaaagtagaatttatggcgactacaaaagcattcaagaaagcgttatggcttcgaggaatttagtttgaattaaagaaaataagaagaggagtgactgtgtactctgatatacaatcatccatccatctttgcaaaaatccattttattatgaaaaaagcaaacatatagacataggactctactggattagagaaaagatagaagaatgacttgttgatttagagaaggtcagaacggaagataatcctaccaatgttgggactaaggtcttaacagtaaaaaagttcaagcattacttggacttcatcagtctcagaagttattaaactgaaattttttgaataccaaccatgatggctgcatactgtcttcatcaccgtcattatttttatttaaagtaactaggtggaatt

SEQ ID NO: 309124 - DNA, 1202 bp, Cannabis indica
gaacctctgaggcggtctttggtctaggccattctttcactgcatcccaagaaactcgtatccatccctggattttccatccaggcttggtagatggaacgtaggccaacaacgttgcatcattcaatattctcagcttctttcccctcgagcgttactttggctgcatcaagttctccttggagtttctggcatgcatcggccttgtcttttgcctccttcttagtagcttcaaactcagcattgtgggtcttcttcaccttctcgatttctttgagtagagaatgttttccaatttagcatcattccattgcttggtcacaacctcgcgatggcctatcacgttctgaatctccctctctatatactttcttttttccatgcctcgccgttgggtgacaaaagagatgaaagatgtctgaaaaccaacaaacaaaaatgcatgagtagtttgaaggatgttaaaaaaaaagaagagtgagcagataagggtaaaggaatttacttagaggctatgagatacactccttgtaagcatctcctctagatccccattattgattaaatcacattcatgggggaggagagccttgaaatgacgccagcaagctgcaccaaactctgcagtgtactccgggccagttttcccaacctcgacaagcagagtttcgagggcttggctcaaggaggcggaagcttgagtctttttgggaatgttctcatcggtacgtgcgggggccgcaggaggggtcaaatcctgagtctcaatttcagggacctcaagattagcagtctgggaggctcgcttcttgttagtagtattcttcttaggcctttttgggaactccactttgacatctgctggagcctcgagattgtcaacctcttctttccctttttgtgaaagagaccctcgagattcatttatgcgagagaagataaagtgttagcatttattgaaaaacaagtaaaagggaaaattggggaataatttcttgcccaaggaatttaccatagtcctaagaagacgaagaggaaggactataatatccactaaaatccctacatctcgtgatcctaaatatatcataagaactaagtggttctaaatcccagctcgcatctaagtgttggaaattattttaccgagatcttagatctactcacaagtatgtttattaacatcctaaataagaactttc

SEQ ID NO: 309125 - DNA, 1320 bp, Cannabis indica
agagagagtgtttgagttatgagggggtatttttgagattttgaaaaaagtgtcatattttttatagtgtaaaatgtattagttttaaaaaaaaaaaaattaagttttgtaagtatagaaaatcaaatttcccatagataatcatatataaagagtatcaatcaaatataatcatcgttcacaatatttcaaaaaaaaaaaaagacaaaaaatgacaatcaattaacataatcacaaataaatataaacatattatatatacaaatgactaataaaagtttataaaaagttataagtaaaaatataacaaatgttacgtgcttttttattattattattttataaaattattactttaaataatatatatcatagatttttaaattgtaaattctattatagatttttaagttaaacttttcagtattaacctttaactttaaggtaaaaataataaaaaattgttaaataaatgattttcattagatagtcaaaaaaatatatgttaaatggtgatgatttttatggtatagttcctttaaatataaaagtctctaaaagttgttattattatggaaagttagaagtcatccaaaagggcgtttccgaaagtctaacttgtccatccagaaggagtctcgtgaagtgataaatgttgtctagaagggagtttccagaagtctatcttgtccactccggaatgagtatccaaggaaagctagttttcttccgaaaaggagttccagatggctagttgttccctcctcaaagagaatttcagatagtcgacttcagctgtcgtcttttctattgagaaagtcccttcagtgtacgctctggtcttcctttcagggagcgtacgtctcatttggaagcacttttacttgagttgacgtggagattctgttatgaggagtttgttaaatttgttatgtcgtaactaacttaacaacttagcttttacaaccaccgactttgggatccatatcccttatttataaataccacaaacacttatcatttatggggagtgatgaacagacaagttttgagagttgatttcgaatagagaaagattgagagttagagaaagagagatgtacagagaaaagagagagactgtatttagattttgtatgaaaaaaattttgtagatgaagaagatttttaggtaagagtgtgagataaacactttcagaggattcaatagataattgatctcgactgtaatgtaccctattcttactcaatcaataaagaagattcagtggtgttccagaactagaatagagccatagatcacatcgatctataggactt

SEQ ID NO: 309126 - DNA, 3205 bp, Cannabis indica
ggaaggaagatccactatctcacatccattacttcaaagtgcagacctatctgcagggagtaagagacgatgtcaggtgcagatccggtggatgcttttggtatccaattctcttcttcctgacaacgccaaattgagcccaacgatttggtggatgtcaagcaacaggaagatgagccccttaaggactatatacaactgttcttagaggcagttgctaagacaaaaaggcttagtgaggatgcaagggtaatggaacttgtatccaagctcaaagagatgattcatctatggtgcgaccttcatctcaaagcagtttacaccatgaatgactttcttgatagagtggatgactttatcaagctagaagaagctgtcacttgagcaaagggctcaaaatgcaacaagaagaagtcaccaagttcttcatcccctgacactaaagcgcagagtaaagagaagaaaggaggttaggatggagggaaaagagccaacaatggtgggaaacaaggcaacttccctggtggaaagaaagccaaaactaggggcagatccttgcgagagtatgagcctcgtttcaccactgtctccatcctcttagccccaagagagaagatctatacaaccacatagtgaatagtgtcgtatcgcaaacctcttcccttcaaagagttatggaagaaggacacgaacaaattctgttgctatcacaacaattacgatcacgatacaaatgagtgtaatcagttgcaagaggagatagaatttctcataagatagaaacatgctgctcttcaactgtatgtatgacttgaggcttcagctgggggcaatgtgaatctatagtatgcgccagttgcaggtaggctcaagattgtgattggatgccctcatctagctagtactcaaggaaggccttagataggtatgaaaggtctttgtgacatgagccaagaaccaaagtactggaggttactgaacatcatccaaaggctcaacgttacgagtgtgttcccatgacatttggagactcaatattctatcatgtcagctaccctcacaacgatccctttgttattgaggtgcatatagacaacatgatggtggcaagggtaatgattgatgatggagcatcctcggacatcttattcaaaaaaccctaatctaggtggatttgtcacttgaagacttgaagccatgcgaacaactaatgtatagtttcagcggagccaacatagctctatgtggcaagatcagactaccactcacagtcggcactgccccaaggtagactgccatcattcccaagttcatagtggtggatgtgaagtcgctgtgtaacgtcatgcttggaaagccaaccttgtacgacctacgagccatctcatcaatatataatttttccattgaattcctaacagcgactagtattggttgtctccttagcaattaagaaacttcctgtgagtgctataacatttcgttatcactcaccaagaagacctcctctgctgctttggcaccagggggacaaacaaggcctctcccacgaaagctaaagagattacgaagacctctaaagttcaaaatacagagaagatggaggcaacacctaataccacttgaagttgcatccaagacgaggacaacattgaccctcattttggggaaattgactcaggagttggtctgaccgaggaacttaaaaatttcccctcaacacaatggacccgaccaaggttgtcaagattggaaaaaacctaatggaggttttgagcaagatgctcatcgcttgccttgggggaaatcaagaaatttttgcctggtcacatgaggacatgatcaggatcaaccccaaggttatctctcatgccctcaacatagaaaaagtcaacttccaacctataaagcaaaaatgcaagctccttgacaaagagcgttccaaagccctcaaggaagaagttgaaagactatgggagaacaacttcattagggaagctttctatccagtttgggtatccaaccctgttttggtgcctaaactgaatggtaagtggagaacttgcatacccaaagattatttccctctaccacgaattgatcaactggtggatgcgacatctggctgtgaactcctcacattcatggatgcctattccggccacaaccaaatcaacatgcatgcactagatgaagagcatactagtttttgaactgacatcacactttatttctacaaagtaatgcccttcagactcaagaatacaggttctacttatcaaatactagtcaaccatatgttttaggcttaatggagaacaatatggaattctacgttgatgacatgctggtcaagtcaaagaaatttaaagaacacatcaaagatttagaggaatgcttcaacatcctgtgggaatattgaatgaagctcaatcctctgaaatgtgcctttggcgtccaatcaagaaaatttcttagattcatttcaactcaagagggtttaaagcaaagaatcaatgctttctcttaagccaacaacctgatcttctacagcaacaactcgctcctttgcatttgagagcttttcagcaagctcaaccaccttcttgtgttcattatccatagtataagcattaacaacacaagcttgaaaacaagaagacaaagtcaggagatgacaagcaaaaaaaagctggttcaaaacaagagaagaagagttattaccctgaagatgtcggtgaagcatctttgggcgatgacatccagaggtttggagctaaccaacttctacagggggatattctcagccttggctccaatcaaggcatcaccattggcaagaaccgaagagccatatgcacgcagctgctccaccaactctgaacccgagttcagaatatcactattagccttgtttggggaaatctcaatgggagattctgcatcaactctaccaactttggaattctcattataaggatcttgagtagggagaacaacttttgtaggtctactcttcttcctaagctccttcctcataagagtagaggaagctgtaggaataccttgaacaacttccttgaccagaggttcaacttccttgggcactcgtgtcttcatcttcaaataggatgccacggcggccgagaaactcatattgtctagaaagaagaaaatacaagtggttagtgttgggttttatgcc

SEQ ID NO: 309127 - DNA, 625 bp, Cannabis indica
attttcagtaacactacttttattttctgtttttaaaattgaaaaataaaagttgttacagaacgcattttgtttttcaaaaataaattttttaaaaacaaaaattttactttcattttgtgattaaaaaattaaaaaacaaaagtgttaccaaacaacacctatattttttacaaaacactcacatctctaatcacaatccgtatttgaactaattattggcattaattaatttcttattcggcaaataatgatgttagttaatgaaaatcagctccctaatttgttcaattgcataatataatatctgctaagttttttcataaaataaaaaaagaaagaaaaaagtagttagtagtctgatctcatttgctgacgtgtacattccgaatccaatgtgtgtggatcgaaagccaaaaaagcatgaaactgattcgaatcagtgtcagatcaccgtaaaactaactccctaccgagggtattatcgtaatttagctcaccaacttcccaccggagcatttaaatgcagataataataataataacaataataataataataggagaaaagataaaacacttttggacttttggaaagccacaatgtaattggatttgtgtgtaa

SEQ ID NO: 309128 - DNA, 1800 bp, Cannabis indica
atatatgtatatatataacaaaatatataattaacaatatatttgagttcgaaaccgcttggaaattaaaacgtgagaagataaaactagtctaatatatattaatctttagtgcgtagtgccgatcatgataactaaatgaaaatggatcgatcaccaaaagaattatatatatccatgtatgcttatttatacatccgaagttacagctagctagctcctttgacaattaagtaataacgaaatttccatttgccattcgtagtctttgtatgtatgtatatatacatataggtaaattggacgtttcgttaaattatctaaatgttttgtaataatattgttagtacaaatatgaaaatgtatatatgtgattagaactagtttatatatagacatgcatgtacaaattaattaaagaaaaatgtatacaataataagttcagtagttaaaatattaatgtagttttaatttgcaacgaagataaacttattaatattttaagtatatataggtataaataagtattgacagagagaaacattatcattaatatattgatatcaacatatgatattttcttgtcttttatttccttaacagtaccatattaactaacaagatatacatagagaacttgaaatattagaattacaaatatcccaagtataatctttgcgcagtattagggtagtattaattccattgactgaatcaagctagtatattgctattagttaaaaaaacaaaagtagtactattgctataatttgatatatatagcctaactaagctagctattattaataaggctatgtatcaaatatatataatcagatagtactgcaccctaatcttgtacaagatgctttatatgtattgatatatatagtttgcaataaatagatagatcttgacttatgatgactcaagtttatttgctaatttttctgggtgcatgattaatatatgtattaactttattccaagaatatatataaattttcctataaaattatatagaattgattctctctgaacacaagaatatacataacactaacaatttatataaaaagggaattgaaagatcgagctcatgaagaagcaatatatataaaggcgcgtaacttagattattttggcaggccaacataaaaaattgacacgagatatatcatatataattagagagagaaaaagattacatgtataattaattagggttaaattaatccaaacaagccagaagtataataattactaaggaaaataatttagatctacatatatatatatatatatatatattaagaagaaaccagaaataggaaaacaattcgccggaggagatagtctggataaaacagaataatacaaagaaacaataattaataaataataaagctcaaatcttctgattcacgtatatatataaagcatattaatttgctaatttaatttaatttctccttcttccttttagaatattattaatagagaaagccaaataaaagttgaaagaaggaacttataagaacataagtgtatgaaaaaaattcaatatattatatatatataaaatttttaacattagtacaaagagttacatagagatataaaaatatatatatatatgtgtgtaaaacatatataaaatggattgtaattacgaaattaaagaagaaggtaaagaaagttataattctaaagctagaattaatgcctggctccattctgtctgccttctacttctaaaaacaaggaatagatcagtagttgtgagtagtagtttttga

SEQ ID NO: 309129 - DNA, 1662 bp, Cannabis indica
acaagaccataaatagcatatgccattaacaaggtttctcaattcatgcataatccactcgaacctcatctgaaagtggtaaagaacattttgaggtgtcttaagggtactttagacaatggattacatctaaaaccttgctcaaaactggttctcataggcttttgtgacgcggattgagcatccgaccctgatgatcgaaggtctacatcatgtttttgtatttatttagggtccaatctcatcttttggagatctacaaagcaaaagacagtgtctagatccagcactgaagctgatataggagccttgccaatactactgctgaaatggtttggcttcaatccttacttacagaagttggtctttctcaattacttgttcccacaatttggtgtgataatcaaaccactgtacagtactaatatctgccaatcatgtgcttcactccagaaccaagcacattgagtttgatttatactttgtgtgtgaaatcactagctttatgtcaagcatactcctgctcaagatcaaattgcagataccctcactaaagctctatctacttctcgttttacatacttaagagacaaactgagtttggtctctttgtcccagctcaatttgcgcggaggtgttaagtagacagttagctaactcatgttagttaagaaatttgttatgtgtcgttgtattcttttactgttttcagttgtagttagttaaagttatttcattcaatattcaataacaagtttcttcttactctctctcaatattcaacaatacaccccaaacagtaactcacaatatatataaggttgtaggaatggcaatttgggccattttcgcaggccgggccgggccccgactcgacaggtcgattttggcccgattatattaggttattatcgagcttcaagcccggccgggcccagcccgatatatattatttcgggtcgggcccattttagatttttttttaagacctaaatcccttaataaagaaccattcccaaattctacagacctaaatcgactcttccgttttctatccagtttttctcccgttttctatctctccaatctctgttccatcgaaaatcttgttcgttgatgattttggttatatatcttgatgggcatctgggaatgtagttgaagctctcaaaatccaaaggcttttctgcaagggggtgttggtttctgctggcaagaagagaagataaagatttaaggtattaattaaatttctggtttttataacgttataattgaatcctctggtgaaaatccaagctctggcatcagtacttttgactcaaccttgtccaagtcaacagcctgtacagtactatcatctatcatctatcttaattgcatctttgctaatattcttttacttttttgtttgttttttctaaattgtttgataatggaaagtgatctctcctatatataacacgatatctatgtatatataatgtgtgaacttaatgggatcccagttttaatgtcttattcattaattcattagttttcaaaatatatgtatgtatactattaacattaaaatcaagggaaacaaagaatttgtggttgaaaatttatagctattataattgaatttcacatttcaatatatagtactattttttaaaa

SEQ ID NO: 309130 - DNA, 789 bp, Cannabis indica
tgtaaaatttgttattttactatcaatttgagattttttttagtaaataattattgtaagaaaaaggcttttattttgaagctcgcccaaggcctctaaacggctagagacggccctggtgccaagaccatgtgactactcacaagaccaacagagattactgcttaaaactaaatgacagctaaagagaagaaatactaaagacagagatcctctggctagttgaaaatttgtctatttgtagttatatatcatactatagaagaatggaaaacgacttatttttatcgttttccatttttttttttttatcttttatgttttaattttatttatatatatatttaaatgatttttgtacctgctttggcactcaatgtcatactgatgtggtacccaataattagttagcaatttttttttcttttgtgttttttttttatattttttatgaatgatttttgtacttttatttgaaaatatttttcgtactattattgttacgtgacaccttaaggtgctcaataccatattgatgtgatacacaataattgattagtagttttctaaagtctttatttaattaaaacttgtgggaagtaatattgaattgcaccaataacagtatgctaccttttgtggtgtttggcactttaatgtgccccttaatatttttattattaatatgtacatatcttaattagtttcgattgtgtttttctttttcttttttagttttttatgaatgatttttgtaatattattttttagtaaataattttttgtact

SEQ ID NO: 309131 - DNA, 1821 bp, Cannabis indica
tggtaaaatatttccaacactgttatgttagataatactaagttttgttccttttattcaaaattaagaagaaaaaaatcaagaaacaccatttctctctccaaactctctctcttctctcaagttccctagaaatcagcaagaggttagggttttcttcaacaattcagagcaattctaaaatcattgttgaggttctaatcctaggtaagcttcctaactcatccttttgtgatttcttaagtttgaagatagcttttcttccatgtttttgttaattagggttctctggtttaaagagttgtttgatttcgtgttcaaatgatatattgaggttatttgagctgttctaagttgttcttgttggttgttatggtgattgagcaaggtttgagtttatgaactcaagctttactctctaatggtggattttgattgtgaatatgtttggttgttttattgcatggattatatctattatggtgtaattaggtactctggaaggtttggtagattttggggtcgatttgtggttgttgttggggttttttgtgtctggttcggtgggacctgtatgaatcagaattctggttggtcccctggaaccctaccgaactaattttttgattggggaactggtctgctggttgaggtagttttaagaaccctagttttttccctttttgtgatatttaaggtatttccatgttatccatcgatagggaaacttttggttttgattttaagtcccagaaaagtgatttagcgtatcactcatcatttttccaaataatgtgatttaggggcctgtaaatcgtcgagcagttattccactcaagttggccggcacacttaaatttggaagtgaggtgagattagtataatgatatgcatatgtgattacatgtttagagtgtatgtttatgaatgcctgttagataacaaattataataacaatattagtgtacatataattacactgaacatcgacactatatgtttggctaagtatatactgattgacgctatcacatcagtacgactagagtatgactagcatatcgagtataggctgatattatggtcaatagtactatcatacaaacgttctatactcaataccgtgttggacacggggatagggttatggttgggtgtatgggcacctgattataatccgggatatagttatgttattgattatgcttttctgagtgagtctggcgactcacatatattgtttacatgtgtaggtaagggcagggctaaggttgagaagccgtgagatcgagcggatcaagattgtacatgtcagggtgattaggcctggagcgtacggtctttgggatagctggacatattttgtatagtcgctaggcgataacttttgtatctagtacttgaaacagttgcaaatattttgtacacgagatcttggttatatatatatatgatattttaatatttattatctaaataaagttttaattaatcacgaatttcaataaactcgttgattagcaacgagttgcatatagtttaaataacggtaatacacctaaactagtaaggtattgttgggattttatgccctaaataaaacccatttcaatctaatctgatttgttatcaataaaagattagaagtcatttatgtttacatgttgttttcatgtttatggtttaacatatacaaaatctattaagtccagaacatatagtcatttacaattacattgatgttggaatgtgattgtgattataggcttcaaaagacaaagtccttgtttcatcagtgcattggatttacactaatgtga

SEQ ID NO: 309132 - DNA, 871 bp, Cannabis indica
ttttttcttctctcttcgtaactccctctcttcccgaaactactctcacataaccacgatttctctctctcccaaaaccacttctctctgtaactcctctccccaccaccataaatacaccattttaattctcacacattttaaaccccattttattttattttctaaaatcaaaaaaattaacccatttttttaaaccaaatccctaatcccttcctcctatacctctctcttctccccctaaaacctccatagttgccactttctttctgaccagaaccctctacttattattcccttttcatctgaacccaaaaacttatccaccttcatctcttcgttgcatataaactgaccatcatttctaccttctctctttttccgacctacttgagctcgatttcatcccatcagcacaactagttcatctcctctaaaccaggggcacgacccactgcaagtttcagatctgaaagatcttcatgaaaggagcccactttcgaaactgacttggtccgctaagacagtgatggacaaaggggacctaagggtattgaggtttaaatagtcaaggaggcccgcattggtctctattttggtcgagtgtcactggaggtggctcatcggtgttgagccgagaccgatgaaggagaaagagaaagatcaaagatagcatgtcggggtttttgggtcttcgtcgggttcgtacggcggtggtgctgtattgcaatggtggtactgggttacggtggtggtgagttgcggtgggtagtggtggtggttaggtttgtaaatgaagaagagaaatgtagagagggagagagagagagagagagagagaggaggagagagaggaggagagagagagaga

SEQ ID NO: 309133 - DNA, 1554 bp, Cannabis indica
tctctctcgctctgtccctctcctccactctctcatggcagcacaaaggtaagcaacattctcttatttatcatttaaatttctattagccatgatttggtttgttgatcttgatctgtgcgtgtgcgtatgcaaaagaattctgaagcttacaatccgaagaaagtttcgaggatcgtcaagtgatcgcaatccgaagcttgtaaaagaaagttcgaggaagatgaagatgagcacaatgacggtagaggaggatgaagcttgtgaaggttttggagtggctacgacatatgcgagtagtggtttcgaggaggatgaagacgatgattttctttggggggaatccactatagcgacagtttaaaatcgtcggctatactatagccgatggttttaaaccgtggcctatagtatcgactatagccgacggttttaaaccgtcaaaaattcttttccccgatatttttctaccattgcctattctacctagtatttgcgacggtcgtataagcgatgattttatagatcgtcgggaattttttacccgacagtgtaaaactgtcaggaattctggggttgttagtggtggaattaaaaattcaaacatgaaacaaacataacaatcatagtaaagaacatacacaataatacagaaagttgaagagaacaaacacagagattttccaaaggttcaccctaaatcatagagttacatcctcgttgagcccgccatagaaattggtatgctcttgcactataatcaatattagattacaacaatggtgtggaaattccaagtcacaatctgactggcaatttcagcatctcactctttctctttcaatctttctttacaaaattgttccccaccttccccctcttactctcttctattttctctcttgaattacttctctctagctctgttggctcaattcttgctcaggatgcgtcgatctaatttgagttgagaaggcaactatttgtagtagccttggtagtttaataagtcggttaagttggttaggacagttgaattgcaatctagatgtaactaacttagattgagatgagtctagttatatgtccacgtgttcaatgagtttgtaaggatatttaatcaaataatattctcctaaatctccttaaaagcttattgtcatagtgcaagtctattcaatatgtgtcatctcttttagcaatggtttatcctccattgcttatgcctaatagttccaaggaatgcttgaactttgttaggttcaaaatttttgttacctaaccagatttcctttggtgttttgagatcaatagcacttgataggcatctgttgacaaggtatgcagttgttagtatatcttctccccaaaatcctttcgataatccagcttgcatcaagaggcatctgactttgtccattaatgtactattcatcctctctacaactacattttgttgggtgtcaacctagcagttatgtgccaattgattcccatctttgcacaatacttgttaaattcatcattgcaaaactccaagccattgtcagttct

SEQ ID NO: 309134 - DNA, 2058 bp, Cannabis indica
aagatatttacgaaaatgtcactgcatacaaactaagcatcatcatgctaccaacatgcaccacaacatgcgccaccacttgaccaccacttggtcaacttttaggcatcacttagcttgtaacgtgccatcttagctgcacgttacacttagcatgtcaagtgagaaatgattattatcatttgtcactcgattatgatcgaggtaaagatacagtaattaccattattgagaatgagtaattactcacataggtttcttacttatcggtcgcttaattagacaacgatagtgacatataaagctcgttggtaacgagaggtaagaatactttatgaggcatcaaagtcagtttatcttataagacaaaaaattgcttatctaatacttgattatgaattgaatatatgtttataatgagtgatgcatttgtatgttatgcattgttataatatggcattttatacgatgtttgtattttatttgcttttcttgctgagtctttgtgactcacgggtgcttcgtggtgcaggtaaagggatgaaaaaattagaccagccatgagttagaggtctcctgacaatgtacatatcaaccaccaagtcttggctctcagtggatcggatccatcttttggttgtattttgaaaatgtaaccctattttgaatgaaaagttaagtttaatttaaataaattttactataagttttaattaaatcacacttttcataaaccgttagtttattactataaactaatttataaaagtacacatgtggcacccttacggatcaggacgttacattagtagattcaaaataggttgtcctgaggaaatcagagtcataaaagagtttttggatgtatttctcaaataattaactggtttaccaccacagtgggaaatagattttattattaatttggcacctagaacggagccagtctctaaggtaccctataggatagcttaagcaaaacttaaaaaaaaaaataaagttataattccaagggatacttgatcttgagtttacccgacctagtgtatcaacttggggagcttcgactctgtttgttaagaagaaagatggagcccttagaatgtgtattgactatcgagagttaaacgaattgatgatccagaacaagtatccactacctagaattgacaatttatttgatcaactttaaggaaagacaatcttttttaagattgaacttcactagggttatcatcagttgagaatctgagaggaagatattttgaaggctacatttcccactagatatggtcactatgaatttttagttatgtcatttggactaaccaatgcttaggcagatttcatagatctcagaaattgggtattcgaggatttcatcgatatttttatcatagtattttatcaatgatattcttgtatattctcagtcagaagcaaagcatgaacaatacctaagaatggttttgtagtgactaagggagcataagctttatgctaagttcaaaaaatgcgagtttttattatcacaagtgtctaatctgggtcacattgctagtaaagatagaattatggtggatctagaaaagattgaattggttagggatttgtaaatataaggagggcaaattgttaatattgattatatctatcgactattattaataaactcactaatataattttataataactaagagcgtaattctatatttatagtagagtaatttattggaacttagtgttatatgtatacggtctctaagttgcctctataccacactgtcaagggtatgaatgttacaaaataaaagagggacgagaatttattttacaagtgcaaaatattaattacttattttataataaataattattattaaataaattaagggaaaatatctttttttggacaagacaagatggagtcactttgtctgttaggacaaggtggtgcgctgcaagtgtcctattcgaacaataggtagtgatacctacactgtcttgttatgattttatgccctaaataaaactcattttaatataatttgattt

SEQ ID NO: 309135 - DNA, 794 bp, Cannabis indica
gctagatttgtagcaagattttgtacaattaattatttcatccttagtggtggaaggttggaaacagtgtacaagcaactattatttaataagaataaaaaataaccaaatccttaaactataaccaaaatatagaaagttttctttttcattttttaataaacaatgcgagcgaatagtgcatgcatggatggcgtatattttaaatttttgggcaaaaaatatcttgcaaataaaatatgaagcctaaaagagtaatatatactcaattttttcatcttcattatgattggagcagcaaatatataatactataattttgaaattaaaaaaataattatgtctcataatgtgaacaatgtttttcttattttttaaaattattattctaagaatattatactttttaatagaaagaaagaaaaaaaaatggtggtagtccaaaaagaagaaaatgacacaacaataagatattaatatttaatatcaataatgcatgtttaattagttagtgccaatatatctagcgacgttagttaaaaactgatattgaataaaatatgctagattgaagattttctactcaaaaaaaaaaaaaaaaaaacgctgtacaaaggtaattgaataaatagtaaataaagatttagaatttgttcggtacattgtattaaattccattatattaaattaaattagggaaaattttagtattatacctataatataatcaattaacagaaataaccttaattaaaaaatagcaccctaataacgtgacacgtaggcttctccta

SEQ ID NO: 309136 - DNA, 1466 bp, Cannabis indica
ttttttaacgacggtccccgaaaaaaatcgttttcaggagagtcacgaattctgatatttgtagtagtgatcaaagccaatcaaggttagattagtgcttggaggtgtatgtaacccatgatgcattgtacctttgaggtacctgagtattcttttggctgctccccagtgcacatcaataggttgtttgaggaattgaattagtttattgaaagcaaataatatgtcaagcctagtgtgacttactggagtgctcctatgatactcctgtagatagttggttctctaagtggtgttccatctattatggataaaggctttcttgctgtaattggggtcacacttggtttggtattttccatttttattctttggagaagttcaactatatatttgctctgggacaaatatacatccagtcctttggaaagaaagtcttgttgagtttcgagatgaaggtgttgacttgccatgagcatgtaacaacaatattgttaacatagacaagtgccatgataacaaatgttgggtgtttaagtataaagaaagatgagtcagctttattgttagaggtactattggacactttctaattctttagcattagaagctcaaattgcaccagatttttttagatttctttcttgaatttttttcatggtgctctagctagcgacaaaacactacaaataacagttacttttaatgacagttttttagtcacaacataaattttttgtgactaaatgtgattttcggtcacaacaaagaactacttgtgactaaaatatagtatttagacacaagttgtcactaatttacttttagtcacaacaagtattgtgactaaagcaacatttagtcacaacaaattgtaattattatgactaatacatttagccacggaccttttggtctcaacataggaatgctaattaataattagtcacaacttttttacttttagtcacaagtattttttttttttgaataaaacttagcaacttttattaattaactaggaatcgttaataacaatagaacgcacttcgttggaacaattctccaactgaagcacacgacctgtagagaaacaagaatccctggctaaaacatgagccaacttgtttgcaaatcgtttgacaaaacacaactcaacaatatttaaggataagagaagagtacgaatatcatgaactaaacgaccaaaagaggatgaaaaaaatttttggctttgcacggcttgaacacaaactaagttatcagtttccaaaatcacttgtccccacgaatgacggtcaatccagcttaaagcttctttgatatttcaggttgcacccgccccacctttcctatcatgtaagcttctaccaaattaccgctggaatctcgagccacacaacaaaaacaaaaccggccttctcgctcaaacaaagcgccatcaacattaactttgatcttattta

SEQ ID NO: 309137 - DNA, 818 bp, Cannabis indica
atttcttagtttatgtcgtttatcaaataatgccttaatttatgtcgttttctgagaaaattgtcgttttttataaatattgtcgttttggttttccgtgtttaaatgaatatgtcgtttaagaagtgtcgttttttgaagataatgctagtttgtttcgttttcttggaaatttgtcgttttttttgaataatgtcgtttctagaaatgatttcttactttatgtcgttttctctgaaacctgtcgtttaatgaataatgtcgttaatcggaaatcatgtcttaatttaatgtcgttttctagaaaagatgtaatttctctaaaacattgtcgcttccgttaaaaaatgtcgttttatttaaaacatgtcgtttatccgaaaaaagtcatttctccgaaatggtgtcgttttaatgaaaagatgtcgttttctgaataatgtcatttttacgaaaaattatcgttttccgaaaacatgttatttctccgaaatgatgtcgttttctttaaaaaatgtcgtttattacgaaaaattgtcgttttcttgaaaaactgtcgtttttttataaacctgtaatatatcagttaaactttattgtaagcaaagaaactctaagaggagaaacgaacaattaaattaaagggcaaaataacaacaacgaggaaacaaggaaagagttttcatacaattatagatggcaaaaacatatatacactctttatgaaagtaggtagagaggagagaggagagaggagtgtatataagttataggagtttgtattgggaaaactacaagaaacctctgcctacttatat

SEQ ID NO: 309138 - DNA, 1697 bp, Cannabis indica
cccttaccaattttgagtttcctggctaggatattttcgtcaatttccacttcttcaagttattccactagccttacatttgtgtttgtttcctcaagtcggggatccatgtcttcgtccctgccttgggcaacttcctattgagcaatgctttttcccttgcctaaactctggccataggtattttccttcttgaccatagttagagcaaggttgtagcattcccatgcaactttttgattttctttgagacatcccaccccaatccttgttgggaacttgacgcacaagtggaaaactgatgtaatagcttttaagacatatagggtcgatcgacctaacatgacattaaaagctgaagggacatcaattatcaggaattgtgccatcacagttatggtcctcggagcttgtccaacattgaggggcatgcgtatttgtcccaaaggtgcaacgtttgggccggtgaaactgtatacgagctaagtgtaggggatcagatctttgagttggagtctcatcttctcataagttgttttaaacagaatgtttaaagaagctccatggtctatcatagtccatgctagtgtcttatttggaatttgcacttccaccactaagggatagttctggaagaaatggacgtggctggcatctgcttcagtgaatgttattattggctcccatacctgtagtatttttttgttttctctcttccacgactaagactatttaattttttccgtactgtagggcacgggcatacttttctcgagctttgcacgagtctccagtagggtgcggaccctcaataatgacctataagtgctcgtccaatggtggaggcatcaatttgttctgattattatctgattgggcggccctttggttctggtcggtcttaacatacttctacaaatgcagtttattctttctgatcaaaaactcaatttcccacttcagattattacagtcgtttttctcatggctgtagcccacatgaaaatggcagaacttggatgtatctctcttacttacatcctttttcataggagagggttttctgtacgacaccatagactaagttgccgcatagattgtctctaggttgtctatcagaattgtgaagacagtaaattttgaggcattttccctgggtgctgtttggcattaccaatgaattttccattctttcattaccctaccttttgccattgttagacctcttcccatttaaatttgcgttgttggggtattgtggattttgaatggatgttcggacagaggtgacacgttgcttgcttttgttttgttcgacagtatccaccttccaaatagcctcctcgagcttaataaacctatctgcgtgatttaaaaattcagccattgaccccacagtcagccttttgatgtccttccacaactctccaagtggctcatgtctctagtattacatccagtctgccttcctcagttagccccttaacttttgtagcctcgatcataaacctgctaatataggctttgacgggttctcctggcatttgttttactttaactaggtcttcaaggtgcgaaggaagttgacgagatgaggcaaaatgcgcattgaattctgatgagaaggcattccatgagttaaaccttcttcgaggcaacttgaaataccattgctgggcagcctctgtgagtgtggc

SEQ ID NO: 309139 - DNA, 729 bp, Cannabis indica
gaacccattaaaggtttcttatgctcctcattttgaaaccctctctgataccaaggaaaaactggaatgtaggaggagggaagttttagcaagaccgaattgtaagtgtttatttttgtgtgtgtgtgtgtgttcaaaagcattttcttttgaactttcttgatcatgttatgtaatttttctgatattagctggaagatccaaagattctactattagaaataggggttcttggaatgagaaattatcggaagcaagtccttcacaggccagtcttcccgaaagggtaaacactggtcaaaggtaatgagcaatcaagttttgacattttaacaacatcaagcaattgtaattgaagctccttttgtttgttgtatgtgatgggtttatttcttctataggaacaatggaaaacgagaacttatttctcatgttaataatgcaccaatcgcaagggtttcctctgacaaggtttgtttcttattttaaaggaatatattgagttttttttgttttccaagtcatactcaaaatacctgaactcagtgaatcttgttgtgtttgtgaacattgaacatgatgcaaaagaaagaatgataaacaagtaatgtttacattttgttgaatacttgcacaatgttggtataaaaaataatctgcatatgcatgtagataaaaaagtcatattctcatagttattgaaaataaacgtcaaatcaaatactgttt

SEQ ID NO: 309140 - DNA, 652 bp, Cannabis indica
gcgacgatttttaaccgtcgcctgtgttgcccattttgcgacggccgtataggcgacggttatagaaaccgaccggaatactttaaacgactgtttaaaaacgtcgaaaaaaatcatttttgtagtagtgaatgccccctctagatgtatccatcaagcgcatccacaagggtttcaatttcttcctcccacgaaggtaggaggccttcctgtatccagaccagccccgtcctggaggtgcatccactgggcttcagatgggcttggttccatccttccatatgggttgtatctgttcttttggtcggcagtgcttttgggctaagctatagatctcaaattggaagtgccacacgccacccttccgaaaacactgataacacctattatagtaaatttcattttacacaagatgcaggccgaccttgagttgaaatgggcctaggcaaaaaaaaattgggctctttctataaagataaatagttttttttaaaaaattattaaaaaatatgtatattttttaaatgatatttttttatttgggctcctaaaatggatgagtcttatctattcctagagctgaacctgacaagatgtgaatgctctacggtacgtgattactaagttttatcttggttatgatctgttattt

SEQ ID NO: 309141 - DNA, 2327 bp, Cannabis indica
tctaggaagatctatagtgtcagatggataatcatcaatagaggaactggtaatatcaacagatggtaaaacaacagtagtgaaaggatcaatgttaccacgatcttcatttagcttcaagaaaggaaaaatgttctcatgaaagacaacatttcttgataaaaaaatttgtctagtgttgagatcgtacaacttatatccttttactccttgaggatagcctagaaaaacacaagcttttgctctaggagcaaatttagtcctatttgcagtaagagtagaagcaaaagcaagacatccaaaggttctaaaatgagcataatcaggttgtttttcaaatagaatttcatatggagatttattaccaagattgggagagggagtgcgattaatgaggtatgcagatgtcatgacacattcagaccagaatttaagtggtgtgtgtgcttggaagcaaagtgcacgggcaacattcaataaatgttggtgtttcctttcagcaatagcattttgctcaggggtttcaacacatgtaaaatcatgcataattccatattttaagaaaagatttttgaacacaagttcggagcattgtcagaacgaaatttctttactttacccttgaattgagtctcaacataagctaaaaattgaggtatgatctcatgaacatcagatttttgttttaagagataaatccaagtgaatctagatcgatcatcaacaatggtgagaaaaaatctaaaacccgaatgtgattgcacatgatagggtccccatatatcacaatgaattaaatcaaaagcattatcagcaaaagtgatattatttttaaagggaagttttctttgtttagccataggacatatgtaacaaggagtatctttatgaagattagaagtgttacaatttattttgctatctaaaagtttgagacatttatttgaaggatgcccaagtcttgaatgccaaacttcagctttgacagcaagaataggagaagcatgaggtttggaatccaaaatgtatagaccattcttggattcacctttgccaatcttcttcttgttggcattgtcctgtatcaaaaaatgattagaaaagaattgaacatatatattgctgtcattcacaaggcagctaacagaaatgatattgtacttgaattttggaacataaagaacatcattgaggattaaattatttgatatgacaatggtgccactttgattaactgtgatattttcattgttgggcaaataaagtctggtaggattaacataacatatgcattgaaataatcttttatcatagcatatgtgtcgggtagccccagaatcgattatccaagaatcttttaaatgtgtattggatatacttgaaagaatgatacctgggttacctatattgttaccagtttcattgttggtggtattcgaagtctgaatagccaaaaggttcagcagctgctgatattgcgctgctgtcaactgtggcagtatagcttgcccttcattcccagcagtagtgtcattgttggtctgaacttgattggcagaagcatcctttcctttgtcatttttgtgaaaaccaggagggtaaccatggatcttgtaacatttctcgatagtatgtccaagaatgttgcaatgagtgcaaaatggacgatttcttttgggagggtgagccttattgccttgagaattcggtttattactgcttttgtctccttgaaaggcaaatgccatattcgaatttagatcggctgtagcattgttgttacttttctggttttcttcttgagttaccaaatggaaaactctattaacttctggcaatggatccataataagaacattgcttcggacctgagaaaaagaatctgaaagtcccattaaaaaggacattatgtactccatgtggtggtgttcttggagctttttaacaccaccgcatgtacacccattgcaaacacagttgggcctatagttagacaattgttcccaaacggttttgagcctagtaaagtacatgctaacactttggttttcttgtttcaggttcatcaaagttttcctcaagttgtatatgtgtggtccattcttttgatggaatctaacctttaaatcagtccagatggctgcagcagactcatcatacaaaagacttgaggaaatttcttttgaaactgagttcaagatccatgaaataacaatattgttatttctataccaagcattgtacataacagaattagaagaatggggtttaggaatagtaccatccaagaatccaattttgttcttaacagatatagctaattgcat

SEQ ID NO: 309142 - DNA, 503 bp, Cannabis indica
gtatcatatttcttttgcagagcatcccatattttgtttgccaatttatcttaattataatagtcatacagatcgtcagataaaccattaagaataaagtttttaagagaaagtagttttcgacccatgagtccaaatcctattgttgcttctcgctttcagcctctttgtccttgtcggtagaagcttcagttgaaaagaatgtgttcttcggttgttctcatacgacttatatagggaagtcaatccaagaataaacgacaagaaaacagtaatactatcgtggaggaggagttggatcatggcagtaaaaagtggatcattgactaatcgtgttttactacttctgataacgttacaaattattaataaataaaaaataaatcattatttaattaaataatttttcttaaaaaaattaagtgacatctcacccgccagcctagcccggcttggtcgaacagcggcggcggcgcgcgcgtgtggtggttcagtgtgtgagt

SEQ ID NO: 309143 - DNA, 2119 bp, Cannabis indica
gtcgaaccaacacccatgtgttgattttggtgtagagacttcatttcttcatccatcgccatcttcaatttcttgccatcaactctctacacagcttctctgtaagtgcatgggacatcatcatcaattattgggaatgcaaatgtaccatatctgtgtatgtagtaggctaattaatctcccttcttggtcgaatactggctatagattttgattgttgattgactggtggtgatgctaagggaacctccacctcaactgagatctctttttgattataaatttcatcttaaccatgatcgtcaaatggcgtagtcttttttaggatcttcctttatctcaagctccaccttagaaagagtatctgggccttcattctctttctccaaagtaatctgtcttaccatgatagattcgcccaaatgtgacatctctgctcaaaaagatcttctttgatcaccacaccaatgtcaaaaacctttgactccttcattaaagcccaagaaaataactttctttgctttaggattcaatttggattctttgacatggaaatatgcaggacatttaaatattcgtaaggaatcataataacaaacacgttttccagaccatacctctttaggtgttttcctatctattgcagtcgtaggaagtctattgacgatatgggttgcatatgacaaagcctcagcctaaaatgctttgctcagtttggatagaaatagcatacatcgaacttcctcaaccaaagtgaggttcattctcaccacaccattttgttgtggcgtccgaggtacttaaaaatgtatacttatcccttcatcttgacaaacttgtaagaaaggatcttatttgtactcactgccattgtcagatctgagcctcttgatcttcttgtatgtctgagtctcgatcattttctttcgtttaagaaagacatctagaacttcatctttgtgtcgcatggtgtatacccaaacatatttagagaaatcatcaataaaagtaacaaaccattgtttacctccaagtgaagcattcttggaaggtccccaaacatctatgtagatataatctagagttcccttagtgcaatgaacaatagtgccaaacttgactcttgtcttctctcccaacacaccatgctcacaaaaatcaaactttccggtcttagcacctttcagtagacattgcttcactaagccttgaaaagccttctcttcgtcatgccctaagcgcatgtgccaaaggcgggaagaatcagttgtcttttcttcagaattgttagagacatctactcttttaaaacagtgttcccatctaggaagtataaatttgcctttcgagtacctttcatcgctacaacgctcccagagcatgcaggaatgtcccaacttattggcttattggtggatttccttcttcatcgatcaggatcggagcctcgtacaactttcaaatttccatattttaatgttatcttgtaaccatcaaaatcaagagcacctaaggatttaagatttttcagtagattaggaatgtacctcacattcgtaagtcttcttattgtaccatcgtgcatctttagtcgtattgttccaatccattttgtttgacaggtattaccgtctcccattaagaaaactcctccatcaagttcttcaaaactcgagaactaatgtccgtttggacacatatggtaaaaacatgcggaatcaaggatccatttgtctaaatacaaatctaatgatgaaactctaaaggacgaatcttcttcgatgtcggctttctatgaaacatttgcattcgatttgtctttatttggacaatatttattcaatgtcctttctgatgatagtaaacacttttctttcacaatatttatcctggatgactctcctctagactttgatctggatcgcccctattattcgatccacttgatttttttgttgttcaatttgcctctagttgcaaccaatgcttctggcattgagtctttgtgatcatgaggtatttttaatcaattccaatgttataaatatttttttattagtttatacatatgttataaatattaattaaaattaaaataaaaattataaaagtataataa

SEQ ID NO: 309144 - DNA, 1651 bp, Cannabis indica
actttttattagttttttttctttttaactattgacattagtatatggaaagtgattttttttttcttttttttagcaaaggaagaaacattttattcaaacaaccactgacaatacacatgcttaagcagtaaccaaataacttagaaattgtcgattacatctagaacatatttttctcttttcgtaagctttttacctttacaaaacaaagctctagctttcaaactctgctcttggtcactaatcatcttgattgagctacaaacttcatcaatgacacgcatatttcgattacatcaaatgtggtacacaagtgcagctacaacagcatcaaacacaaaggtaatcaaacctctttgctgcaagttggacttgttatgccagtcaaaaagattagaaggccaagcatattggttgaaccacttagacacctcctagatctaattcttagaataacagaagacgaagaacatatgtaagtgagatttaatctcaagatcacaaatcaaacagattatagaactcacattgagaattttatcaagaagatctcaagttagaaaatgattgttcaaagcttgccacaaaataaatttgtgttttgaatatctctattaataagagaaaggttgaaatgtttcagtttcaccttaaatctccaatgaactacatgttgccaacaaagcatgtttatcaattttctctcttatttggatcaattttgagaagtaccaactccctacgcatcagtgttaggaacaaaattccaaaaaatctctgttcttcatataaatttcattaacccaataatcccaaaggttgtcttgtttagtagaaatagtctaaatatgctttctataagagctaaatttcacttcttcccctctctaaaactaacctcaccgtaatgtttgggtaagcaaacttgctcctaagaggtaaagtgaagcttatggcgattacccgagctactccacaaaaaatctttgcaaagtttatcaatagcagtagtaactttttgcgattgtataaaaatactcatctagtagttacgaatttccaataagatagagtgagttaattgagccctatttgcaaaggaaagaggacggttggcccaaccatgcatctttttttggatcttatctagaatacccccacactctaaagccttccacttggtaggatgaagattaaccccaaaatatttcaaaggtaaagaaccctcatccatctttgagatttataaaaggtgttttttataatccgaatcaacacctccaaaacaaatgagatattttgaggtgttaatagctaaccccgtcacctcacaaaagttggagaaatcctcatgtataatgttgtaggcataaatattacctttgcaaaaaataactaaatcatctacaaagcaaagatttattagccgcaaaaacttacagaaaggatggtaaccaaagcctttagaaagagatgcatgagtgagcaccctcgtataatagaggagatattggatctttttgtcacaaccccttctcatctttgaaagcaccataaagtctaccatttaatataggaaaatttgaaaaaatatgcatgaaatactttaaaaaaatttccctaatctaatacattttaaaatttaaaa

SEQ ID NO: 309145 - DNA, 1774 bp, Cannabis indica
agaaaacagtcaagatcctttcctctcacgtgttgtggcagatttagaacaagggaaagaagtgccgggattcactttgacaaagggtcggttgttgtatcgcaaccggttggtcttggcagctacatcttctttaattccgcatttcttgcaagagtatcatagctctcccgtgggtggtcattccggagagtaccgcacttaccttcgtctgcgtggggatgtgtattgggtgggcatgaaggctcgcgtgggggactttgtccgcgcttgtgacatttgccaacgaaacaagcatcttgctatgtcaccaggggggttactgcagccattggaattacccgctcaagtatgggaagatttgactatggatttcattgaaggcttacccaagtcggagggtgtcgacacaatacttgtggtggtggatcggctgagcaagtatagccatttcattcccctcaaacatccatttacagctcgtacggtcgccgaacactttatccgagaggttgtcaagcttcatggccttcctcgtaccattgtctcggatcgggatcgggtctttctgagccatttttgggctgaactgtttcgccttcagggcactcagctgagacatagcactgcttaccacccccaaacggatggccaatcggaagtggtcaatcgttgtttggaaacgtatcttcgttgcttcgcttcggataggcctaaggcttgggctaaatggttgtcttgggctgaatattggtataacaccacttaccattcttccttgggttgtacaccttttcgggtactctatggacgtgatcctccacccttgatccgttactcagatgggtctactgccgtgttagctgtggagcagtatttggaagaaagggatgggtttctggatgatttcaagatgcatctgttgcgtgctcaacacaaaatgaaggccgcagctgattcgtcgcgtcggcacgtggaatttgtcgttggcgaccatgtcttccttaaactccgcccttattgacagaaatctcttgccatccgcaaaaacgagaagctggctgctcgtttctacggtccttttacgattctgcagcgagtgggaccagtggcgtatcgtttggacctttccgtgtcatctgctgtgcatccggtgttccatgtctctcaacttcgtgcggcagttggcacagcacactcttcaccaactattccacctactttgactgctgagtttggagttggtggtggaaccagctgagttgttgaatgtgcgtcagcggccatcatcccaaggggcccccattgaagtcttgattccctgaaaagacttgcctttgtttgaagcgacatgggaagactttgacaccatccaagctcagttcccaaccttcaaccttgaggacaaggttagagatttagggggggggaaggaaggacacacgaaggacaccagaggcctaaggtaagatttacctatgtgagaaggggtaaacacacttaagctagtgggctgagggcttttcagtaatttgtgtatagtgagctgccttttattgtatgagtgttgctgagagttagttatgcaatttgagagtaaaatcttgcatcagtggagggctcttgctctctaccattgtaagagttaatactcattgtttcctttctactgtaagagatatattctctattttcattgaatcaataacagctcactacttctccactcttctgttgcatctatttgttcttattaattgttgttgctggaaat

SEQ ID NO: 309146 - DNA, 2045 bp, Cannabis indica
cacatacttatcgtgctttgttttttcttatctttggttgattccttagggtcatcttttctcttagtgctaaagcctcctgaattgttagccttcgtcgagacagtgcttgttaagacagtgctgggtttatttcccgagccagtctttatcaattttatctacttccttgcttcctcttttcgtacaaacacttgagctctttcattaaactcactgatgttttttactgacaaccttgtaagttatcccacagctcacctccagccgttgagaggtcaatcgtaatcctcgcttgaagagctgtaagctgtataatgtcgtaagtttctaaccctagcagcagctgtactaaaacgacttaagtaggccttaagtgtctcgcccagttgctgctttatgttagtaaggaaagacgctttaggtcgcctgtcttttgccgcctgatgggtgaatttattgaaccagctgctcgctgccccaaaggtggagaataaaatacaacgtaagttatttaggacattgctggcttgcataatggtattaaaattgttaaggtgagtgatcggatctgtagtcccatagtatgacaagacgtgagggtttttaaatccttggggaaatttagcactcataatgactggatggaaaggttcaagatcctcatctgattcgtaatcaggcagtttcccatcttaatatttcttgaatttgttttctcactcactgatttgcaattggattggatcctcttgcttttggttggaattgcgttgtttgcgtaaatcaggcttcctccgattcaattattcacgaagatctggccgtcttcgatcatagatatttgttgaccttgtatctgagtaactctcagattgatggctcctagttgtgctcatactttctcgatcattactgcggtgagtcctatcccctcctcgcttagattgactgtgatcttgagatcttgtatgtcccgagctagaacttgtctcgtcacgcacaggtcttcttctttgggaaaggttagatacatgcccccgctggggtgtgtatatgcctcttccttatcagtgtgagaaggacgctgactgtgcctcagtggtaacctacttgtcctaggttgagtcccaggatttctctcgttaccacaagggatttcctataccctagttctgggttgtcttctgtactcgtttctacgagaaaactctggaatatcattgttctcattcccttaggttgtgaatcctcgaggtcttcgaggcacttcttgacaaggtgcctgatcatttggttgttcatcttctcgaacatgcccaatttctccaggttgctcctcctgagtgttctgggggttttcctgagctgtctcctgcctcctggttcttgagccccgaggtctacctcgtggccttctcactccaggatcaggttggttctgtgtgttattttctagagtcaccctggttgcgactgcttctttctccaactcagcgttttgtttattagcctcggtcagtcgttgccggagttggcaattttccaattcaacctatggcacgtacctggtgggatcatatgtattctcactccttggtatataaacaccaacttcagcattggtttcctcattccctgtttctcggttctgatcattatcaagttggcttcttcttgaacgtgttgatcgtgttaaacgcgtagttcttaaggtgggtggccttcgtgagcccattggctcttttctaggacgatgattagtctcttctggacgactattgtcgttctcctcatgacaaccatggagaaaaattctttcctctttggttaggagggatttttctgagcttttatcacgtaggctctcaatgaaagcatcaaactgtgatgcagatttttgataacgattataagcctattttcaagatagatttggcacagaaattataacagattttagaagaataatagaaacaataataacaccaggtttttacgtggttttatagttaactctgcatatgttgggttttattccctaa

SEQ ID NO: 309147 - DNA, 1177 bp, Cannabis indica
ggcatcctgctcagcatattgatccgaacagatgctccaagtagagtccacgtgtcaccattctcgtgatgccatgtcagagtgccaaatttgggataacacatttttttcacaatcatactctttaatactcttattaaaggtgattttctaagatctagtggcttgcttcaattagtaaatggatttaagcaacctacacacctttcaatctttctctagtaacacatacccttctggttattctatataaattgtttcatcaatactgctatttagaaaagcactcttgatttccattttccatacctcacatttataagtggcagatatagaaagaagaatgcaaatggatttaggcattaccacatgagagaaggttttatcatagtgggccccttctcactgtgtgtagcctttggctacaagcctatctttaaagggctctaattcccttcagcatttcttttcttctcaaaaatccacttacaccctatgggcttaatatcctcaggtggagtttcatatttccaaacctttttggtgcacatgaaatccatttcttgatccatggaattgttctacttgtttgagtcagggtcttccaatgcttctttataagttaatggatcgtccttgtttgtatgagagacaagaacatgtgcttcatgttcgtagcgcataatttgtcacaaaatcctcccactacaacgatgaattgggatttcctttttaggaactgtggtaactgttgttggttgttcaactaatggtgctaaaaccattggtttagaagtttgactatttctaatttcattgaatttcctcttaatatcttacaatcgttataggaacaagttttccagtcttcagtttaaaacatgagcaagacaatcccaaatatggaaatgtttcaaaattggtttttatcacattctataattccgttagagtattgcttatgcctttcagggtactacattaaaaatgtaggtagctacaagaagtgtgtatccccaaaagttcagtggcagtgatgattacatatcatcaatctaaccatgtcaaacaaggttcagtttcttttctctacaacaccgttctgctaaggtcttccaggtgttgtgagttaggataagatcccttcttccagcaaatagtctttgaatttgaaatc

SEQ ID NO: 309148 - DNA, 701 bp, Cannabis indica
agctcgaaggatatcatcgtttcacttctaaattcctatagaagttatggactccatatttatgttagcgctcccactcaattatactattatgttcccaaaatgtacgtatcacccagacccgaaagtaggtattggaagaaagtggtaatggtgaaagaacaaatgaagaatattgggtccataaacacggctaaaagcagtaatctagtagctgctgggtatcgggcactacatgaccaaccagctagagtattttgggactagattgtttggaatcggtttaacattcctaagcatagctttattgcgtggttggcgatgcttgggaagttgaagacgagggaaagactgatgagatttggagtaattgaagaagacttatgcctactgtgcaatgacagcagtgaaaccattgagcacatcttcttctgctgtaagttctcgaaagactgcttgtgtaaaatcagagggtggctgctatgggaggccacggatgtatccctgaaagctatatgcaggtggctgtccaaggcaagatgcaacgacttcaaaaagaaggtgtttactgctgccattacagctttgatttacttgatttggtgcacccgaaataatattttttggaatggagaaataggaaattgtgatagagttgtgtgcaaagttaaagatgtcattaagaatagaataacttgtat

SEQ ID NO: 309149 - DNA, 1308 bp, Cannabis indica
acaatatacatcttatatgtgccacaatcaaacaactatttagacaattatgggaacatcgtatatgaagttaaaaaataaaactatagagcttcaaaaaccgacaaacattaaaagaagtaagatacatcagcacaaaacacttgagagcagccaaaaatcaagtccaaaatatcagatatgggcaacacaaacattgagaagaacagcataggaacagtactagatatcccaaatttgtagtaaaacacataatgcgaagccatgccatgtatgcttttatatcaaacgaaatataccaccaaaaatatgtaagactgaaaaattgtgcaaactgcagcatgaaggataaataaatatcctccaaccttaaaccttggctaaactggtactaataagcaaaggctgcacacctccaggattcgagacataatcttctcaaaacatgtccacattgaaagcaaaagccccagccaccacccaaaagcctgggaaaattcaccaacagaatgacattcacgagtaaaagcagaaacctgaaaattcattgaacacaacaaacctcaaacacgacatgaacaaaaaagttccacagatacccaagatacaaatatagcaaatacaagtcatttaaacaaaatactagcaaaacatatgataattaagatagtctccaaccattttccatcacctataaagatagaccaaaatccaaacaaagtaacacattgaacgaaaggagatataaaatgtaaggttgagggttttatgtcaaaccaaagcccgctgcaattttggtatgtagttaaaacaaacagaaaatttaaacaaatgaaaagctacatgaccacatccaagataaagatctttgccaattacaaaaggaaaactaaatgatatactttacacaaaagtagtaaacatagtaaaaagggaaacaaggactatgataccacccatgcaatgttgttcttgaaacaccaccacagttgccggccagctttaaaaaggatcaatttaaaaaaggataattatgtaaagctgaaattattatttttcacaaaatagataggtcgtaggaaatccagtgttgactaagtaaaaccatggcagctatctccataagctttaaaaacaaatgatgcatttacctaaagagaaaatatcatcatatagggagagattcaattagacaatgaaaggtaaataaaactaacaacttatgtttcagaaaataaagtgattgtaggaaatccaatcatgactcttgttgatgagtaaaaaaagaaatagaaaagattgtgtaaa

SEQ ID NO: 309150 - DNA, 1468 bp, Cannabis indica
aaattctagagatcagtcttgttgcttccaggatacgaagacaatccctataattatgggattgagctaaagaatagaggcaatatgtcttagtttcctattctttacattgtacttatagaattaatgtagtttcctattttattcattatagattaaaggaaattattcttcatttattaagcccctataaatagcggcataatatcactattgagggggacaagagaattaatccagacacacactcaagagagaatagtgatataagagagaaaataacttagagatctattgtgagagctttagagaggaagaacactttattccttctctcaagtcaatacaaatacaagaagagtatgctattaccattcttacggagccaaacctctttaaaatctggtgttttctttactttactatttttgctttattttatttatcttatttgatcgctttattttgacttactgtccatggctagatgcgatgtcaacattttggtattttcattgagagcaaaaacacaagcttttgtcttagttttgaaaggttaacaggatggttgaacaacctcgaaggggaggccttattgatcaagacaatccaatggtgagagatccaaacgtgcaaaatcctggaaacacgaggggaccaccagggataaaccttgaacaagttaatacatagcctcctacggtaggccatggagtgacttcccttttggctgggttcacaccaagcgtacaagagattggaaacactggtacagtcagcaatcagacaactctcaacactaaggtcccgtccactaataatactcaaaggccaactggagatgacactaaactttagaatctacgagaagcactcgagctcatgcaaggccacaacaatactcttcatcatgatcagaaagatctctaagaagccattaacctttcactcgacgagcaaagacatcaattcatggagtggagggaccaagagatggaaattatgagagcatagcaggcagccattgacaatcattctaggcaggccaccatgataatcagaagggcataccaggttaccagtcaacaaccaacaactgaatctagtatccccctaagcgggtcagaaggatatgcaactggacataccacacagactcgtagtggttagccatccaatccaaggccataggtccaaactgtgggccaaatagtagacggcaagatcctaccgaaccgccccttgggaggaattacacattaaaacaactatgctaatatagaggtcttaggccaacctctcagccaaacaggtcaagcaccgagaccacctggtgttgggaatattttacgacgatctggatttactaacaagtaagttaattaacatcctaaatatgaatatctctaaaaaaatgaaattaaacacatacgggtttaagaaaaccttacattggttgtagtggaat

SEQ ID NO: 309151 - DNA, 823 bp, Cannabis indica
aggacccaaatccagactcggaccctacacaaaaaatctaaacaagaaccggaatcaggaacctagaatatgaattggacataaaaaaatcggatcttgacacgaaacccagcacggacccgacctagaccgggatcgatacccagacccaaacctgaacctgaacccagacttctgccaagacctgcgccgcaaaacccgaaacgtaggacccgtgacctgggtcctgaatcagatcccaaacacgtaccagaacccagactcagacctagaccaaaacccaaacccagacccagacccggactcgtaccagaactcggactcgaactcgtgactcggacccagaccgagatcaagagtgagacccagacctggactaggaccgagaattgaacctagactaggactaaaacccagactgggaccagggacccgatactagaatgtgggacctgagaaccgaaccgtgacctagacccatacaaggccaatacccgagaaaagtaccagtaccgaacaaggaccgataaagccaacgagaatgagtcgaatttagtaagcgataggtgatttatagcaatcgatatataataaagcaatataaagacacaagaattttatagaggttgagccccgagcagttcggtaatagcctagtcctcgttatttgtattaacttaagaacaaggagaaaagttccttttcttatagctcttacaacaatatctctgaatatataattcttagataatatctttagggtatagtcttaagtaaacttttttcggccttttgcccaatgaacatgcatcactatttatag

SEQ ID NO: 309152 - DNA, 1985 bp, Cannabis indica
aaaaggaaaaagaactaatcaagtaagatttctttttaggactagtactttcgactcattaaagaaggaagaaatatttttttttaagtaataaatttttatgtttgatttttcattcttggcattatttatattgctacattttaccatgcataaaataaaaacaatacatatatcctaactaattatgaagaaaaaaaatcacactatcttttctatggatgtttttggtggactttatggtactataataaaatttgtgattaaaagtaaaagtattatcactaaatataaatttataataaaattaatatatatatacatgtaaaaaatattaatatatcaatatttaattaattaattgtacaaaaagtaatggcacaaatgattagaattgctaattaatgatggtgaggtatagggtttgatccatgcccttgccaccttttagttattttaaatagtaaaaggctttacatacaatgtgtaaatattttcaaaaaattatttgttatacaaagataaaataattaatattgtgttaaaatttaattaatatttagttttaattttttataaaaagaaaatatcttgtttcaagtttcgccataagtttctcattgccttgagatagacgtgcataaatcatcattcttatatttttactaaaaaatttgtgaccagctaaaaatattagttataaaaattataatttattgtcattaaatgtatttttaattaaaacgcttgttgttactataattaaattaatgacgattagtatctaaatgttactttttagtgacaaataatttttattgtgattaaaagtgatgtttaataaaatattattactaaaaatagtttttttagtaatgtcagagcggaaaattacaaatagaattaattgagaatttttaagctatcgaatatataaacatatattgtaacatagaacaataatggggatgaagcacaattcaaaaagggagagtattaagtttaacataaagaatcaaacatttttaaaaaacaaaaaagaagaagaagaaaaataaagttcattaacatatataatgctaaaaaaattaattagctttgtaaatgtaaatgtattgactattaaaaaaatgtaaatgtattgttataggtaatattaggtggacatttaagataagaatcataagataatataagatcataatagttagtaggtgatctctaaaattatgaaaaagtaccaaaatagttgagaaagaatctacactagataatatttttttactagcaagaaaaaataataaaaaaaaaatgtaaatctaggtatattatattttgttgaagatgacctaggaaaagggtgtgaaatattaattacttatatattatgataatctacttaaaatttccatatataaagaaactcatcatcaaaagattatatcataaagctaatataagtggggtgatatatatagaaaatagatatatagagtcatattatatattatatattatatattatatattatatattatatataggtatagatatataggtaggcagagtcaaataaatgagtatggaatagatagatagatagatagatgtgactaaatgtcaagttggtatagtatattaatagactatatagagagaaatatatttgaatcagtctaaattgatttgttttgtattgtagttaccatcatatatttataaatatataatatatatctaatcagtctaaataataatatattaattaatatttatatcagataattttatgtccagtcttgttggaaaagaccttaaatctttgaaacgacagagatgcaataaccacagccagctaccctaatactattattcaaattttttttgaataatatattcaatggagaaagaacttacctatatataattatagggatatgattttgtcatgttattgtactttcacggattgtaatccgtgatg

SEQ ID NO: 309153 - DNA, 658 bp, Cannabis indica
aactcttaatcatatgccaattaaaaatatagcgtgggtgctgccattagcaatagtcaaggacagttagattgatttcaccacaaaattaaagaatttctccaacgattgtcgaagctaaatctattcttgaagccctgcaatggtgtgttgcaattcacttgtcgatatcaatcattaaaaataattgtaaaatagttacgaatccctctattattttgaaaaatctcagttcctgaaggattaaggatatacattgcttcgactatcgtaggtgaaatcaaagagatagaatgctatatggtagagagaagattcatcccctcatgatcaccaagcaccacaccgttcccatttttgggtttcccatccggataacgttcataatcaacttttggctgtccataggggaccaagaccaacttggagcaattgaaagttggatcagagccgcaccaagagcatcactgtgcctactattagctcaagaaaaatgattataatacttttatggcatagtaaggtagctctctggtagttagatatttgatcataggtaccatccacgtggtgttttgatcgattgctttgacttccattcggttagttgttgggttgtgtgccctagataaaattatttcaatataatcatatttac

SEQ ID NO: 309154 - DNA, 1518 bp, Cannabis indica
ttaaataaatatataattaaatattattataatatgaataaagctttaattatatacaagcaatcttatagtaagagtatacaccttatattatataaccacaagatctaaaatcaaatggtaaaaaaagaagttccctatcggtaagaaacttttgttaggtcctaccatagtattaccctataaatatatatatactgtagaaactttttagaaaaccgtttgttagaggtcaaaatattaaaaataacattttaatccattaactatgtatgtaacaaaaaaataatgtattaatctagactcttcgttctctctctctcccatgcagcagaacaaagcttcgagcaccaattttgtgttttcacactcgtctccaaaccgtttccacattgtgaaacccatgaccaagcccagatcttgcgatctccgtggctccggctcctcctcaaacgagacccaaggaagttcgactcacccaagccgacccagaagtacggcgcgaagtcgacccaaccactcctgtcccgtcaacattaactccggcaatcccttcggatctccgcccagtacgaatattaatggcaaacccacaggtactcaatctcctcttctctcctttctgatcagtgtcaaatcgcatctgcaaaatcaagttcaaaaatgcttttttcgatttaagtttggtatacccattaaattaatccctcaccaaacaccacttttcacattttggagtaatgagaactctgtttgttctctgctcaaccgagaatataatatatgtatcaaaaagaatttgctgcttacatttaatagtgcctgtactgaagttattctgcctggcacaaagggtcttgtctctctgcagaacgttctcttccccttaaatgctataactcttgtttgctctagctcatgcatagttatcctatttaagagcagaagtaatggttccccaaacatccttagtttatccatctttaggtgcttagccatattaggaaacaaacctctcatctattcacctccgacacctccccttcttggcattaaactgcttccccaaaattcttaccatatactgcaaatttactttctatatcatctttttcttattctaggattatactacatctggcttatatataatatacctatattctgcacacacagtctctccacaatggatgacttaaccaattcactttctattgcactcaatctcacagagacagaaagcactatccaaaccttacaagagccaatcctccctaacttagccgactctgaactcaatcaagctcccatctatttggtagcaaaagtgctcacggttaaatcctttaaccgaaagaacttcatcgacaaaatgacaagcaattggaaccatatctctcgttctcctgttactatcacagatcgttccaatggcctctttctcattgagtttggttgcgatggagataggcgccgggttttgcttcagcaaccttggacctacctcaaccaagctat

SEQ ID NO: 309155 - DNA, 3260 bp, Cannabis indica
tattaccatgaaccatcagaattttgtgaattcaaaatgtaactttctcctttagaaatgcatttgtctaattcatctcttctgtgtgttggatataatttcctaaagagtaccaaactttggataactgatgaagaacactctacataactgaaattattaacatatttgcacaaattaattaatttaattagtacgtagaaaagtaattattaaataattatcacatatattcatcaaataaaatatatgttaattcatggtgatataaaatgatcttactctctttcaacaactgtatctgcaaggaactctatgggatttaagtactgaaaggatatgattagaaagaaaattagacaaaaatattcaaactgattttataattaacaaaaaatttctccaccttttttataaataaaacaaaaatattgaaaatattacctccaaccaatgatatcctctttggggttcccaggcagagaagcctccttcattactctatacatagtcatattaataaaaattacaaaaatctgtaataaaagtgtcttattattttttttttttttagttataagtaaaataagtagtagagattattataattaagacttacttgatatgtcatcaaacaatttactgcatcatagaagcactctgtctccattttctctcctactagacttggtgagatttgtgagagcataagtgtggcctattataataattaaacatatttgttatttatagagaattgctaaaatgtattattggtgcctagcaccctcctcggtgtcatacagttattagtgtagttaagtaaccgggtctctataagaaaataacttttaaagaatattgctaaccaatcgtgagacaccacctaagatgttaggcaccactagagtcggtgcccaataataatactcatatatttatatgtatgttacctttaaggcctcggcagtgcaatcagagactacccaaccttggtcggcagtattaaaggtccacccacctttagatatgtgtctgtacattttagtgtaatttccaggtagatttttacgaatctaaacaataacaacaataaagccatgtggttagctactatgtgaaatgtaatatatatatatttatatatatgtttttttgggaccaaacctgtgaagcttttaaaaagtgatgcgcttttcgaagagtatgagcaaactcttgagttaggttacatgatataatggcttgaacagcaagagctgcatcccatgattgagcaccaacacccttatacataaatatatatataaaaaatttaaaatgtgaactttccatattgcaaatatttaaaatgtaattaaaaagaattattgaataatattttataatatacatgtattataggaaaattataatttgagtgtagagttatcatcacttttaactctttactgccggtcaattatatatctttttttttagtacttagaaaaaattgtctttgtggtttcgcgatatatcctcctcaattttgtcttacatttcttcttcagagtgcgtttcgccggaggtggtgcggtggtcatggtctggattggtctgattctgtgatcgtgggtatcggttgggtttggtgagagttcatgagagagggagagagggccgagagaaagactgaaggtatatgaggagggtaatttgggatttgattaattttagagtattaaattcctatacattttaatgtgacatactaaaagaccatgaacaatttttaagcatgaattgtcaaatttaccattataatttcttaagtgtaaaaaatattgtagagggtaatcttgctctatatatatgtgtgtataatatgaatttttaaaaagtacctgaaacttggctccatcttcagcaatccaaagataatctggaatcctttccaggtgacacttgaaggcttttgagcatggatcttcaacccaacgagctagcatacttactatctgtataagccatcgattatcatactagatttaaaggtaaatattaatttagattctgtatctttgttaaaagtatttgtttggatcttttattttgttaaatggtaaattaaaccatacattttttaaaatggtacaaaataatattctgagctaataaattttcttctattttatttttttaatataacctgaagctagcttttagtataaatagatataaaaaatataaccaatttgatcttaacacctcgaggttaaattattacatactacctttaatttaatgatttttagattagattacgtgcaaaaaattgcgcaaaaaatgtctttacgcgaaaatattttattttcaaatttatttttattagaatgttcattatagtgataataatagatcatttaaccaaacaataagacgataattaataggggcatgtttgtttttcataacgacattacactaatttagttactttttttttttttttttgataaacttatttaccttttcttgactggccacagagagataattactaacttcatcctcataatgtatatgattcaaagcaactttaagagccttttctcttagtttagagaaaggccatagtcttagtattggttctgcacaatggtaaagtactccccacaccatatcttgcaccaaaggatgtggataaaacagatcctcctatatatttaaaaacatctttattaattaaacacatacatatttatatatatatttttgcttatgtatcatattcaaacataattaatactcttattttgttatatcgatactggtgcaattcagtgttggatttcatttactttatagtttaataatattataaaaaaattactaatcatttataatacacaaacacactagtattaatatactattaggcaccttcaaaatatattaatgtggcgcgttgtggtgcttgacacattaaagtgcgtcttcgtagtaaatatattatatgagttttgaacaaaccttagcaacagtgtttcgagctttgttccaatttatttgatgataagggtctgtatagagttcttgccttaatgattgaaccaacccagtgattggtccaacaaatctttttccatataagaatgacataggcatgtacaccaaccgagctaacgcgcccattttccctacaaaagtagaaatactaaagctttattaatttcaaccacattattaattagttttattttgaaaacaaaaaaaaa

SEQ ID NO: 309156 - DNA, 1213 bp, Cannabis indica
ttatccaaggtccaagtaaactacattgtagattatcatatcagttaaaccatgtgcactgataaatctaggaatacattttatcacataatcttgattacttttccactgtgctgacgacataataaataagaatatcaatgtgataaggatttagatgaatttataaatcaaataaacatataaatgatcacatgaaccaaaaatgacatactaaataagtaatgaaaataattctttttctttaatgataattgaatagaaaagattacattgaaatagagtttcagttaaggcacaaagcccaacattcttgtatgtccttggcctcatgcatgtgaaccgatttcatattcagccttaaggcgttcatgtaattgattttggcgtattggccctctattttcgaacactactattatttagccttaaagccttttaacatggacttttgattgtcctcgctatcttattatggccttgacatttaagtgtccgtatttacttgtcaagccaaagtatgcctgcacttgacttagaggcgagtttcgtagcttattctaagcgttaaatttctctatataagttctacgtgccagtgcgatgcattgtatggtgtaggtgctccccatgtaaatgcgtagagttacagtctcttagtcacttacaattcacgaagtttgatagaccttgcttgggaattttcttggggttgtatttggtgtacgagtgtggaactagaaaagaataactttaagaagttatctttgtaagcaagtggtttagacacagttggtcttatgtgtaacaaaagctttcagcttagtgcctgcttttgaaatcacgtattggctacccttgcacggcttacaatgcaacgaccaccatttaagtgtgatgggaagcctgctggaaagaaatgggtactagctcttttatgggtccatgcatggtgaaatgttataggaactaattgacaagtggctagtgagagtacttaccgagatgttccctatttcagtgtttaggtaaaagttccaactccatgttcttgttgtactcgtcagacttgtatgcaccattattgttatctagtaacatcgtgcagacattttttagttttgttcgaacatgattgttgcatgatcttagatgtctagaatatccttcttggagtaaatctcttacaaagaatttctttcctcgatctgtt

SEQ ID NO: 309157 - DNA, 717 bp, Cannabis indica
aaaataatttccaacaatccattagaagaccctaccctttatcgaagtactcttggtgctctccaatatcttacattgactcgacctgatgtagctttcaccatcaacaaactaagtcaattcattcatgctcctactgttactcattgggcaacatgcaaacggctccttcgatatcttaaagggacaattactgatggattgttactcagaccagcaacttctatggacatttccacttactctgatgctgattgggctagtgcgattgatgatagaaaatccacaggtggttatgttgtttttcttagaggaaaccttgtctcttggtcagcaaagaagcaggctgtagttgcacgatcgagtactgaaagtgagtttcgaagtctagctaacacggctgctaaaatcaagtggttggttcacttgctgtttgaactacacatctctcctgcttctcctcctgttatatgggttgataatcaaggtgctactgttcttgtcgccaatcccattttccatgcctgatcaaaacatatagagattggcctccactttgtgagagatcaaattttggcaaaagaactttcagttcgatatgtatcagcagtagatcaggtagctaactcacttaccaaggctttatctactgatcggttcatgtatctcaaaggcaaactcaaaatggctgctacaccttttcgtttgaggggggat

SEQ ID NO: 309158 - DNA, 3014 bp, Cannabis indica
atgtaaggacaattgtgctttattttggaaagagaatgaaaatgctgaaagatgtcctgtatgtgatcatgaacgatacaaatttcaaggaactaaaggcaagaagatcccatacaaaaagatgcaatattttcccataactccacgtctacaacgactttttatgtctcgccatacatcaactgatatgaggtggcataaggaagaacgtgttgatactgatggtgaacttagacacccagctgatgcagaagtctggaaggatttcgatcgacaatatcctaattttgcaaaagaaactagaaatgttaggttgggatttgcaacagatggattcaatccattcggtgatttatcaaacgcacatagtatgtggccagtgttgctaatgccatataacatgcctccatggaaatgtatgaaacgagaattcgtaatgatggcattactaattccaggacccagtgctccaggcaaagacatagatgtctttttacgacctctaattgatgagctcaaggaattatgggaaaatggggtgcgtacttttgatattgttgaccaagaatattttacaatgcgtgctgcagtattatggacgattaatgattttccagcatatggtactgtgtctgggtatagcactcaagggtataaggcttgtcctgtttgtgaggaagacacatcttcatttcgagtaagaggaaaaacatgtttcatgggtcatcgtcgatatttgagtctgaaccaccaatggcgcaatgataaagagtacgatggcacaattgaaagacgttcggctccaagaattttaacaggagatgaaatcttggacaaagtaaaaggtttatggaaatgtaggccagggaaaaatgataagatcattaaggaagataagcaacaaatgaaggatgcatcttatgaaaacaaaacaaactggaggcgaaaaagtattttgtgggagttagaatactggcctaagttaaaactaagacataatttggatgtgatgcatattgaaaaaaatatatgtgagagtgtggtcggtacaatatttagtatcgatgggaagtctaaggatactgaaaaggcaagacttgatttacaagacttaaatattcggaagcagctacacatgaaaaagaaagggaataaatggttgaaaccagtagcatgttatacactatcggcaaaggaacgacaagaattttgtacgttcataaaatctgtaaaatttcctgatggatatgcaggaaatatttctcgaaatgttaacatgaaagatggaaaattatttgggttgaaaagccatgattgtcatatcttactgcaaaggttgttacctattggtttaaggccatatttgaataaaaaggtgatggatgcaattgctgagttatcattgttctttagaaaactatgtgcgaggacattaaatgtgaaagacttagatgaattggaagagggcattgtacttaccttatgtaaattggaaagtatttttcctcctgctttctttgatgtgatgattcatcttgcggtgcatttgccattagaagctaagttgggaggtccagtacaaatgcgatggatgtattcaatcgaaaggtatcataaattgtattttagttaattgtattattcgataattgttgagtacaatattttaaaattatacattgaaaacataataaatttcagggaattaggtcatttaaagaaatatgtaaagaacaaagctcgacctgaaggttgtattgctcaaggatacattattaccgaggcattaaatttttgttccatgtatcttcgtggaatagagacacgatttaatcgccctgatcgtaattctgaaaaccttggcgtcagaaaagaatctaccttgtctatattcaacatgcctacaagaccatttggcaaacaatcatctttcacactaactcaagaggaacgaaaccaagttcaatggtacattttgaataattgtcctgagttagacacatacttaacgtaagttaatttgtttttccttcccaaatattataatatttatgttttagcataaaattaatatttcatagtacttgttatgaaaacagagaacatagattattcttacaatctcaaggattttccgacattgaccaagtacaaaaaaatgaattttcaagatggtttgaaaataaagtaagtataaaatataaattaaaatatcttataacataaatttgtgtttgcatcataaaatgacaatatgaaatttgaaatattcacagataaaaaaaatgaacgaaacaacttctggtcaagcagtagaagatttgtatgcaattgcagtgcaacctgatttgttggtttgttcatatgatggttgtatggttaatggagttcgatatcataaaaaagtcgagatgaaaaacgtacaactcaaaatcatggtgttttggttgaagcagaatatgaaggaaaaatgtgtaatttttacggcgtcattgatgaaatttgggaagtacactacctctattggaatacagttgtattgttcaaatgttcttggtacaataccaatgggaataaaatgtatactgagtatcattttactagtataaacattagctcaaaatggtttgaagatgaaccatttgttcttgctaatcaagtatgttcagtctttatttagatgatattaaaaaaaataaagattggaaagtagtgcagaaagtgaatcatcgccacatttgggatataccaccaaagccagatcatggtgaagatgatgatgaagatcccactatcatcggttctgaagcatatcaagaagaattttcgaataatattgatttaaattttgattcaacaataagtaatatcaatcttattcgggatgatatcgaagatatagaatgtgatgatggagtatttagtgatattccaataaatcacaatgatgatacagaagaagaaccgtaacttgatgattctgaagatataatattgagtgataaaactaatta

SEQ ID NO: 309159 - DNA, 653 bp, Cannabis indica
ttttgttttgccaattgggaattggatgcccaattcaatccatttgtcttatcactaaaaaaaaagtatgtatcctacttgaaattactcttatgcccttttgtgtacatcctataatgcccttggatccgtacagggccctgacccataccttgctcgactctggtttagaccttgtaaccagcttggacttcgaacccgtacttggccccgacccgaatcaccgacgtggattcaaacccaaatcccgaacttagtctcgacactgacaacctgaatcccgaccacagacttagacctaaattctggatatgtgtgaggaaatataaagaaaaatatgttaaaacaaagaaaaataacgttattttggcaattattttcaaaaataacgttgtttttgttatgttaagtttctttatatacagttaccttttttttggtaattttctatttttaacgatttgtatattgggcttagaattccaattttttcggcccaattttttaaaacacactctttgtacgcgtgggcgcgtgacgtcagggtgagctgatacagctacaacacgcaatcatactgtgcagaggttttcatttcatttgttcatttcaaaagttttatgttcagttttttcatttcattttttcttttt

SEQ ID NO: 309160 - DNA, 3361 bp, Cannabis indica
tacttgtgaatcctagaaattgttattaggattacgacacttcaggagcacccaaggatttggaatctccacgtctgcgggacatcacgtaagacagtagttagcttgtagagtatgcgcaatggcgcttatattgaaaatgatatatgtgagtaattggaaaccaggactaggattatcaccctaacatgagtggtttaatggtctagagttattaccctaaagattattaatgtgaatgtgctatgccatgttatatataagtgtatattgagatttagggttatgcgttcaaggcataatcgggttggactcggtgactagaaccgagatgaaccgttctaaggtcttattgtatttaaacatgtgagcgtaacacgtaggtctatgccacatacacataaataggcgtgtgagcgtaacacgtgggtctgtgtcatacagacaaatgtgaaatggcattgatgtttttgtgatgtgataattatgattattgatattttatatgtcttgccgggttgggcttggctcggacccaaacacgaacttgtactctgtgacccgaaattggaagcggaatcggaagcgaattgggacccgggaacaagaccagaggactaagacctgatgtcggtcatggaacttgaaactgactaggaaccagagccaaacctggaccgggatgcggacccgaattaaaactgggatcaggattcgggacacgaacccaaacccagacacggccttggacccaaatgcaaacgaaggacccggaccgagattggagactcagacatagacctaggtccctaacataaattggggacccaaacccgaaattagaaccagaatcaagacccaagactaggactgggacccaagacccaacctcggtcttggtccgacccgaacccagacacggacacggagcgggacccaggatgcaaatcggacctgaaccaaacacggacctagacctagactaggactaggacccagacccacacccaagccttaaatcgtaccctgtgacccaaaattggaaccgcaactggaagcggacccttacaccctaaaccctaaagcttaaactctaaatccaaaactctttacagttacccttaaaccctaagccctaaaccctgagcccgaagccctaaaccctaaaccctaaatctataaacaaaaaactctaaaccctaaaccctaaccttaacacggcccagacccatacccataccgagatctaaacccaagacccagacctagacccggatccagacctaaacctagaccctaactcaggacatgaacccggacccaaacctagagcagaacctcgtcccggacctagaccttgactgggacccagatcgtgaccccgagcaaaactcgaacagggacctagactcagatagggagccggacccagactcaaaactcgggatccaaactctaacatgaacttggacctagacgggtacctaggatctggacctagatggcggacctgggccccaaacttgacctagacctggaccaaggatgcagaccttgatgggggacttggacccgaaactaggtccctaaaccagggtcgagacccaaaactcgactccagacttaagacacgggacccaaccctggacctagaacttagtacctaactatcaggacaaaaccccaaacccgaacccaaacccaaactttggaaccagcccaagacacgagacacgaactggaacaagacagggatccgaatctagacctgaggcttagacctgacgcgcagtcagtgtttgaatctaggtaccggacccggaatcaaaatcggacaaggtctaggactagaccctagaccttggacagtaatatgacgcaaactcagaccaaaacccatatcgggacttggacccagatcgagcctttgacttgggacctaaacccagacacggacctggacccagaccgagacccagacccagacccataaactagtgccggacacatgacctaagaactagactcggacgtgaacccaaaccaggacttggactcagaacgggactcgagacccgaacccgaacttgaacacgaacttggacccataccgggacctaggacctgaacatagatgggggacccagacctgggaattgtgcccccaaacatggacaagaacatgggccttagaacttcaatcgagatccaggacctgaccctagacccaaacatggacttaggacccaccacgggacttgggatctgggaatccatgcttggactcgacccgtagtcagtgtttggatctgggacttagactagaacccaaacccaaactcgaactcaaaccacgacccagacacataccgagaccagaacccacacctggacctggacttgaacccagaaccgaacccaaccttggaccctaactgagatcgaaacccaaaactgaacctggccccgaacccagatcaagagccgaacccagactcggacccaagctcaacccgaacccgtaccccgtgacttgaaattggaaccgaaacaagaagcggatcgggacctaggaccaggacctcgacccagacccaaaactataatccgaccaggacttggactcgtacacaaacccaccctgggattgggttccaaactttaatccaaacccgaatcgggacttgggacccgaacccacaccagaactcagacccgaacatggaataggaccttggaccttgaatagggatcaagacccaaaactgcaccctagtctcggtcttggacctagttcgagacctagaccgagacctggaacatgaactgaaacaaaactaggacccgtgattgggatccagatcttgtctcgggatctgggaactagggcttggaaaagacccgtagtctgtgtcttgatctgggactcggacaaggacccgaagctggacaaagaccaagacccagtcctagacatgggacccgaaacaaaaacttgaaccagaactagaaggacactggaacaagaccgagactgtgaccagtgtaaagaccgcttagtttaatttggaaattagcagttaattatgcttgattatgaaaattatttattagatatttaaataattatttatgctgttattattcaattctgaaatgcattttatgtcatatagtgaatttcgtaattttgcattttcggtgcgcggcaacatggaactcggtgtttggctcagtaaaatcataacttagtatgttagtattgtgggacggtttttttagacattaggaatgtcgggagtggtcgggaatttagaatttcccaaaataccctttagtgcctttatgttgttttagtatg

SEQ ID NO: 309161 - DNA, 1431 bp, Cannabis indica
ctaagcgggctttacagtaatgtaggacagacatcagctagtctttgtaaaagaatccaagaatcagccttgttcttagcatccagagcaccataaaaagtagtaaagtggaaactagcttcatcctcagcctttacatgacaatcaaaaaaagtacgtccaaaattaagtagagtaacatcgatactttgttgccaaagaagcatcaaaccaccactaagactagatcgtggtgattccaaaccattattaaaatttaatgtctgtcaaaaacgtgaaatagagttcggtggaagttttgtttccataagaaacaaaatatgcgacgattgttgtttgacaagcaattgaagatgcctgaatgcacttgggtttcctaatcctcgcgcattccaactcaatattttcataatgaatcgcgggattgcaaagtaatctccgtggtattgtcaataaagccatccgaatccatatcatcataggaaacattttggcgtgaacattctcccaatgacagaggcgaggggtcaacaattgtgctttcattacggcatcttttaagggattatctcatggtaagtgtatcactatgtctctttggtacagaagcaggtgggatgttctctttgttagatgcaacagcaacaatccaaggctgaaagacactggcagtagcagtaacagatggtgtggatgaataaatgggcttagataaaggaggcgtaaggtggttagatggggtggaaaacatgttagttggtgccaatgttggtgggtaagtagccacgggaaaagatggccttgctgcagaaccaatatctggtgtaaaaatgccatgcaagtttgtgacagtaaggaaattgttgtcatgtgattcagaggttgtttgactagccatgttagagagattggctgtagtgggtggtaaagatgaattataggtggttgttagtggtgtttgttgggtagtatgatgagaaatggtagcagtagggaggctggcagggttgatggagattttgatccaactaacatacgtggttgagggttggttatagttcttaggcgaggaatggttggggtaagagtggtataggcaagacgagttaataatggccagacatttctatatttgtcatagcccgtagaaggaagcttggcacctttcatccaaggttcgtacaggagatcatcaacattaccattatccattcgctccataaacttgatacatttctcaaaggggttttcgagtaaaccacactcaaaacaaaactccggaagacgctcatatctaaaatcgatccaaaacttgtctctaacttttggaaggctaatcattggggcatgaggaaggggtttgttgatcgataatttgacatgaatccgaagaaaaggaccccatccttcatcaagtgaatcctcataaac

SEQ ID NO: 309162 - DNA, 3232 bp, Cannabis indica
tggcttgtggtatacctggtaatttacgtacccttgtgcaagaaacttactttagtaatatactagagcactatctaatgactaactctaaaggaaatcacttgatttctagacatagagtttacttatctaaggaacaattttaactattccagaatagataaatgtcaagaaaagagttccttaagcatcaatagtgagaggttttaacgcagattttcattaaccaaaaatagtaagcctttacgtaataaatatgtcacataaataataagaaataataaatgtatatataacaccagatatttttacatagttttgcagttaaatttgcatactccacgagtctatcttatttaagatattttttgaatacaagatacaattgataatatctttttttctccctccaattcttcgtccccttatctgtggaatctgcccctatttataggaatacaggttggcaattatttacattcaattcaaaatataaccataaatgaaatgtgatcaattcccacatttcatttaaatcgtatgttggataatactagataatcgcttaactgcctgtcattcttatccttatagatgattaatgctgatttggacaatcgtatctcgcttatctctgagttgttatctttgtctattataatgtggaaaaatgctaagtgttagcagatgattcatctcattgagtttccttagaatagcggggtgtctgtctcattattcgtaacccaaggtcactttgcataactgtattcactcctttgaataaatgaattatcttcttgaggtcctgtacctcgaggcgagtgtgtgtctcatcaatataagttctaatagcctttttatctcgcttaagattatgtagtcagggagttatgaataagttccattaatcctttatcaacgagttattctttttctttgtatttaatgatataatttcattatatcaagtgatttatattccactgcaagatatgtgtcactctctaaagtgtagctaaattttgggtataacaattgccccttaaaaagttcttttttaataaaaagagctttttaaatgattacatgggtatttacgtcttaatcccagtttgaaaaattacatgctttgagttttgacggttcatgattttgaggcacatcattaggattaaattcccttcttttccaattctctctagttcttatccgttagatctttcttcttttaatcttacagtaatcagtcttaaagtataaaactcaagagaaaacacttatttgccatttttgccttttaaatcttcgaacccctctgaaaaaccatcatcatttttcattaccttgcatgccctctttgtccttgacctattttctccgtatttcctcagatttcatctttaatcttagaaattcttagagcccatcatcgcattcatcacgattccaatcgcgaagttattcgttgcctagaaatctttagaaacagagtaagtggtttatttcttactctctattattccctttttcctaagttgatacttttatttttgcttctgattgcatctttttttattgtgtttggtttaagtatttttggattttgcttttgggtaatttctagggctttgaggagtgaacttagatttattaaattcccaagtttctggtttaagttgaattaactccgtccaggaattgggattattattttattctttatcaatatgttccaatctggttttgagttttcaactctagatttcctagaaatcgaatgtcctaaagaattagcccttccattcaaacccaaaatccaaagacctaaatccaaacttgagattaataatgccaaaattagggataatctaataaaaaccaatcaagatgaaattgctagtcgctataggcaatttttacaagagataactgagggtaaacgttgttattttcaagacacagcttggcctgatcctcaaactttattttttattcctttagcgagacccttgtttttaccctgagtcactgttgctttttcatcaggtgaccttgattttgaaattatgtccaccaagcctcataaatcaaaggccccccaacatcctaatgtcactttcgaagttgagcttattaaatcaaaggtgagggccattggagaatatgttggtggcgtattaaagtcttgcgacatcaagcaaaggtgtggatgtcgcattagatctattgctcctggggaattcagctgcttcccactagaaagagtaatccacgaggagtgcagtggcaccagtactagtggcttgtctaggataggcgcttggagcctcgagcacattaaggctgaagcagttctccccttgagagagtactacaaagaattttgtaattatcttggaattgaccctttttcagttaattccaagttcttacaagattatagcaggtttaaaggttttgtaccatattttaggctgggagtgccccactcctcttgagatagtttatttttattctgtcaaagttgttcccgcgaggaagcggtgttcaaggggcttttattatctcagtacccacacaaatgatcgtaggatcattgtgaggttgccaaacaagacagagttcaaggatgacttcttctagactactggtctttctcttatcaacacaactgcattttgcattatacataagtaatttctgtctcaaaaacttggttttgagttctttttatattatgactttgaggtcgcttacttattacacttattatgttgacagtggttatcaaaagaccaaaccccatctttgagatggtcgagcgccataaaatcctgctgggtcttccattcagattgcgatcagcagatttccttttgaacgaggccaatctgaggtttgtcaacctccttagcttggacgagttcacttgtgactactaggttctaaagtactcttcgtgggagaaggtcctagtcccagccgatgtggaaagccaggattatgttgctcgcgtccattatctctggaaagtaacccctcaggaagctaaagaagaagaatctcgaggtaatcaatgtggatggtcacccaccgtacttaggactgcacgtacctcgttagtcacctttagggataggcaatataatttttatacatgggaaaaactttctatagatcgcataacccataggtttgatagttggtaccctcaattccatgtccagct

SEQ ID NO: 309163 - DNA, 1640 bp, Cannabis indica
ttttaaaaaaaatccaaatagtttaagtactaaaaattaggttcatttccattccaaaaaataaaaaaggttcatttagtgttgattgacataaaatactattggatgggtatctttttgttacctcaacttgtgattgaagagatttacatattatatagaaactttttgttagtagttaaaggtaactcgagcaagcttcacattacttcttgggagtaaaccaaagtcttttggtgaagtgggccttcaggaaggagttaaatcgaataaaactctagccaaatatgtttgggctatcacaataaagcaggataatctcttagtaaagtggattgatacaatttgttaaaaaaatcaagacttcttggaatatgagctgaaaattgatgttagatggtgttaaaggaaattggttaatctcaagaaacttttttttttcaagaggaaatcttagaagccgacaagagtgacaaattcaaaatcagcaaattatctgataactttctagctaatgtgttaaggttgaaaattttcaatctctatggtgtcatttgtctatgcctaaggatagattattattcttttttagctaatggcaaaaggtcattttcccacaagggatcttgtaacgccttaacttcagttgtgtagtctcatacctacacagtatacatggatatgtcactttggctaattcttggaatgatgactgattctgcaaagtaacatgatccaaccaaatatatttaggctatcacaacaaagcaggacgatctctaggtgaagtagattaatgcaatttatctgagaaactaggacttctgggattataagctaaaacttgatgttagttggtattagaggaaattgattaatctcaagaaaactttttttttcgagaggaattcttagaaggtagcaagggtgacaaattcaaaatcagcaaaataaatggtacctttctagctcaatgtgttaaggttgaaaattttcgagctaattaaactcgttatgattcttacttaaggatatatatatatatatatatgatatatttaaacacacatcattgttgtcgaagaaaaatagacaacactaaatattgcgagtatttaaggtaaactagaacactctagtgcagaaaataacgtgaatataaaagagacaaaagaattataatggttcagtaagggcttgacctgcttaatccatttttacaagaatttttgcttatcctctatttcggattgaatcacccctctttatatagaaagtaagtgatcatttaagtaacataactaatcagataggaccgttacaactttaattatatttaatcaatatgaaaacgtttacaaaataaataaaagagcagtttcgatcgttgtcagttaatactcgaacgtatgtgaatttggaagtcgcatattgactgttcactttcttgagtaacaaataaacttccagattatatgtggagacttcttaagtttttttatatttctttacttagtggtgcatgggtactcgcgatatgtattaagtttacttttacttgagcaaagacaatggctacttatgtggtttatgccctaaataaaacttcaattcaatgtaatccattttattcaacatca

SEQ ID NO: 309164 - DNA, 929 bp, Cannabis indica
tgaatttcattcaaaaaaaaaaaacccatactattaaattagaaaaggccaaaaattacagttgtctttccttctcatgaatttatacttgtggtataggtagctcttattacatattccaaataagaagtaagtagacataagtcattatctcaattaatagctaaattaatagatataagttattatctcaaaccccaacaaccaaacaaaataatggtaatcaattaaatatataagacacaccacatttttatataaaaaatagaaattgatacttattatttacaaaaatactttcataaggtgtgaacaataattttatctttaatgagcttttatttatcaaaatatcacttacacatatacattcatgtcagcctaaacaaccttccaatcattatcctttcgaaacacacgtttaaaattccttcgccatcttcttcttccaattgcctcatttatcagtttttttggctattaccttatgttctgcttctctatttccattaccaaaaaagctttcaaaatgggtcatgatcagttgctaacaaggctaaagggaaacgtctagtcatcgacaatgatgacttcgatttcgcacccccgtagctaaaggtggtcgtcgtctcatgaagaagaaatcgaaggtgtctttgcctgaaaaaatttcaacttcgacgcccagaagagaaagaaaaagtcagcttcaacgcaattgtgatgaaactgcaatgcaatagttatatccgtagcgagccaactaacataaaaccacaaaacagctaataatttcacatatttaatacaaatgaatattacaataattatattttatctgttcaggtcccgtatttgataaacacgagcccttttttttttttttttataatactatgatattgcaatagcaaaactattattcaact

SEQ ID NO: 309165 - DNA, 2685 bp, Cannabis indica
aatcgcatcacataattaggtgagcccgtgccaaagcttggcacccatacatcacataattccatcacctaataaggtgaacccgtgccataacctgacgccaatatattgcatcgcctaatcaaacgagcctgtacctatgatcgctgctcacatgtcactgccgctcgtacctaataaggtaagctgccaggaaggaacccaacgacagtttcaacctattacatagcctgatattctcatatcactggtcgcatgtacctaataaggtacgccgccaggtatatcgcataacctaataaggtaggcccgtatatcacattactacctaattaatctataataaataataaatcctaattattcataattaagtttctaggatattacaactaagggatattgtatacacattatttttctttatgtctttccttgtccacataagagatttgaatttcgtagaaacatcaaattcagatgtaggagactaaggacctggccgactgctactttttcttggtgtttggtgattctcactatggagggggggggggtcttctttgtcgctctacttgcttggaattagttccattcacaggggaggtacctctatagccacatcatcattcctacccaaatctaccataggatcattgttgtgaaatagagcatcgagctcatctgaatgatcaaatgcaatatcagctttgtgattatctatattagtggggagttgctttttcaaatcaaccctcatattagtttatgggaaaaggtcataacaacacttcgaggggttacagttggggcagcagttgggggagtaagctccaaatttacattcttcctcaccttagtcacaaatagtggcaacaagttgtccacacttattttttacatcatgctcaagaacactcgtagttgactatcttttattaaaacctccagtggaaacttggtgtcttttatgtacatgtaacatacctctaatttcagttcatacaccaaagggtccgcatccaactcttcacacagaacttcacgcactttttccaatgtagtgtcaatgtaaaacattattatcttacttgttggcgaattgaatacccagttcaaattctctacaacccaaactctatcatatagtacaggcaaaaatacagctgaatctgtccaaaaaaaaaaacaataaacaaatacgaaaaataaaataaaaaattagctaaatatatcgcacaataaaaaaataatatcgtaaataaatgtggcacaaacatcactcaagaacaaataatatcgcattatatcgcacaaaaagacacaacaagaaaatttaaaaaacaataaacaatatcgcataatgatgtaaacatatcgcataaaaattacaaaactatgaaaatcgcacaacattgccatgacaccgtctaatgtcgccaaaaataatgcaagtcatccctaacttctgatttatgttggcatcgcacacaaaatcacacaataacgtacaaatcgtaaaaattcgaaaaactcaaaaaaaaaaacaatgttcgggtacaaactttgatttcatttcaggtcacaaaaacaacataatacaacaaataatgtgtagatccatgcaatacaataaaaaccaactatattttgtataaaaattactattgcttttaaagtgaggaaagtgaaggttttggtgagaaaaatcaagcttttagaggtccgacaaggtgtggttgaggtccgacatgattgaggtgtgctaaggttgttactactagaaaatggatattttatcccactttttatcttttcaagtaaagtgggataaaaagtatgttgatagtttttaccccacttttatataaggcacaagggccatgtttggtttagcactaaagaaaaaattacactaaaaaaaggttaagattgattttttattcactagccaaacacgcccctgatatgtcttttgtcacactttggagcaagggccttgtttggctggtcactaaaaaaatcaaaatttcaccttttattatttttctagagccaaacggggtaaaggagaaacccttttatccatatttttgctaaaaactgcgataaaagagtttccctaatctttttaacccatttagggttttattttaggtctgatatatttttctcacatatgttctctctcttccgccgctccttctccttcctccccacttctatatctccgtccaacagccaagtgacttttttctcgtgacgaacgaccaacgaagttcagatctaggctccacatcctctgaaacatccaagtattgttccatcacgttctttattttttttggaaaaataaatttgtactttgtatattctggatctctatcattctctcgtttcttaggtggacggaagttggaagtttgtggcagttcgttaaacacggtgcttctgagtttgtggcatcgacggcggttcgtggtgattgttgatggtgattcgtggttgttgagtgtctgtggtttttattgtactcatatttattttgggttttattatactaatttgtatgttatatacaaaaaaaaaattgtaaagtaatggattttttctatctgaaaaacatatgtataaattttgtaaaacaatggattgataataagattttaggtctgattatttttt

SEQ ID NO: 309166 - DNA, 1133 bp, Cannabis indica
gacgagtatgttgttcttggatcagaccaatgtaaagttggtaccgtgcggtctcgatcggagtggttctgtgggtctccgtcggaggcgtctcagtcggaggtggcgatcgtcttggtcggaggtgggggtcgtctcgtggtgggaggtgggagtcgcgcggttcggttcaggcgaagtgggtagagagagtttgtttgagaaggggagagaaagggttagaaattatgagggtattttaggggtttggtaaaagtatcctatttttaaaattatcctaattattggttctcctaaccaattatcccttataaaatgcataaaaagtcaaattttccttttcaaatttgtaggaaggagccacgtgtctttccttgaaatagaaaattgtagtaaaagcatggcacgtgcgtttcacgtgctgtgtaatacacttaagtgattaattttttagtttaattttgtttgacaattgtttacattgtagcagtttaaaacattttacaaaattttaaaaattttgaaaaaatttaacatgctgaaaatagggtttaaaattcaaacaatctattttatattgtataaattaaaagcgtttcatgtgtaatatactgtttgaatcttattttcagcatgttaaatatttttaaatttttccgaatgtataaattaaaagcgtttcatgtgtaatacactcgtttcggccgtcttacaatagaatttcaaaatctcgtagagtgatttttgttttgctttacgagcaatcttcttgacgttcggcattttgatctcttctttttcacttgaacactacacaaccacaacaaaattccccttttcttctctcattttaaaatatgtccaatgccacaccaataataatctagcaacacctcaattgatccaaaaaacacaataattccaatgataattcaatctgcccgaaactaccaatctttctaaatcacaccaaatattcacaatcacaccaaaaattccaacacttcaccaatgattcgactaacaatccaattccttccaagccaccctaagcaaacaattttataccactacaccaaataatttttgttatgttttcttcttatttaaaattttatctatatattaatatt

SEQ ID NO: 309167 - DNA, 975 bp, Cannabis indica
ttagtctatgttgatgatatattaatcacatgaagtgatcaaactgtagtggaagctattattacagctcttaatagtcagattgctatgacagatctaggccctctcacatacttccttggtattgaagtgacataaactaatacatgtattcatttgtcacatgccaaatatgctaaaaatctgcttgttaaggctcaaatgagtaatgccaagcttgtatggttgtacctactccaatgacaagtggtattcgtttatcagttgactaaagagaaccattacaagatgttcaactgtatatgtcagttgttggagccctgtaatatctgaccatcacaaggcctgaactttccttcagtgtaaataaggtttgccaatttatgcaaaaacctttgtctacaaattgttcagctgttaaaagaatacttcgctacataagtggtacaatagagtatgggctgcatctgcaaaaaaccagatactcttgagcttgtagcctagtgtgatgcagactgggcctcagacccagataatagaagatcaactacatggtttgatattttccttggctcaaatatgattgcttggaaaagcaaaaaagcaagaccatatcttgatctagcactgaagctgagtataaaagtgctgctagtgttacagctgaattgacttagttgcggtatctgctctctaaacttcgaattcaactctctcaacttcctactatatggtgcgataatctaagtaccatcatgctcacccagaattctgtgcttcactaaagaacataacatattgagctcgacctgtatttcatcagagaaaaggtgcttaataaaactgtccagatcaaacatctctctgcctatgatcatttggcagatgggctaattaaagccatatcgagtcaaagatttaccgagttcagacataaacttaaaattgaagatcgttcaattatgagtttgaggg

SEQ ID NO: 309168 - DNA, 1222 bp, Cannabis indica
agtctagtatagacttagaaattgttctcactgtgacctcctcacgccacttaggaaattcgatatacatataatgagttggttgttatgtaaagatgtaaagcttaatgtagggagagaaagagaggggaaaaaaataaaaacttgtgtgaaatttagaactactttttttatgtagcaacgtttgtgcttgaaaataatgcataccatattgtaggtttgctcgctcggcaaaggaaggcagagctacaacgattgaatgaacagcttcgccagataaatgcagctcttagaaggcaagcaaagatcgagtcttatgctcccacattaagttatgcccctacagcaggaagaataccagagagtgaggtaataattgattcaaggaagcaagaattgatttcccgtttgaaagctgggaagaattttttgaggaatcaagaaccagagaaagcatttgtggaatttaagactgcccttcaacttgctcaagaattgaatgatgctatagaggagaagaaagcagccagaggcttaggtttgtgtttgtatattttataaaacttttaagagtggccatgaacgttttttatacaggcgttgatttggctcctttttttcattttttttttgctgacacaggagcttcccttcaaaggcaaggtaagtatcaggaggctataaaataccattcattggttttggagatctccgaacgtgaaagagagaattcaggaaacaccgaagcttatggagctatagccgattgttataccgagcttggagatcttgagcgtgcagcgaaattttatgaccagtatatttcaaggttggaaaaagactgataaaaatattttgttcaagctgctccagggtgttagaaaatttagttgagggtagggacaatggcctgcggatcttttcagtttacttgtgttcaaaaatgtgtagaatgctttttctaaggtgtagaatgctttaaactcaatttgaataaataattggaaaggaaggagtaacccggttgtagagattatgataaaaattaaatacaaaaaaaaatactaaagaccaaaatcacaatcaataatacatcgatttgagaattaaataattaatccgtagcatcccacaagtacctaaatgcgggccaaaaatgggggaagcggcaggaaatgaaggtttacaacccaaaatcagctgaatggttggaaattaaaaa

SEQ ID NO: 309169 - DNA, 890 bp, Cannabis indica
atatagatggggaatttgacaaataatagtaatttacaccctgctaataatattgtgtccttttaaaaccgacactaaaaaacttgggaaatcataaataagttttttggtgtcattttataactaacactaaagaacctttaagtgtcggttataaaatgagaccaaaacttaatggtgtcggtttaaaaccgacactaaaagataaaacataaatgtatactttaagtgtcacttataaaacgagaccaatactcaatggtgtcgttttagaaccgacaccaataatttactttttgtcactgtagtataggtgtcgttttatgaaccgacactaaaagtattagtctcagtttaaaaccaacaccaaaagtgtattttgtagtagtgtatttatcttttttataatgacaataaagtctaatttatttatctataaacagtttttccgtaaaggaaaaaaaaaaaaaaccatcacgagacatatcatagtatgcatgtgaagaaaattaatacaatatatattgttgtatgtaaacattatttgtatacaattaataattaacaaacaacaattctcttatatatcatttactatatattttatattgttaataaagtgaacaatcttaacttgaagaatatataataatatgatctatatgtgtataaacatttttgttttggacttttattgttaatttggtccacaagatcatataaataatatatgaaaaatcaagattgaaaagtacaataagaaagaagtcgatatatacagggccggccctaggcataggcgggctaggcccgtgcctagggcccacactttccgggggcccaaaataaaaaaataaaaaaaaattattaggcttttattaagtaaaatt

SEQ ID NO: 309170 - DNA, 986 bp, Cannabis indica
acagttgttttattttttttaattaagaaaaaattctcagaaaacatatgtaaaatcgttttcatattttattttttaaactatgatttaatttttaaaagcaaactaggtcagcctgaaaatttctataaacattttcacttattataatagtctattttatatctcttaagaaaaaaaaaatctaattttttttattaatatttttttttttcaaataaaaaaaatgggtgcttctacaatactctcctttaaaaggggtttgccgatgcattttatgttgttgagagaattttttagttcaatttttaatggttacattgtagttattaaaagataaaattttgagagatttagaaaaatttaacatgccgaaaactgaggtaaaataatttgttatacgtgaggggtaaaatattatttgaattttatttttgatatgtgaaatttttttgaatttctaaaaaatttacaagatgcaaataactataatatagacaacaatgtaaaaaaattagatttaattgctaactttacaatggccactaagcactttggcttaactactagtgcaattgttgcattcataacttctcttcgagaccttccaagcctccaaatctagagaaatgatcaaaccaactatgaatatccatcaatgaccaatcaaaggatagatgttaaagagattctatctctgtatcacaattaaggtagtagctagaaagaagctccattatcttgaagcgatgtttaagaacacaatatattctaaacagcacaaatattacgcgccttaatagcattgagaacagataagtagaaaattcttaccttaaaccttccattctttccggccttgatatttcgaagcttttttaacttcctgaaataccttcttaaaaacaatattaaccaaaagtgaattgatttttaaaacagaaaataacattttgttgttttcaaaattcttgttttttgtaact

SEQ ID NO: 309171 - DNA, 829 bp, Cannabis indica
tttgccaatgccatggaaaggacataacacttatccaaggtgtaagtatacctatcgttgaatatcatgcccgtctaaatccagtgaactaaaaaatcagggagttaaacttttgaacatataattatgattatcttccaatgtgttgacaacactataatcatgaacaaatacatatgttatagacttaatagaatttatactttaaatacaatcatgaaataaatcatgtgaaccatgcaacataaatgtgtattttttatctttattaaatagtaaatctagattatataatgaatacgtcagcttgtcttcggcactcatctataagttcaagttgcgtaaccccaacactgatcttccgtacatggggaatgcttcattcctagagagcacattggcccaaggaagaccactatttgagagcaggttggaagcaaaccagaccaccgtctagccaaaaggatcatccttaaggtagtttgatgaggagatggtcgactcaactactgaggaggtggctgaccaaggctttgaccaggtggctagccagcctacagaggctatggctgacctacacttcggcaatccaaactcggcagtttctgattcagccccacttgcacctgcacacatgtagtttcagcttattagtatttcaagattatggttctataagtatagacactttatttcatgttctatatggcctacgagctttttacttttgaacactacttatttttgttgggttttatgccctaaataaaactcatttcaatataatcatatttacttattaatatagatcaaaaataacatttaatgt

SEQ ID NO: 309172 - DNA, 3812 bp, Cannabis indica
tttttgttattgaacaatgtttattttattcctaaatgtacccggaacattatttctttatctctttcgcctgaacaatttttcaatattggttttattaataatgaaattattttctccaagaatagtacacctatttattctgcaaaacagagtaacagacgttgtggattcaaactaagtgagcaattaattttaaataataaattatttagaatagcattgcctcaacataataagaggcaaaagatttatgatgatgataaaacgtatctatgatatctatgtttaggctatatttgtctagatagaataaactagttaataaaggatggtcctttgagagaactataagttggaagtatgtgaatcttgtctagaatggaagattgctaagagacctttttctacaaaaggcaatggagccaaaaaaaaaaacaacttgagctagaatacctcaataaaatagtgttacaaagagaagaagtcggaccttgttagacatggtcagatcgatgatgtgctgctcatcactgccactaaacttctaggcatacacacttctagcatcaacttacattctgaatgtagtaccctcaaagagcataagaaatacttcaatggaattatggaatgggaaaaaacccaatttgaaatatttccatatttggatttgtcctactcatgttcttaaacccaagactggaaaacttgctcctagaactgaagtgtgtatgtttgtaggatattgagatgaaactcgaggtgcatatttctatagtcatcaagacaacaaagtatttgtatctataaatactacttttcttgaacatgactgcatgaaaagtcacaagccacatagtcaagtgcttatcgatgaaatcaaaaatgagaagatttatgaaccaaagattttaacaccattagtggaatgaccaatagcagttaccacgattcctaaaaagaaaacctcagtacatcatcgcagtgggaggattgtgagataacatgtccactatgaacatgaagcacatgctcttatctctgacacagacaaggataatccattgacttacaaagaagcaatggaagaccataactgagacaagtggaacaatgacatggattaagaaattgattccatgtccaccaacaaagtctgggaatatgaaactccacctaaagatattacgcccatagggtgtaagtatatttttaagaaaaagagaaatgctgaagggaaggtagagacctttaaagctaggcttttagccaaaggcaacacacatcgagaaagcttcgattatgatgaaaccttctctcctgttgcaatgcttacatctattcacattcttttttctaatgccacttatgattatgagatatggcaaatggacatcaagaatgcttttctaaatggaaatcttgatgaagtcatttatatggaacaactagaagggtatgtgttacaaggagaagatcaaaaggtgtgcaagttacttaaatccatttatgaattgaagcaagcctctagatcatagaatatgacctttaataaaactattaaagagtgtggcttcgaacaaaacaaagatgaagcttgtgtatagaaatacattaaaggtaatatagtggtattcctagttctttatgttgatgatattctacttattggaaacaatgtacaaaggttgtcagatgtaaagaagtggttagttgataaattccaaatgaaagatttgggagaagcatgctatgttcttgggatcaaaatctgtagagatagcaagcgaagaacattagcactttctcaagcaacttatattgataagattcttgaaagattctcaatggagaattccaagaatagaaaattaccgtctagatatgaaattactctatgtaaggatcaatgtccaaagacttctcaaaaggaagaggacatgagaaagtactcttatgcattagcagttgaaagcttgttgtatgtaatgttgtgtacaaggtttgacatatgctacattgtatggattgttagtcgttacaaatttaattcaggtttggaagactggatagctataaagcacatactcaagtatcttccgagaatgatagatctcatgcttgtatattttggtggagactttaattctattggatatactgattttgattttcagttggacaaaaatagtcaaaagtcaacatctgggttagtatttactctcagtgaaggagttgtagtctggagaagcattaagcaaaccagtattgcagattcaaccgtggaagttgaatatatagtagcttcaaagtagctaaggaagcaatttggttgaaggaattttacactgttctagaagtagttctagaagtagagaaaccactagtactctactatgacaacagtggagtggtggccaactccaaggaacctaagagccataagagagggaagcacattaagaggaagtgcatttactaagggatacattagagataggtgatttgacggtcttgaagatcacgtcgaaacataacctggtagatccattcacaaagatgctacgagcaaaatcttttatggattatataactaatatgggactaatagagatgcccagtttactttttggaaaagtgggaatttgttggggtttattccctaaaaattctataaagacatttctaattattaataaagagtttaacatattgatatgaatcggtgtaatttatatctccaaatatcatttttacatcctaatagcatcttcaatttgaagacctatattttctccacctatacaatgtttttacaattactctgtataactctctattacatttaatgctcttctataactttacaatatttgagaaccattctgtatcgactgtagtgatattttaaggccaaacatgtatgattcttctcttaacttgttctttagttaaacatatcacttgtgcctccttttgttccacagaattccaaagcaggtcatcccaagatcaccatacccgatacacaagtgcagcattacagcatacaataccgctttcttaaatcaactaagttttgcacgctctatccacatcagtatcgagtttaaatcattcgactccattttctagtccagccactctttaatctgcagtaaacattacagagaaaaggaacaagagaaaaacaagtgagtcgttgtctctagttgctgcctgcaaaacaagcattgatctttagtaatgatgctgaaatgtttcagttgttcccttattctgagtttgtcttggattgcagtccacaaaacaaagctatgtcgtgggatgttgagtttactccataatccatgactccaattcactttcctttgaggaggacaaataattttgtagccattggagatcttgtactctgtgcttatgaatgttaaactattaatatttattattgtataatttatatatataaatatcaaaaaatttcttatcatatgtggggttgtgacttgtactaatacagagaactaagataacttagctatgaatgaaacagttagcaacatattaaagttatggaatctttaatcaatggttgctagtacgtttcactgatgtccgttcttcagtgaaggtaatctcagttcgatttactgatgcagtatgacatcaaagtgaaggtgttgtatataatagagattatatatgataaggacagatatgaatgaagttatctttatctaacaagttgtttactagaaagacctaattcatatcataacgatgatcaatagtagatcaacataaat

SEQ ID NO: 309173 - DNA, 2755 bp, Cannabis indica
aattattttttttttaaatataagcactacaaaagttttcacctagcaactaacaaaataaagcccaattgtcctgaagatttgaacattctaggtttaattgcctcgatatgcaatcttcatctagcctgacctcactactgttcaacctttgccttacctttacctacaaatataaacaataattgtgagtcgagagactcagtaagaaaaaataaacataagcataaacatataactagatcgtgaccatgcgcccatacacctaaccgcatccctatcccacgtctaatgtgtactaggttttgaatgttcgtacgatattacgattgaccataatatcatcctatactcggtactctaatcgtactgatgtaatatcgtcaattcgtactttcccaaacatatacccattggtattcagtgcaactctatgtacattaatactcctcttactgatatgttatctactaggcaatcaaaaaacatgtacgctaaacatgtaagcatgcatatcattatactaatcttaactcagttttgaatgtaagtgttcaggtcaaccagagtggaaatagctacttgatgatttaacgccctaaatcacaatttacataatttggtaagagacctgctaaatcacttttctgggacttatactcaaaactaaaagtttctctatcgataaatagcgtagtaataccctaaatatcgagaaaacaccaaaaacaaggctttgggaaaaatcccaaaaaatggtaggccgttttcctaaaactggttagctatttttctgggacactgccagagaaaacggaagatcgtttacgaaaaaatagtctatcgttttctactacaaattttccgaaaatcccattttaaccccaaaactatcccaaatcttctacaaggctccgaaacccgtattttgggtcaaagaaacataatccaacactaaacagcaaccataagcccctaataacaaatccaccattataggaccaagtttgagtttgaaagctcaaacattggtcaatcatagatacaaccatcaaaaccaacatataacaacttaaacaacaatacattaactcaagaaaacaacccctaatactcagttcatacaaaaacccaaacccaaaaattgcatgtgaaacctaacctttaactaagaaatttaaagagaaattgaaggaggagattaccatgggtttctcctcactatctactatgaaatcccagttgagaaaccttagtttcttggtcttaaaatggtgagaatttttggtttgatttggtatttctttaggccaaaaatggaggaaagagaaagggaaaggaaaatgtttttcttgattaatcttgtttttgttggataatgactcaatttgtttttctttaatttagcttggtttataataaaaaaccgtggattaacctagaaatccatttaactccactaacaaacaaaaatggcaattgagaactttgccctttacttaaacttgaagttatctaagaacttatgggtaaaatgattcaaaatcttaaccctgaataatcgacattccaaatgtctaactattttatcccattatactcaattgtatctatgtgactcaaatttactaaatcgtcacattctatttttaccgagtataaaatataaaaaaaaatatgaaatttcatgtataacatacacctagcattcaaaaatatacctctgtaattgaaaatataataattcgaagcctattcttgacaataaaccttaattatctaaaggggcatataatgataaataaatccttaatcatcttctaatttccataataaaatcaagcaatcattataataattccctgttaaaaggatttatccttgaaatctaacttgaaccacttcgaatactgagaccatatcagactccaattcccaggtagcttcctctccaccttactgtttctcaagagtaccttaatcaatgctttggtcttgttccaaagaacattatctttcttatcaaggatttacattggtttctccttatcaaataagtttggttagagctctagggcttcataactcaagaaatgagttggccctaaaatgtattttcttaacattgaaacatgaaatatgttgtgtactactaacaatgttagaggcaaggctagagggtaagctaccaatctaaacttctcgataactttgaaaggcttagtgaatctagggcacaacttgcccttttttcacaaaacatttaaccccattcactagggatacccgtaggaggacaagatctcctacctaaaattccatatttctacatttcgaatttgcataacttttctacctactctgagaagcaagaactctggccttgaatttctctatagcctcattggtccgctgaactgattctagacctatttattttctttctcatatctcatcccagcgaattagagattgacattttttgtcatacaaaaactcataccatccctatactttgataactattattgtatgaaaattctatcaattagggctgagcatcggtcagtttggtcaatttttttctatataaaaatccaaaattttgttttcgatttggattggtgcaatccgaaaaccgaccgaccaatccagaacctattccaatttattctataaatacattattctacattttacaactacaaacatataatttaattattcaaaaactaattatcttattcttttaact

SEQ ID NO: 309174 - DNA, 1778 bp, Cannabis indica
tggtggggatggagcatagacactttccgtgttgggagaaccaagattatatctactttgtgttaaaccttctcaaagagcaccaatgggtggatgttgaggtagatattgacaactaggagattgttgtatataactgtaatattggtgccacgactgaggagaacattaagtcatatttgaagccttatagcaagatattttcatccttattgcaggctagtggttattttcaattaaatcattatgtactttcggttgatttaggtgatctcagctagcttctaccactacattatagaagagctacctctgaagttttaccagaaacaaaaacaagataaatctctctcttttcatttatttaattttgtagtccattatgaatcacctaacttaattgttgctagtatttctaatattttaatttgtagtggcaattgtggaatgtttctcgttgaatacattgagcactgcatgttggatcgttcattcgagcttgttacggatgagaacatgctcacctttagacataggtggtgtgtagacttattttaccagaatttgacctggtagttgactgcatagtacattttttgtaattagtttaagacaatagtatttttgtaacttacttcatctacacataatcttttgtttaaactcgcccaaacatcgcatagtcattgtaaatattacaattcatgaaaaatatcaagatctaatagaatatgaaatcaaatcgcataaatattgcaaagatatcacatagatatcgtgaataatgtaaattttgtaaaaaacttggcgaaaaatggataattaattagcaaaaatgtcacacaaatatcgcatataaatcataattattgcaatatatgaaaaatattaagatcttatgaaacatggaaagttaaactgtaaaaatattgcatagacatcgtgaaaattgcaatatatgaaatatattaaaatatggaaagtgaaatcgcacaattgttgcactgatatcacatatacatcgtaaaaaaaatgaataaatatgacaaatattgaaatataaatcgcaccaatgtcgcttacatatggcataaaatcgtaaataatatgatttctagcaaacaaaacatggaaattaaaatcacacagacatcacagaaatgtcgcaaacacaataaaaaaatacatggccactgttaaatatttaacatggccaaaacaatccagttaaacaacaactagtaatacaacacatatgcaactaatattgatagctaagaaactattagagaaaaggttcaaactcgagcgttgcatgttgctttgttgtgccctacacctccacagagtgaacaatgatgaggttccactagtacctgaccattagacagtcgacgctttgtcagtcttctactggcattgctcttcctaggccaacttattggttttttctccaatggtaccctgactcttatgctcttgatgtgttctagtaatacccactcatcttcctcgccaacaatattaattgttgcaacgcagatcttcttccaagtttcttttgtgtaatatggggagcaaagtgcgtataggctcgcattctgactaattgccgcagcacatgcatgtggacaagggattttatgcaattggaacagtctaaaagtgcatgttctctccactaagtccacatcgtcacctctctcaccttgaggactcataccaacattaaattattgcgcaccattacgaaggacactcctgaacataccatcttt

SEQ ID NO: 309175 - DNA, 2017 bp, Cannabis indica
aaaagggctttcttaacaactatcaaacacctcaacctgttataattcatagcacatcttggtctagtcttccagttccagcatttgagtccactgatttttcttcctctggccgtgtacattcccatactatggcatcctctgaagcatcaccacgatctcctcaggttaattcaccccctgttgactcattttccactaatcacagtcccatttcaggtcaggcaggggaggaatatgatcattttgctgaaccacttgaatttggctcgactgacaattatattgttgagcctgaacctgaaccagcaactgccactcctggtgcttctggtgttgacatcacaacaggtgatgaacctgctcttgacactgaaccgcagcctactcttgccactgccttacagccctctcatcctatggttactcgtgggaaggcaggcatattcagacccagaacatatctcagcacatccaaagcttctcctacctttgctgaaccagaatctgttgaacatgctctccaacatcctggttggaaaggtgcaatggacactgaagtggttgctctaaagaaaacaacacttggattctagtaccaccaggaacttatcagaatttgattggtaacaagtggatattcagaatcaagctaagagcagatggaaccattgaaagattaaaagctagacttgttgctaaggggtttcatcaaacctggaatagattatggtgagacattcagtcctgtaattaaagcttcaacagttagaattgtcctcaccatagctatttcaaaaggttgggacataaggcaactggacattaacaatgcctttctaaatggcacactggaagaggaggtatatatggttcaaccacaaggttttgaagaaaaagggaaagaaaattgggtttgcaagttgaataagtcactgtatggcctgaagcaagctcctagagcttggtttgataagctcaaaaagacactcacagattggaaatttcaaaattccaaggcagatacttctttattcttctacaaatctgaaacggctgttatacttgttctcatttacgtagatgatattgttgtgactggaagcaactctaagatggtgactgaattcatttgcaaacttgacagattgtttgccttaaaagatcttggatccttgcattactttctgggaatagaagtttacagggacatgacaggtttatatctcacacaaacaaagtatatagaagacatattgaagaaagtcaatctgagcaacctaaaatcatgtcctacacccatcaatgctggcaaaccaatgtctataaatgaaggagagcctatgcatgatccctccatttacagaagcattatcgggtccttacagtacctctgccacacaagaccagacatagcttattctgtgaataagctaagtcaattcctacaaaagcctacaaatgtccactggaatgctgtgaagagggtcctgcgatacctgaagggaaccaagactttgggattacacataagctgcagcaacaaactcagcataactggcttctctgatgcagattgggcctcatgccctgatgatagacgttcagttgctggctactgtgtgtacctgggagagaccttggtatcttggtcttctaaaaagcaagctgtagtctcaagatcgagcactgaatcggagtacagagcattggctcatgttgctgctgaaatttcatggatcgagtcactgctcaaagaactccgatttcctttactgctgccttctattacatggtgtgataacatcagtgcaagtgcacttgcatccaatcccgtgtttcatgcaagaacaaaacacatcgaaatcgatgttcattatgtccgagacaaggtgcttaagaaagaactcgaagtgaggtatattccctcacacgatcaggtggctgatctcttcaccaaaggactgtccaattccaggttttcttttcttgttgacaaacttggagtgaagccttc

SEQ ID NO: 309176 - DNA, 1475 bp, Cannabis indica
tatttgatctaatctgatcttttagcttaagtatggcagctacacatgtgcaattgatcctaggccttagttggttgatttcatcccacatagctgtcaacttagtgaaatatgagctgactgagtcatcaccttgatgaaggtaagtcaatgtctcattgaatttaaagatcctagggccatttccttggttgaaccaattattgagaacggaccacatctcagcagcgctatcaaggtacatgatgctgcttttgattttaggggaaacataatgcaatatccaagacataacctttaggttgcatcttgtccaagaactataaagtgcattagttggggaaggttggggtaaattgccttcaagaaaaggggttttgtttcttgcaccgattgagagtttaaaatctcttttccaaggttgaaaattacgatcagtaagtaaaggagttgcaagggccaaacctagatgatcagcattgctgagatagtatggagatctgatatcttcatatgcaggccggtcgatgacatctaatcgaggacctggtacaggtggtgcagaacaaggtagagtgccagcggaagtttttgatggtggtggaggagcggcggatgcatcgactactggtgatcatcaatagaagtagcagaagaattcgctcatgttctcaccattgttggatcctggttgaagctttcgaatgatcttgaagaagcttgaactggtttcttgaagttgtttctactgataccatattagtgaagaggcttagcaaaaacaaagagaagaaatcatatttatttattgagaaaatgaaagaatgaattgaattagaacagatggcacttggtcttgatatagtattacaatgtgtaacagaatgtaacagacttaagtaacagactaaaacagaattaacggtctaagattacaatgtgtaacagaaagtaacagacttaagtaacaaactaaaatagaattaatggtctaagatcttctatgcaatgaaagatattcatttactgatgatgacaattttatacagccaatcacacaagaggaacaaagaggatgaaaagaattaacagatatcagataccaaaattgagtttttgaacaataaagtggacttataggaagaaaaaaacagaagaatagttcttccccttcttttatataaaataaatgggtttgttgtaataatgataatagaggccctactctcctccactctacctacgagtcaaaatacaattgggaaacttcaatcgagttgttttggaaagtaacatcaatgaatttggtatgaaaacaatgaatttggtatgaaaataaaagtcccgataagaattttgttgtgaaaattatgtacgcaagtatacgtagtcaaacaagtaataaaatgacaagtaagatcaactaattacaacataaagtaaaaggaaaaaataaaaatggttgagcaatgatt

SEQ ID NO: 309177 - DNA, 1264 bp, Cannabis indica
taatcggttttatttagggcacaaaacccaacatgattcactaatttgccatgccagctgcaggatatgtataataaagtagttggcgcacgtgtgtttgaccagtctcaaattgatttagatgcaagattcttaaacagcctaattgaaagagattcgaaaaatagaaatagtatatcaataccatgaaaccaaagtgaagttttgcgatttacttaaaaaatggaggaaaaaaaactattattgaattctataaaatcttgcatctgtatataaatggaaaaaattctcaataacatttttttaaaaaaaatcaatagtaaaattttgattttttaaataataatataggactcaattttttctctatatcattttttttatataactaatttatctttcctaaattgtaacaaacttttatattaacaattagatttcaattcatctcaaaaaaacaattagaaattaattaattttttataattttctctcaggataacgtacatttgaagattattggaaaagatatgaataatgattacaaatgagataccgtgataacatcaattctaaatataatgatgagtacatgtgagatactgtgatgacaattgtttttgacattatagaatgagtttttttagatctctattttgtgtgaggattattcagtttttattttttttttcactataacttacatttgaaaatatttttttgcgtgttttctcttttatataagatattacaagatgaatttttattttacaattctttagagttctttatatagatttatcattttttttcattaatattttttaaaaaatatacataaaaataaatttaaaattatttaatataattttattttacaattaatattcatatatataatttaaaatttttataaataaagcacaaaatgtttctctataatagtaaacaacccgcgcttcgcggcggatattaaaattttttaaattatatagataaattaaattataattattatttaatgatattaattaagtaataaattgtattaaatttaatcttaccgatttttatataattttgtataaaaaattatgtgtacaaactgacctatctcacccatcgttttataatggaagccaaacatgttctatataataatatttcaagcttgactcctattttgaaaaacttgttgtgaaaaaattacatatgcaagtgcacgcaatcgttaacaagaataaagtgataaatcgagtatcgt

SEQ ID NO: 309178 - DNA, 2822 bp, Cannabis indica
atctagatcctggtaaatatatccaacaattggtctcagagccatggtaatgatttactttcatgtaatatggatttaaaacgatgaatattgtttatgtgttgatttggatgtgttcgtgttagtttatgtgttatttgatgaatgtatgtgatttacaaaatttttccatgaaaataattttattttcgttctgaaaatattttatttggattccttgtgaaaaactaagcaattttggtttttagggaactcaattccgataaaaattgaaaaagttatggtggtttgaagtttcgagtctactggtgtcatcgagtgacaccatgcacgcacaggtgctcggacaagaaggcttgtccgcgcgcggagttcagacattttttatatgaaggtcggcatgcaactccttcggacacgcagaggctgcatcacgcccagcaggaccctgcacacgtcgagaaacctcggggcagggaccctgcaattccccccttcgcgcgcgcgtctcggctacttgtagcctgtctgggctacacgtgcagcctcctaggcagcaacaccccatatgcaatttttgtgggatttttccacaaatttttatttttttcaatttcaaaccataatttcaaaataaaatatttaaacttaaatatcaatttttaatattatccgggttattgggctgattaggctcatttccctttgttctcacgtatttcctaaagtatcctcgcgagatcagacttttaatttcattttttaattgacgacattcctcggtggtatgcctaatatctttatggaaacagtagtacttagttgaatttcgcttatttctcgcatgcctcattagttctagtctacgaaatgcaaccttattttcattggcgaggtagatattctcacgagtttcatttaattcagtatacattgaatagatgggtacatacttctcatgcttcttttgtttctttttatccttggatgaatctcttgattcatcctttctcttggtatttgattcattgggattttccacctttgttgtcatggtgctcattgttgcaatgctagttctaggtttatctcccgagccagtctttaacaacttcatctcattccgtgcttcttctttacgcacaaaaatttgtgctctttcttaaattcattcatattccttacagaacaccctcgtaaatcatcccataactctcccccaatggataaatcaattgtaattccatcttgaagggctgttaattgaatgttatcattcaaatttctgaatttcgctgtagctgtactgaagcgactcaagtacgctttaagggactcccctgattattgcttgatgttagtcaatgatgatacctctggtcaacgatctcttacagcttgaaactgctttttgaaatcattcgacaattgttcccaggatgttatggaatggttggtgattttgtcaaatcaactactcgtagctcctgtcaaggaagttaaaaacaatatgcaacacaagttgtttgaaatgttgcatgctcgcattatggtgttaaaattatttaagtgggggactagatcagtcgttccatcatattgcgagacatgcagattcttaaatccctgaggaaatcgtgaatttagaatgtcagggaggaatggttcagtttcttcatctgagtcatatcctgacagtttgccatattttctatcttgatattttctaaatttgtcctttaattgtattactcgcaattgaataggatccacatgttatttatttgcattttgattaagttgattacgcaaatcaggtgcatttcgattcaagtgcccgcgaaggtctggttgcctttgatttaatctctcacggagatcagtttcacgctacctttgctcacaattactcactgatctattcactgagtaactttcagactggtaactgcgcaagttacttatactttcttgataagtgaaataactttgagatctgctcccgtctcgcatttgcctatttgttccaatcgacctattgtgcccgtaggatcgtgattctcctgtactcaaacttactacacgcatctcatcttgcattggccttcttcttctaaagagattagacatacatcccctactcaggtaagtgtgcatattctcattgtctgtgcgagaaggcctttgtggatgctttgaggggcaaccaccagacctaggttggtttccaggatttcttccatcattacgagggatttcctagtttcctggtcacggatgtcttgcctctgcgttcatgcgagatgactcgggtatatcagtctgctcattcccttggtttgcaaatccatgggaagttcttagggcatcgcgtcgatgttcctgatttcttgtattacttgggttgggttggatttctctatcaattgggacatccctcgcattcccaggttgttcttcttgaatatttatgggattcccttggctattctcctccctcctggtcttggatcctcgaggtcttcctcggggtctccttacatttagattaggttgttttgaggaactgttcctgttggaattattttaccaggatcttagatttactaacaagtatgttatttaacatcctgaatatgaacttttaaaatgatatgaaataaacacatataaagtataagaaaccttacagtggttccagcagaatataatgtttccttctactcagatctctaaccattgtatcctttctgtagcagagtatcaccaagatctgagcccgaatgttcttctcttgaatatggattcttcacagccttaca

SEQ ID NO: 309179 - DNA, 1702 bp, Cannabis indica
ggatatatagtataaaggagtcatacgaataatttttaattttattatttacaactaaagttgagtttgagaaattatttttggcaattgttcttaagtttgttggtatatggggttttgtcatcagtgaacacaatgctaaacttgttttgttgtagtgtgagaataaatgacaagattccaccaccaaggtacgtgagggataagaacaccaacgttcacgagaggacaatagtaccatggaccctcctacctataattaccaagtctaattaggttagccttagccaccacttgtgctatcaagtgggtacaaatatgcaagtggtcttcttatccatgcaccattaatattcatcattgctataataacacacacgtggtacttagcttgcactatttaaaggtttcaaattctaaatacgattctattcttaattacacaaaaaaacgataaagtcaattttaagtattgatagactaagttcgtgtttagagtctattcttgatcccgttcgttaaaaattcctattcgtctcgtagtttctatttttttctacacttacaagggacaaacaaaataaaatgtctcattaaacttttatttgagtaaaattaattgtattataaacaacaaatatttataatttaattaattagaatatataacacgttacacaatagtgtaagtttgagtctcctcacatatttttttaatatttatatatttgtgaataaaagtaaaggcgcaaaatataaatagccttacctctagagactagtactagcccatttctctttcttaatatatatctccctttgctctcgttttctctattattccaaaatttatggtcacataatattgttctcttcccaataaaaaaaaaatgatgtcaatcaaagcattagctgaatcacctaacctaacttcagttccccccacctatacaatattccccaatactacacccaatgatcaacctcaacctcaaccacaactccaaatccccatcattgatctctccctcctaacctctagtgatccagatcaacggtccaaaaccatcactgaattaggcaaagcatgtcaagactggggcttcttcatggtaattattaattaagcttaattaatattaatacctctaaaacaatattgatcatatttgaaatattgctattcttttatgattaatatataggtgatcaatcatggtgtggcagagagattaatgagtgaagttttagaagggtgtagaggtttttttgatctgagtgaagaagagaagcttgtgtataagggtacacatgttatggacacaattaggtatggtacaagcttcaatgcatcggtagagaaagctttgtattggagagattatcttaaggttcttgttcctcatcatcatcctcatcattttcatttccctaataacccatctgggttcaggtaatattattcacacataaaatttctacattattctctattaatcatcacacttttcaaagaaaagtaataatagagtgggcccattactatacattagttattgctattattttgtcatatatattatatataaggtaaattgcggtataaatactcactacaagaaatatcacttttgccagcatattttggtactggcaaaagttaatattgtgctggtaaaatagaatttacctatgatgtgtt

SEQ ID NO: 309180 - DNA, 1043 bp, Cannabis indica
cttgagctagccccaagtggttttcttataggaaagttaatttaataattttatacctattgtaattataaaatattttctcctttcttaattcccattttggagagaaaagaaattattagaatccactcaaaatatttcttaccaaacatcttatttctacttttcttctaccaaacatacggggaaggtaaggtctctatgatctctgtaacactgaacctagactctcatagaatttttagtccttttgtatttgaaaactctcactcaatgcatttcttccaaagaatcttcttattgctcattttttcccactttattattaattttgttcgataaaagtaacactaaaataattgaatgtgctaacctatcgattattaaaacaagtatttcaactcataaaacacgaaaaatggttactaaaatgacctaattagatctagtatatagggtagttgaagggtgtgaatagccaatggtttgaaaaatttaaagtgcctaatagacactatatagtggtacttaacaccacgtaagggatcatattaatattggtgtaattaattaagaatatgcatcacacaatttaaattaataacaagtatgaaatattactaactatttgcaaaataccacaaatgccaatagcaatggtcatctattagttatgcagtttgaaaatttttcaaaggtggctttatagctcaatatgcagtttccctgatgccctaaccagaactttattaaccaaactttttttttaacgaacattatttatttattaatttgaaaggaaaagaaacttaattaattaactaacttttcagacataaattatcatagtactacgttaccaaactctcaaggtaatagtatactaataatacattatatatagaacaaagtatcattggtgatttcacaaactataataattaagctcttattcaagccctatcatcatgactctctacatggagttccaacaaatagtaccctctttcgaagtccttctcttttcagtttttatgtttatt

SEQ ID NO: 309181 - DNA, 1040 bp, Cannabis indica
ttttcccaacccccaaccgacggcatagatatatatacactctatacctacggtttttaccaaaaaaccgcctctaaatgtcaatgcagatattttcaccccctttagcttccctttttataaattagattgaaaaaagggaagctaaaggcttagattttagtagtgtgtatttgtaactaattctggtcctaactaactgatattctctttgttttcattgactatatatagtcaataactctattcactcaattataagattactatttgttcattcaatctttctttcattaccttttcttctttactgtctttttcttttttctgtgctttcacctttttcttctctgattcaacaagccaagaagtttaacaaagagagacgtgatacaagtatttttttcctattatattatttaataattttctttgattaagaagaagaaaaccattgaaatttaatttaatctttataaagaagttaaaggaattcaattcactgtccctctctacaaatgtattaaaagggacttgtcagaatgccaccaaatgttttcaattgacgagctaaggtattatacactttgcatgaatgtaatcaaagagaccaaaaactcattcggtttcgacacatgtaagaaacaactttctgttaaactaaaattattataagtaatccacagtgaaaccatgcaccagagttcaaaatcagcagccatgtgttcgtgtttcatttttcactcaaaaaaaaattagacaagtcaaatttccaatgaaaaaaataaaggtagaagaagccatgcaaaagtgttaatcttatttatttatctttttaatttttttatttttttttttattttttttttcctatttgcatgtatctaatttgtatttgttgagtatctaaactactgatccaaatctttggaaaatgtttaattgaacccacttttaggatactctgaggtgaccagaaattgttcgaagaaaaggtcaaaaaaaaaaaaaacaaagaaaacaaaataaaataaaaacaa

SEQ ID NO: 309182 - DNA, 1207 bp, Cannabis indica
gcctttcttggtggattggagttgattcatcagatgaattttggcgagcttgagatgcagttctaaataattgctcgagtgtggtccagatttcagaggcaaacacacaattttcaccacatgtccaattatagattcagaaatagttgacattagccacgatagaaggaattgatctaagtgcgtccatctattgaatttaggattgcataccattgttgttgattcaggagcttagcgaattcttcattgaggtcgatcttggttaagaaaaattctttccaaattgtgggctctgattgcagggagaacttaagatctccaaaaaaaaaatagttgtttcaatttaatcgccgaggtggaacaaacattgtgattggaataacagaatgatgtgctgcaatatcggaggaggaggccattgatgcaaccgtaagctctgataccaagttgatttttagacaaacagagtatgaaaaataaagaaaaagaagtgtattttattgatcgaagtaaaagagtacaatggttgtttatacacttaatgagagcttaactaactgtaacagaatctttaactaacattctgacagttagttgaatataagaacttaacaacctataacaaccaagtctaacaaaacaatttcatttatactattaacacctagcatgtaactccatccaacttagcatcttcccattcccttgattataatcatttctccactatcttcatccccctttgtacatccataattcctcctttgccaccttgtttgcttccacgctagtagcaactctgaaacccacagtaatgctcatagtgtcttctttatagatttttgcatcccaagggaatttccccattcttccaaaggccgtccttaaaaagttaacattacattatttttttttgcaaatactctccccactattgatttatctataaaatcctttggtctttcttcttcaaccatccattcctcatcatctttgtcttcttcttcacacaagtcttccttttctttctcattttttttttcatttatagtttttactatttcatcgttagtctctgttactatatttttaaacgctacgcaagtatacgcaatcaagtagtaaatctcacacaggtgaggtcgatcccacagggaattggattaagtaccactaaattatacttatgattctattcggtaaa

SEQ ID NO: 309183 - DNA, 721 bp, Cannabis indica
tgtatagtcgctaggcgacagaattttgtgtatatacagtgaaacttttgtaaattcttttgtaaacaggatcccagaattttatatgcatgttatttttatatttttaattaaataagcaaaatttttattaatcacaattttttataacctcgttgattagcaaccacaaatcatgctaacatgcctaaaatagctagggtgttacacacggcatacccacggcgcaccccaatcgacccacgacggaccccaatcgaccctatcgacagccctcgacgcacgtacaaccaaagtgagacccaacccacaacccacggtgcacggatctgtaattttggggcaaggtggtttgatgggtttaatgaatctgtaaggttgcgaggtaggagatgtagtttcgatggggagtcctatgtggggtctgatgtagggtccgatggggtgcgatgtgggtttgatgtggggtgtgacggggtccgagccgtcaattgcgaacttatccttaatagtacttggtgtgggactaggattgatacaaatattcttctttaacaaagtcacaaacaatgaagtaaattcatctgggttcttcgcaagtgtagacaaaaagaaccttgcatgcatgtcatttctaataactttagggcgatacattgagtctttcatgtacttgtaatttacttccaatttcaagtcatactgcactttttcaacatcg

SEQ ID NO: 309184 - DNA, 1260 bp, Cannabis indica
tttttataagtatgataaaagtaaatttgaccattagagtatagtacataaagtgaaatgatattatatagaaagagatgcttacttgttattggacacaaaacaagaaattaagtgtagggatgtcatgaatacactaaaattttagattattgcaatgaattattcaaaaaaattgccttccaacattttactgttttgaatatttttatttaagatattttgtcttgtgtaataggtttttgcaataggatttaaacaaaagaggggtcctgttgtagacaaaaaagatgcagctgagatagaaaaaaaaaagaatgcaaaggaagcttgggtcaaatattagtaagttatttatccctatgttttggcgctaatttttttggttttgaaaacaatatttctaatacccttcctttatttaattgatgcagccaagccaattttaaagcgtatgctgcaacacatgtaggtaagtcaaaacaagatgtgagtgacttggagtgtgttatggatcttttatttttgatattcatcatttagtgttctttacttaattgagattcttaattttgcaggtactgggtagttttaaagagcaattcaagctgctgagtgatgaggagatacaaaattgggcttcctatgaagttgagccttcccctacaaaagttggtgttagagggaaaggaaagaagttgaaggaaacagtatctagtgagcaaccaattgagaacaataaagggataggggatgttcatgtctctggtcgttgttccttagaatggttgggtagaatagtcccagttctcaacaacgcgtaaaaagaaatggtcaccaatgttggtttctctacattcttaagggaggatggcccttacatttatgcgaagatagttagttggctcatcgataacgtggatccaaccacttgtcggctggagatatttggaagaactattcaactatcggccaagctatttgaggatgtcatggcaatcagggatgggggtgaacctgtcgtaacagaaagtgactgtgacctgcatgagtttgagaaaattttgaaggacaatgactataagttttcactgactatgctggagaaggatttgaagcaaagcagggaaagggattacatgtttctgattaagtttcttctggttgtttgagaacaatcttgctgcccaagaatggtaccgaggtcaacactatctacatgcattctttaattgatacaaggtcaattaagaagaagaa

SEQ ID NO: 309185 - DNA, 808 bp, Cannabis indica
aatgggtgcacttgtgtgtgattagaggaaacagatcaacttcttggtaagggcaaattcccttttataggttcactattcagtggtcctaattcctctgtttaagcgcttatcacccaaatatgggatgaaataataatcatttgtaaacccaaaatcattttattgaaggccacatcaaaattttggtgcttttaatggatttttctgccaattgggttttgaaaaataactgtataacttagacgaaaattatatttcactaagcagtagtagggagagagatcttgatctaccaaactttacaataatgagacatcaagtgacattattagcgagaatgttcagttaactaaatgcatccaaatccatacatgatttcaattcttcattatttaactttctgtgtataagtgtcattattttatttttgctagtgcgttcagtatatattatgaacatttgagattgaaaaacagagtatattataaaatatatgtataatattgtatgtacctttagccacatttttttctcacgctatgacaatttccaattataataagttcacacacatagttttcattactatttcattttgatagataagtactaatgaatagatagttttcattcttttgttttcaaacaaaaataaaataaaataaagcataagaaaaactcaagtaaagagggagtactacttctaacctaaccaaacataaagaaagggatcaaaatataaattactaataagattttttttttagaaaaaaaaaaaacaataaagtattattttcagaataat

SEQ ID NO: 309186 - DNA, 750 bp, Cannabis indica
catttgagaaaatactaccagtaagtatacaaggcctcagtctggctagcacctggctctccatcatactgaggttatgcaacctcctagcaatgcctactctccatctattctctagcatagcgatgttagggtcataaggtggtgccctatggcacgtttgcttggtccttgccataatggacctcaagtgcctagccacagtaacagcgctctttacggcaagaagatctttcgataaagaaattgccctacgaataagcaaagtatcaggcataccgtcctaaacgatgtatgtcaaggaacaagtaaaaaattgcctccacccgaggcttaactccttaataaactggttgtgaatctcactgcctattcgctccaaataacgatgttggaccttagtttctgaagaaccaccactaacctcgagatctctcaaggagctgctagaggaattaactggatactagtcctcgaatagaagaccaagtaaatattcgtcaatacggttttcacctccccaatagtcaatcacgatcatctgcacacaaaagacaagggaaggtgagaaacctaacaaagcgacaaggtttagacaagactctactcaactatacgcaagggtacttggtagataatttcatcgtacaagtttgggtatcagcgaagtacagtttcaagtgtaacaacttggacaaatattgagtcttaagttgagcattcggcaataatagactcaccataaagcat

SEQ ID NO: 309187 - DNA, 822 bp, Cannabis indica
agcttttaaaatattttttttttctgatgttacaggggtcacgacgctacattgtagtgttgcggcccgtgccccctttttcgcagaccctccttctctgtctaaaatggccaatctagcacctcaacatggaactcgtagtgccctgacactccgaaaattatacttttgattagttttcatgatttttacgggttacatatttttttcttctttttttcaaaataaaaataactaaataaaacatagaaattatcatgagtgtcttgatagaattctaaaacaaagattaaaaatttgggttgcctctcaagagcgctgtcgtttacgtcatttagtcagactaaaattcctcttttaaagcggcgccaagaggatagcgaatttgccttgattatattgaccacccaagtagagctttaaccgctgaccattgattttaaaagtctctcatttctcgcctttaatgtccaccactccatagggaaccctattataaaatgtaagtaattgaagaaaaatagtatgaagtagtttgagtgtgagtagtaagaaaatgtaaaagagaaaaaaaaaaaatatagactaagtgtttgtatttttttttttaaaataaaaattgtgagagtgaaaaaaatattgaaaatgatataaaagtgtacacttattatatatatatagaaaaaatttaagtgtgagaaaaaaaaataaaaaaagagagaagaggaaaaaaaataagaaaaagagaaaaagaagaaaaaaaaccaatatatggagactaactcaaaagaaaaaaccaaactcaccgttagaagaaaaacg

SEQ ID NO: 309188 - DNA, 1108 bp, Cannabis indica
agattttttttttgaaaagaagtgttatttattaagaagagctatcgccgaaaagaatagacaacaactctgaaggaactaataataataatattattatggcaaattagatgtaaaaattaacttccctaaaatcaaaatatatttatatcaattacccttattaaaatacgaaaaagtataggttaaaaaaaaacgaaaaagtcatagattggtaaaacttaaaagaaatagtggagctaacagctaagtcacacaccaaaaatttctaaaagatgacatatgcttactacatatatattataaaaaagtaccagttttgtccttagaggatatttttattattattttttttaacatttgaaactgattattttatatcattaaaacttccaaaaattataatttaatttcatttttaaaattttcaaaaaaaattatattattaagaaatagaatttaaataattaattgtctcttaaaaaaatggtcgtcccaaatttacctcaacccatccaatttttccatctaaaaaaagaagtatatatgtatataaaaaaaaagtatatatgcttataacattttatttttatgattactaaattaattatttaaattaaataattaattattatactatcacagaaataattatatctttgcatattattattagttcacaaggccacgcttaggaaataaattttattagaaaaatatttaaacgagcaagacttcttttgaaggttaatgaacaatatctaagtgtatgtaacctgcacaattatcacaaagaaaataatataaaaagtacattttaataaaacactgaaaacttgttgacctatagttcttcacacaatcaaaactctctttaaaaacttgaaaaatatttgtaaaataatacactaagggttcgtttggaacgccgtattatgtcgtattgtattgtattgtaatatattgaattgtattttatgcaatatttttatataaaactatatgtggtattaacttttatggacacctaaatgtataatattttagtataaattaaagtttaaacatagttttatataaaaataatgatatataatccaattcaata

SEQ ID NO: 309189 - DNA, 6793 bp, Cannabis indica
ctgcattgctgatattgaccccccaaaaaacttcttcgatacagtctgttcgccaagatttcataccttttagcttgtcttatgatatttcttgcttcattcttgtcttgtggaaataccccttttttgctaagtagtctcacatcggttcaaaccacttcggcccctcggttgagtctacgttctcttctgctacaaagacctctgctatctctatcaaatcgacatcaaggaaggaagtaggtatagttctcttgaccacctttatctccttttcaacttctgtgtcattaatttttatcttagaagcaatcgtagccagaaagtcagcatgacttttcttggaccgagagacatggtcaattcgtacttcttcaaacattcccatcaatctcattgccttcaaccaatagaataggctttcggacgattctctttgactttgaaactttcttcaatctaagacaccactagaaatgaatctcccagccacttccaacatggggagctttcgtatccctgccaatattgcgagttcgagaccaatcaatagtgcggaatactcggctacattgtttgtgcaatcgaataccaacttaaacgaaaatgaaactacttaggttgatggggcgcccccagaggcattaaagagtcgttctttcatgggaaacccaatcaaaaaaaaagggaaaggccctacttattcaggggggagtcgaggtgcccgtggtaggcgatgaatggagcagtcgatcaaggcaggagggtggtctacgatcaggcttagtcttctatccctgctcttcccgggttggtcgataatttctaaactattgggtaaacatagatcctagagagcgagtttaagcagatcactagaagaaaggagttgatgaggtttttagactcaaggcttctgtatctgttctggtttatcaaaagaaaaggttattagatatccgttcaaaacccaggttttcaaatatctggtcctcgatggattggacggaaaagaaggtcaaagcggacctattgattgaccatagatgcgaactcccacacccttagccagtaccagcgactagtcttcgggctacgaggtatatagggcgagagcccgctaaggtaacccttaagcctaccgtgttgagcctcatgcatgtactgaacctagacatagcctgctaaggaacccagtagccgactcagtacgcacttttttccgggaccgcttgattcagcatacagcagtgcaacatcggacgttaatcaggaagcatacagcagcaagcacacatctttgcagtctttctaaaccttaaactattaacccggtgtcagcctttaggcttgcagacctaatcttgagtgttgttgaaccataggttcggcacaagaggaatccttcttagactcggttcgccgtcagtttgaaaaccgcaggtgggtgcgaactactagaggcccgtccaggaggttagtcagaatagaagacctagaacgccttggtgaatcaaacccagagatagagatcgtggccaacaacgccagtcaccgaggcaccaggaaccctatctatgatggggacaatgaagagtccactggctctaaccatcagctgaaccctacagccccggcaaatcagcaactaactaacgaggcagttagccgtcaactagctgagattgcccggatgttagcacaattgacctcgcaggtagccatcggaaataccctggctgcacctgctgctcaaggaacaaaccctccatctaccaccccgactcagggggcacagatccacaaccacaaagccaaccaagagtagcagatgctagacctgtagacccagtacccacatctctatgtgcccgcagttcctgatcactacgaggaagagatccgaagagagcctcctgcagtaccggccgtgtacttggctcccactcccatgaatcagatagtgccatacgtcccaccacagccgtccgatcctctgatggagaagatcagtcgccttgaacgggcagttaataagttgagtggggacaagtatgatgttgcagatcttgagaatctctccctataccccaaagtcaggcttccgtacggttttaagtggccagagatagagttgtataacggaaccggatgcataacgaaataggagaaaaagaggcttacctcggaggaagatccaattgctatgctcttgaagagcctgaaccctgagtataccaataggttgactacatcacccaacttttcattctttagtttgtgctggctgccagatagaagatgcattgacagctgggcggtcgctccccctctctacgccgttgctttgcaacgggtcctcgaataataagaagaaaaagtctgccgggacctatcaggctaaagcagaggtgaatacaattggagcggcgtcgctgaaccaaaggccaacctatacaaggggcaggcagcacagccatttcaaaataaaaaccccagttttatcaaaaaatactcaggtttggaaccccggcggactccgcaggcccaagctcagtacccacaggcccaacagcaacaactgggtaaagtgtcctatcagcaaggtcagcaaggggcccaacagggtcagagacaagccagaagacaggaccgaccactccgttaccgcttccgatgagcaagttgatgggaggtctggtacaggtacagaagggggtcttgcccctcttagagccgaaaccgacgccaaatacattgccaatcgggtatgatccaaacgcgatatgccattatcaccagagccgtggacactggaccgacaactgctggaacttgaggcatgtcatacaggatttgattgatacagcagttcgttctacctcccgcgccggccacaacagctcagccaaacatcaataacaatcctctgccggctcatcctgcacaaccctctaacggggtcaaaagtggctcttttgaccccactcaatatattacgcccatcaacagactcgctgcagctgcaccggcgcagtcaacccagaatattcagtcaggtgtgatcaatatgattacacccagcccatgggaaatcggccagccctcatcctcaagggatgcgcccctacccctaaataagtaaggccccgttctaccgtactccagaccctcagcctagccaaggcccggtaactctggaagagatcctagccctgtctagtccagtctaccaaagccctttcacattatcgagcgctaaatgcaaacatcgaagcgcaactctttttgcgtatcgagaatctcgaaaaccaaattagttatgggcagccccctcaactaaataatggggaatacgcgcaactggtaagggagaacttagaacaggccttcaacataaattcatatagagatctgttggccagggaattgttcgatatcaaaataatggaactcaaaagccgcttgcaagagcagctctttgataaaatgatggctcagcccacaatagattccattagggagatatctccttataggaatattcgagagacagctttcgactttagcaaggtacgccaaagtaagtaaagaacagatcttactttatggtaggttcagtaaaagcaaaaaagatcagatacacaagaaaaagagagagtttctaatccaacagcgagcaagactgactgccagccctgaagaaaacattagagctcgaggagcgaagccactcgaacgaatgtgagaggagcgaaaggagacccttgagaaatgaacagatttttttctcttattcttgtcaaaacccgaggaagaagtttcgaataggggccgaagtgagtgcagtagacgtttgaaagactatatggaactcaaatctttcatcccttcatcccagtttcgaaataggctgtgtcgagactgcaattattgctttcgggttctttccccagccagtcgcccctgtgtgggaggggtcaagcttggagacttctcatttgtggggaatcaaactatcacgcaacttgcattccggttctacatattggggagttccgcttttctaaggattccctattgctggcatagcagggactaaagaaaccatagtcgcacggaaattgcctgccggacagagggctgttggtctaattaattacacaattctttattaacatatggctataaaaaattatcctatcttttatcagcccccttcaacaatgagatttcaaaagacgattctttctttctccactgcttcctaactcactcaaaagacgatacttggtatataatccacgccttcccttcggaaatctcacgttgcattggaccccttcgaactctggaaatatctcccttatggtgcgcgccgcggtgttctttgacgcgctttctttcttggctacagcgtgatagtggaacccgccattctcatgcatttcccttgaaaccactatggttttacacctgaaagtagctaccaatcttttacaaacttcctcctgagaaagatcccgcgtgagatagtgttactgacacataaggcttcagcgtgcttttcgccagttgcttctcttttcttttcgttgttatgatgttccattttcaaatagcatgagcgttgaaagggaaattcctatagattagagcgttatattcttttttttacttctttcaaaggggaatgaagaacagaagagaggaggaaagtggttcactggagtttgtctcttgaaaatggttttctttctttactctcttgagggtctttttctctattttcttttttggtatcagagccaacaagagaattagggtgctgaaacaataacccaaaacctgcttgcttagagaatcaaactgttcctgtctgctttttccttttttgattttatgaccaatagaaatggaaactcttttgttatatgccttatacctaaaaaatatctttggtagatcctaagacgaattatgtacacaatgaggatcacaatcattgatacagtttgggtaccaagctatcttatcaatatatttaaaaaaaattcgatgtagtgatgaaattttgatacataaaaactcctatttgtttttgttcattactaaaatgaatcgaatcctatcaaatatttatatttctcctttgaattactcatatatatcctatgaatttcatttcgcaccggaaactattctaggagaagttcgaatccgttccgttcggatattgatcggtcttggtttgacatggtttacgcgttactggttcccggaagagttaatatctccattagctaaaccctttcttaccctgcctttggactcgtattttgttcgtacacaatcaacggaggcctccccgacatatgttgcaacgtcttcaatagcatgctcttatttcgtctttcccttaataagtcatcaaatttggtgctttttgatccccagttgctatggagaacaaaggacgaaatacaatcgattcctctatttaagtggttctcgcttctccttgttcctgttcctaactcctccccgggtagttcccaatgtttggcactttccatacttcgtgggtgcaacatcaacaaattcgctcatgatcaagttacaacctaagatctatgaccatattatgttaactgttcgtatttcgttcattccatcggtatgctcccaggtacctgtaattgtgatccgtttgccagaactaaggggtctttctgtggaaaccttcacgaacaatcgtcgttttttgatggtttttccgcttctcacagctgctctttccacacctccggatatctggtgccaaatcgtcgcccttttccttatttcttcgataatagagttggctatctttgtggcatcgattgtacaagttcgtgaagaaggctggacgagtggaatgagggaaagcggctcgatcgacaaaaaagaagagtagcccaacccgcaaagtaactatcaatgaattcccgagcaattctcaaccaacatatgcgattcattcccgtaaatattataacacacagaagactccttaccttaggagcgggatgagtgatacatccggcgagcgccggtgaagaacgcaagcaaagctggagctcgggcattgttatattccatcaagagaaaggaggcagactggtaagaaggccgaccacatagggggggcgaaccgaaaagctcagctttgcggcgcggaccaatcttccgtaccgccccccttactctctctctataaaaaagcctgcgggaagcgcgaagggctaaaccactaatgtcgtggcgaaggttatacctcagaaagtcagcgaagctaaggtttcgtatgtgttatatcctttcgatcgagcgacaacttcgtttccttcattcccctttgaaagaaaagagtaaaaaaaaaaagagcgctagggatacacccatttagagagagaaggttgcagaagtgcttctagatctcatggaataaggcagaatttagaacaacactttccatctcttgctttcatagaaaaaaagaatttagtagatgaaatcctgaaaccattaccgcaggccaaaatttgatttggaagagcaagccagagaaaagaagcgttgagataatatactttcatcctaatctcatctactgaaaaagggggccctcttgactagaaaggatttttaggcagaattggcataattattaccgtgaggattgagctgccaaaaaagaaattcttccggcgaaaaaagaaaaaaagtattctgaagccaaatgctcttggat

SEQ ID NO: 309190 - DNA, 1315 bp, Cannabis indica
acaatctcaatagttcaggagacattttgaacgatcttaaaagttcagggggcaaaaattctagttagtcttcatttattatagtttattttcagatttttcttcatttatatacataaaatatgaagttgttataaaatatgcctaaacaaactttattaacaaaattactttatcatgtcattaaaaacaatacttaatttctaaaccaatataactttttggctcaaaattactaaactaatatagttgaatataaataagcctgaaattgtgtgttttctattttttctccattttcaaaaactaattttaagattacttatgatgacacttgtatactgagattttcgaaaattgattattaaatatattattttaaaaaataaataaattaaagaataagaatttttatgtgttaggagcattaatgaatcttaatctataaattaatattaattattagatagaaaagcatttgagtattatataagaatgtcttgcccgagtatttttagctttagtgcatgaacaatggtgctcgaaccctttgcatttgcatgaaggaataatgttctatttatagattagagtcgggaatgggtagatctggacctgttaggattagtatgtaaaacaaggtccaccaatggggtaaatataataaaatattgacattgtgttgagtaggagaggcccaatccgtgaggtaacagtcgtccgtacgaaggggaccatttgatagcgacaggtggcatgtgtgtgtcgcgcttagtgtacagtaatgtcagaatagtggatgttagacagaggacatgtcccacttggtggtgcgcgcactcttatggtttgacgcaaaggactgacccccgatttggtgagattctgtatcggagaggtgcctcgtaagactgtgcccccaaacctcttcaactgtccttccaagaataccctaggggtacccagatatgccttgttgagccttctttcttatgggtgagatgcccttctaaaatcagactgacccgactctttagcgactgtatttggttcattgttgtacctagagacgtggtccgactcctctggtgggttgatccattaacttatgaatcctggaagtacacctattacttacctagaaacacggataacaacaccaattgattaattatttttttggtagaaaaatcttcacttttagaccatgttatattttatacatattttggttacttaattttatctttgaaactatagtttcattttttattcatataatattgtttgatatttaagattagtttaaaatttt

SEQ ID NO: 309191 - DNA, 658 bp, Cannabis indica
ctttatgtcaatgtgtttagagcaggaagtacttctaacatttttaaagagaaagctactgctgcggaattatcacaatacaatttcagcggcctcgaaatagagtccataacactcaatgctaaaataaaattttgcagccatattgcttgacatgtagccttatcacacgccatatactatggctccatttttgaggatgctatgagtgtctgtttgacactttccacgaaacagctcctccagccatcatgaaatgtagtctgatgtggatttcttatcatccacgcatcctgcataatcagcgtcactaaacccaactatatcaagagtgtcagctcgccgataagttaacatatgatctttggtaccctgaagatactgcatgactttcttagccgatttacaatggctaagtctaggatcactcaagtatctacccaacacgccaacaacagaagcaatatcagggcgtgtgcatacttgagcatacatcaggctccccacaagtgacgcataaggaaccactttcatttcatctcactctttatcattttgtggacactggccctttaagaatttgtcacattttactaacggtgcctttccaggtgaacaagcatgcatattgaatcttttgaagatccgatcaatgtaa

SEQ ID NO: 309192 - DNA, 1469 bp, Cannabis indica
gaaaaaatagttaaaaaccgcaccacccgcaccgcgaacacccctactaaaataccatttacaagtagctaagtattttaaggataagatacattgaatagtagaacggtaaatttattcttactcgatgtagatcatctatagaggatctttgattatttggatttaaacaatggataatttatagcgtattaatacttggtatagagtattctatgtaatcatgagtgcaatttcaaatctatagtggaaataataagttaggaaatttacttcgtaaatcttagatctacttaataggagcttagttacataggcccatggtccctgcattgtctgggataatatcatcttgtagactcaactaattgatttaataagtcaattagaattcgaaaatagactatgtcttatttgagaattttcaccaagtttgggtaatttcgagaagaaaagagaaataggggcttatttattaattagtacattttgtgagtctaattaataaatatatttaaagtgtattttatttgataattattaaaataaaatttgtatttaaataattagaagagatacgtggtaaaataggaaaacacacattgtttcatttaaataaagtaaaatgagataaatataactctatagcccatgaggaattcagccctagagttagactttagcccaagtctctattttaagcccaatttcatctaacctagccctaagtgaagcctatataaagaaagtgatgagaagagaaaattaacctaagttttcattatcggactattctaatatcttctttctttgtatatttcaaaaattacatgtattttctctcaaaaatattgttccgaaggtgtaacatcctattcaaagaaatgttacgtgtggtgattgcattaaactaatcccgttaatcaggattcataaatcaagtgatttaaaaccaatattaaacttaatttaaataaacaacttgcaatattacaaatttattttaaaccaaaatatttaaagttacaaatccagatcctttttaatttatttttaaaatattacaagtaatttctcataggctgacctaagcggcaaaattaaaatttctacacgagtccctgttgggcccaaccctcatggtctagcatggatgaaacatgtacaactcatcttcaaaacccttgaactcatggctgaacaaacaccacttcactaatgttgcacattagagcactcgtgatacaaggcccaataagacagaaataataatacagcatgaataatcataataataattacacttcatatagtacgatactacatatatatatatatatattgtgccattgtactaaattacattattccatacaaaaatgccactataattaatatttatgtagcatagacctaagtgttacgctcacacgtcttttttacatttaaggccttactagggtttgtct

SEQ ID NO: 309193 - DNA, 957 bp, Cannabis indica
tattatgagtcaaaggagtaaacaagtatgagtcatgattgagatagtcaacaatttttttgaacaaattattattatttttcttctttttgatcttcttcatgtggaggccattattaatggctactcttttcttttgtactccaaacaacattttcttctccatcatcataattgccattaataattattattacttactaaaagttttggtcttggtggtgaggagaacaaatactctttgggtgttggacacgtgtcacttggttgtaactctttagacatgtcgtgtcgttttgaggcttcttgtcgagagaatagagtgacgcgtggtcttttttgatgagtgtcttcaccacttactaataactatctttgcttttacttttttagaaatgaaacgacgtgtcgttttgtggaactaccacatataataagctattgaatgagtaatgaataatgataaatttttgtagtaagacaaagagagacaaaagtgtaaaagcatatttggtaaaatcgtagtaaatacaatttttgttttataagcaacattgaagaatatgtaagtgtttattacaaattattacaaaaactggtattttgtaattatatatatggtattttaaaaatatattaaaatattgttaagctcttatgcatttttgtgagtctcctattatattatgtaagtactatagatacatatataatttgaagcttctaataagaattggaggtaggtgaaggaaatgtttgatacaacaagtgtatatttgattgttaaaagaaaaaaaaaacaaaacaaaacaagagtatatttattgtaaaaattatatattttatgggttttaatacaatttgtgtaaaatatgacttttgcaataataaaaaaaagattatggaatttttttaaaacaaagttaaaaaaaatagtacgtataacgtaactaaagg

SEQ ID NO: 309194 - DNA, 1045 bp, Cannabis indica
gaaaaactgaaaagaaattaaaaataataaaaaaagaagaagaagaagaagagaaaaagagataagggaatgatgtaaggtgtgattgatataagtcatcaatcaatgacgtgtgtggctgcatggattgtgtgtgcaagtggtaaaagtgtaataaaataaatttaataagtataaatgttagtttaaccgtgtgaagatatatatgtaataaagtgtgtattttgtatttttggtgtaaaaatttctaattaatatacttggaaatgttcctttcatttaaaaataataatagtaaaacagtatactttttcatcatctctaaaaggcaaatgtgattgttttttatatatagctaccaattcttcacaaaatacaaatgaataattttatcataaaaggcaaattaccatatatacaattattttttcacttgtattagtgagtaagttaatatacaatgatgaatttagattgttacaactaccaaacttccatactttttcggtaaagacatatgttggatctattgaagttattattatttttatcattggagagtggagagacttcttcagtacttatattcattttcaaagactagctaatgaaaataattattaatttgagtcttcccaaaaaaataattttgaaagaccaataagaaattaattttaaaagactaataaaaaccttaattttaaaagactatggtaaaaacaaaattaattttaaaagacttattattattattatttgatactttacgcaaatatttgaatgttagattatttttaatgggaaatgtaaaaattgagctatatttgatacaaaaagtagctttgtgatatttttatatcaatttttactattgtagctctaatgcataattataagggattatttcacaaatacataaaaacaacaaaaaatacaaaatacgattcacagaattttaaatatttttacgatttttttatttatttactagaaatacggtcttttatattgtactcttattattttgttgttgaatttttgttat

SEQ ID NO: 309195 - DNA, 2558 bp, Cannabis indica
gatttcttagtggctaagaaatggtaaaaataacttttattaataaagtttcaatattattatttaatacttatcaatttagttaaatatatattatatgttttaaaactaaagaacagagaaagaaacggaaccctcgctacttgcgtgcgacgaaaccctcacctccaccatccatttttcttcaatttacaaccagaatttgagtggttcaagcccatatagtaactggataatgaaccattaaagggagagcttaaggtaaggatttatttttgttttaagttgaaaaagtttggttctatatgttgactttgtgttttagagtagttgtgggatctatgacttcatgagtttgttttcgggttgctacgggattaatttcagtgtttactagctgaattttaggttgtttgaggtgaaaatcgagtttgatcttttatgctcaaagctcgagctttaatggtgttttctgtttaaggactcgttttattttttgttatgttacgactattgtatggatgatatatatgtgtcttgtgaagtttggaatgatttgggtaggtttcagtggtgttttaggaggtgaaaaatttgggattttcgtttctagcagaaaacggttcaccatttgaagcaaatggttattcgtttcttgccaggaaaccccaagataacggttaaccatttctggtggtgattttgaacctcgtttttcatattttctcgaggtttgaagtagggataccctagtgacctataagggatccttgggaatgaatttttggacttggaataggttagattacttggttaattattgttttgttattatgacatggggcccaagatcgttgatcgttctctaagcaggttaggcaacatacttgaactgaaacttaaggtaagaaaagtataatgtaccacatggaatgataggtttcacgattgtcgattgtttgattaggcaatgcgatacttggatgccatgttatggtgtgggctcacctgattaggtgaagcaatatatgggtgtcaggttatggcacgggctcgcctgattaggcaatgcgatatatgggtgccagattatggcacgggctcacctgattaggtgatgcgatatatgggtgccaggttatggcatggactcgcctaattaggagatgcaatatatgagtgccaggttatggcacgggctcgcctgattaagtgatacgatatatgggtgctgggttatggcacgggcttgcctaattaggcaatgcaatatatggttactggattaaagcattgacttgctagattaggcaatgtgatctaatgaagatggttacttctcatttctgtatatatagttgattatattatataatcttcggaatgttattgtttgattattttatgatggtaaaatggataattagttattacatgtattttctttattacttttcttgttgagtctttgtcactcgcgggtgctctatggtgcaggtaagggcaaggaaaagttagagcatctatgaggtgacgatcttctccaacgaatgtacatatagacccttatgacgtgtgccaagttgccaagagttgttttgggctgtatttaatgtgtattttgacttattactttatatagtccttttgtaaaatttttatatcagagatccccgaaacaaagttttagtgtcattatgttgttcattactagggatttattatagtgaaatttttaatattatcacagatctcaataattaattaacatattattactaaactagtttataaaattacacacgtggcgtccttatagattagggtgttacacctttgattaacttggaagacaaaagagcctgcataacaacatcaacaagaagtggtcagttgatacacacatcaccacagtgtgtagggccgaatttaacacccatgttgctctggttaagggcatcactactccaaagccaatagagtaaagattatatcgagagtggtgttctcttgtcttagatcgaattaaggctttggagatccccttaaagttaaaaaaaaatagtctagcatgccatccatacactggaaaagaagaccctctctctctcacatacataacttcgaagtacaaattgacctgcaaggcattagaaattattctcgttgtcgagtttttcaaccacgctatcaaaagtagcacaacaatggtatctcaagctttccctgggatctagcaattcctaggagacactcaagtcagaattctatgacccattctcctccatcaaggcacaaaacaattgagcccaacgatttggtctatatcaagaaaaaagaataggaacctctaatggcgcgtttactaaactgtaattggaatctgaataatcaatgagagaattgtatcatttaaaatacaaaataatcagaaacaatattttattatgctatttactaaactatctggaaagaaaacaagaatcatattattttatttacataactaggaaaggtaacaagaatcaaaagctccccgagatgctggaatttgaaga

SEQ ID NO: 309196 - DNA, 1338 bp, Cannabis indica
aaaaaaatatatatttttattgtaatatttaaattgttatagaaattttaaataaaaactatgtattgtgaaaaaatgtttattataatgtacaacaacaattaaaaataatcaaaaaatttacttttgaataagttaattacttaattttttttctataaaagttgctcaatataatattaaagagaaagattatctgtttaatataaatattaatatatatatttttttttttgtaaaattacagtaaaaaaagggggtttttttttttttttattttttacatttttaagtaattttttttattgctcaatataatattaaagagaaagattatttatttaatatatattaaaatatcttctttttttttttaaattccagcaaaaaaagagagtttttttattttaatattttaaagtagttttttttcttttgtatttttacagaaactcacgtatcaacccacatagcaactaacagaataatctaaattacaatccaaatcctatagcaacccgcatagaaactacaaaaaaaaaaaaaaaagaaaaataaaaaaaatatatattaaaaaataatatataaaataatttttcttaaaaaatcttgtaaataaaaaatccattaaaaaaattaatatagttaaatatagtaaatatcactaattaaaactattttagttcacatcaattattttaattatctaatattaatctatataaagtaagattttcattaaccaagtgataaattgggcataataattactatattaaatttagaaagctaggctagatattttataataattatttaatttttttattagttgtttatttttttatcttttttttttgaaaaagttggtatggtgttttagtatatgaaagaatgaactctcaaataattagtaaatattaaattaaggtgggtgattcttcttaattaattatcacgtgtactttcacataatataatctatggactaaattaactatcaaaaactaaactcatagtcttatttttaccattttagaaaatacaaggtctattttgtcatttaataaaatagagggtccaattaataatttttgcaaaacacaaggtccaaaatagtatttacccttatatttatgacagtataaaactttgttgtcttctcttgattatattcgttgttaaacagtctggcgaattgtattatctctcacactgtattattagagtggatgataatcctctaaattgttgactttgttaatttactattaactttatttttaatgaaggttaatcttattctaaaaaaatttaaaaaaaaaaccctaaaaaaat

SEQ ID NO: 309197 - DNA, 1523 bp, Cannabis indica
tactcaaacagcaattccaatatttaatgggagaaatttccattgtaaactatctttattatgacataaattggttttttttttatccctttataagaaacccgttaaaatggacactggacagctattattttctcacagttttattcatcttttaaaaaaattatagtttaattaattatttatttatttgtaggatcagctttattggaagactaggcaacgtatccgcgcttcgcgcggtttttataataattagaaataatttttaatgataaaaaaaaataataagtggtgtgttaatatatttagcacaatttaattaattttttttttaattgtatgctataagttatgttaaatttagtgcataataaaagttattttttaattacataatttttattaattattaataattgactttaattaatattttttaactacaacattgtcattaataattttttgaaatatttaatttataaatgatattttattttttaaaagtaacttgcatattaaaatattattgtgcattgaaatacaactgaaaatgttgtgctaaatataatatttttttttattttttatgttaaatttagtacaatattagaatcttgcattggtaataacaccaaagatgcatattaaaattaaagttgatatccctcactaaaaccatttcaataaaatttaatattgagaagaaatatattgttctatgtatccaaaaattcaaatgtaagttttctttaataaataataaaagaaaagaaagaataattaacaaacaatatttgttttaataaaacaaataattatttagaagtataaatatcctatttctctactacacaatttattaaatgaaaaaaaatattttacatgtgccaagtgatacacacttttatgctaagagaggtttagatctagataatgagttgatttagaacaattctttacctttcaatatgtaataaagtcttgcttcttattctactcttgttttttttcttctttttcttaagctagcaggttattcaaaaaaaaaaaaaaaacagctgtactatctgaaatatataatgatttaagttataaaagagatattatttgatacaaaagagtgtctcaagggcaataaacctatagtagtttacatcaataatataaaattgatatatatatattatatatctattctatataaagtgtgcctatataactaaattcttgttttatgagaaattcatgagtgagtttttatttatatttaataaaataataaaatattatttacatataataaaataataaaataaaagtaaaacaaacagataagttttgattatataatattcaaatagatatttattatataatgtcgttttatttgtgattcaaataggtaagttttgctggttatttatatgcaaatagaaaaataagttactataattaatagaagtcatcagaaaatagaaaaaagatagctataataacaaataaggaaagaagagtaa

SEQ ID NO: 309198 - DNA, 662 bp, Cannabis indica
gtatctatatatatatatacatattgattattacacgacatgcattgtgtgtacttgtaaatattaattctcttatgtgtggatatgaggtaattggttgtgttatgccttcatttattttatagaactttcaaggaagggcatacacaaagtggcttgtgtaaaaaatactacacattggtgtttatagcactcttcgtcgtatcagattttatataatttaatttaataattattataaaatatcaataattatttataaaatgctactttatcatgatgttagacaccattaatgtctaatacttttaaaaaaaaatatactagttaagcatatttgctccttcattaagttttattggaaaactccatcaaatatccccatacacttaagttaatatgatgagggaaactaacaaaaatattagaattttggttaatttttacaaaaataatagcacacagaaatttgttcatgtatttttataaaacaacactgaaacacaaaaacagaacaactaaaaacaacaatagaataactgaaaaaataactgtagaacaacagtgaaaatttaacacaattacagtataaaacttacacagtattttttaaaaaaatttcgccccacagtataaaagtaaaaaattaaaaaatttagtat

SEQ ID NO: 309199 - DNA, 711 bp, Cannabis indica
taaaaatgaacacagggtaatgatgttaaacctaataactaataataatatatattatatatattatttttaattgtatcactttttaataacgtagaaaaaactaacataagatttagtatacgtgcctcgcacgtaattttttgtctagtagtaatatatatacatataatttcagttatttgtgttttgttattatgtagatattattttaaataatttatttcaaacttataaactttatagaattagaactggagtacgattccgataaaaataataataataataagaattaaagtaggattagatttctcatttttaattataaataagtaatactttcactaattctttctggtgactaaaaattaatctattattgcattattaatcaagaattaataagtgctactattaggagagaataaagaaagacagactaaacatctattatacaaacacacccagagatatcttagtgttaattttagagagaatagagtctttgactgattatttgcgatttggagctatttgttcagaatgttgttgtgtaatgaaagataatcaagttcaacaaaccgaaacattacataaccaaatatcgatatcatcaagtttctaattttcaatttgaagttttttttcttttaattcagtttgcatgtcgagaaaaaaagcttggaaaaaagtatttattttttattt

SEQ ID NO: 309200 - DNA, 1349 bp, Cannabis indica
ttggacttgaaatctcttcaaaaaaatttcgtgtctaacactaattttgttggactagaaaaagagacatagaaagggtaatttgtagtagtgaaaacaaaacaaataaccaactgtatcaacacaaaacaaaacaataaaaatagtcttgcatgaacaaataaccaaattgaaacaaaaataagaaaaagctgaaccttattatatcttgcatgaaccgagaaattggctcaattgagtttgtgtcgtttgggtaatttttctaagggttttgctatagatagaccatgctttcactttactgtccatacaattataaatttataactacaccccaaaattacatatttaacctttagttaaatgaccaaaataagtatttttaaaagtttttatattatttatattttaataattgcaatcgtagttggtcgccgaattgcctttataaggtaaatatttattaacttgatatatatattatatattttgtgttttattgaatatgtatttatatttatatattgtatatatattgtgtatattatttatgtaaattttataattgtgttgtatatattctaagtaatatatatgtatgtatatatatatttattgtagtgaatgagaatgagatatggagagatttaattagttaagaaataaaaagcttttgaaattgtgttagtgtgagatataatttattatatttgtatgtatatatgattttttttaaaaaattaattataatttagtaactagtaagttgttacgttttttttttttataattagtaagaaattattcatttatttttagtctgttattttttatttttgcatagttatattttatataaaaaaatctacatgtgattttacaaattttatattttaagctatctactatttttttataagtaatttactaaagtatttagtatattatattatacattataattttatttgtttctttacatcacaaaagtatatacttgcattgcacgtgcaagttttctcctgtgaattttttaaaaaaaaaaaataacatcaacaataaaaatattatcatatggtaaaaaataatattatgaaaaataatttattaattattaaaaattaaaaaaagacataacacataaatgagaacaaaacaacattaaattttcaaatgaaatattttccactacttaatatatttaattgggatagtgaactcccatattcatacaattctgtccatattgatatggatatggagttggaatcatatgattataataaggcatccaattataattgggatgaggttggaatggatagggattggggtaataaaattggggt

SEQ ID NO: 309201 - DNA, 2996 bp, Cannabis indica
tttttaattttggttaaaataaagtaaagcctatgtttatctaatttaattaacagataaaatcagaatataatagccaactaaagtccactaaaggacaaggaatttaatggccaaaagaccattctgccctcatttatgctaaaaagtccctaagtcacctaggggtttgggcaactctaaaatctcgaatattcttaacattcccaatgtctaactataatgtcccgctatactaaaaatactaaatgtgattctaatagccaaacaccacgttctgatgttgtcgggcacaaaatatgcaaaaacataaaattctatatatggcatataaaatgcattctgaattaaaataaatacgtaaaatgataattcataattaatattccaatttcataattaaactctaattatctgctaatttttgaattaaagttaagcgatcttaactgtaaacaagctcaaacattacttggacttgatcaagctcagaagttagtatactgagacatctggaacaccaattatgatgactgcattcttttttcatcacaatcatattttaatttgaaagaactaggtgaaatttgtggtatagttcttccaaataaaaagatcttcgaaaggagtcttgtggaaagttagatgtcgtccaaaaaggagtttcaaaagtctagcttgtccactctagaagttatttatttatggaaatttagatgtcatccagaagggccttcccggaagtctaacttgtccatccagaatgagtctccagggaaagctagccttcctcttgaaaggagttcctaattactagttgttccctcctgaaagggagtcccagatattcgacacctgctgctgcttttcctattcggtaagtcccttcagtgtacgcttcgatctatcttctaagaagcgtacgactcatccaaaaatgctttaacttgagctgatgtggagatatttctatgaggagtttgtcaagttcattaagtcgtaactaacttagcaacttatcatctacaaccactgtcttagggatccatattcctgatctataaatataactaacacttacaattttgtaagaagagttttagagagaagacttcgaagttgaagattgagattgaagagagagattgagaggtagagagaaagaggtacaaagaaaagaaagagattgagtttggaatttgtacgaagaatcttctatagatgaaaaagatttttaggtaagaatgtgagagataaacactttgagagaattcaaacagagattcgatcttgactttaattgtaccatgttcttgcccaatgaataaagacaatttcaatggtgttccataactagagtagagatatagatcacatcgatctataagacttgaaacagtatatagcttagtgttaattttattattttattattttaatcatcttttggttttgattactttgttttatcttagattattgtttgtgaattattaattttatcattactaatggtttgttaattaaaattttagttgatttaattctatacatcaattgtaattttctcacaatgactttggctcttaggttgatcaacatataaagacttatagggaaatcttaagcgattttgtcttccaatatttctggacaccatagaactagaagaaacgaattttaatttactttttcttatttttcaagatattaatattaggaggaactatatactaagttccttttatttgcaagtagatatgaacctgaaaaatactaagaagtaataatataaatatatatggaacacttctcaatgaatattattcattgatgggtactaaataattttaactttaaatattaattttaaaaatattaaaccattagattttgatttgatggcaaacaataaaagaaaattttgaatttctatgtttaatttagctactttattaaaaaatatagttatataaaaaatatttaagtcaaactcatcttttttatctttttttttttaatttatttatttttatttttttcaccgatggaacaatctcgatccatataatgtaaaaatgagtgatttttctaattaaatacaaaaattaagcataaacactcaaattttcttaatattacccattcatgggtaatacccattaagagtgtatatataatgtatacatattgttgttacgtatcaaattatagagcacattaatatgaatattgttattgattattagtggtgcctatcactttttataaatgatattttacaattagttagcgatattttttaaaaattattttcttaaattatatgagatgaaaaattgggaatggctagaatgttagatgtgctacagaccaatggctgccgagtaacactactttcaccccttatcactatggcggggatcctctctttactgtggctcattacatatcaactgatagaaaataggacataagaattttgaaagatcactttggaaatgtggacaatgaacgtattctttctattcctcttgctcctattcctagggaggatatgctcgtttggcatcagtcggacacaggtttatacaccgtgaaatctggttaccatttagtgtagagtttggaatctatgaatgttgattctccttcaacctctaaccgtcaatggtagaatggttctggtctttaaagatacctaaaaaagtcaaaatttttgcatggcatttcattaacaatgcccttcctactgttgtaaacttggcacatcgcaagatttcgacttcaacaacttgttctctctgtgtatgtgcttgggagtccattggacatgcactctttcgctgtaatcgtgctaaagcagtatggcagaaatcacatttaaatgtgtttatgcctaacagggccggccctgaaacaaagtgggccatagggagaaaaaaaaattggaccctttatgttagaaaaaatgtggtatttttcaaaatcggtaa

SEQ ID NO: 309202 - DNA, 1318 bp, Cannabis indica
aaatcacgtaatacgcctaaggtagttagggtgttacacttttcacatagctgcctttctcattaatcaactacccaccccagttttacaaaatcaatctccttctgagtatctgtttggtcaacctcctgattacaacattttgaagccgtttggctgttcttgttatccccatttaaggtcctacaataaccacaaaatggagtttagatctcaggagtgtatctttctagggtattcttcagtgcacaaaggatatctttgtgaaaatccctcaggcagactgtttattagtcggcatgtggtctttgatgagaattcatttcctgcaacaacacttcagcaagcatctcaataggtaaattctcatgttatatctcatttacctactgctaatttctctacgggtgcatataagcatgctgaaactaattttggtgcatttcctattgtggccattggttctggtgtcaatgagcatacgtctcctataaccaaccataatactgatactacttcaccaaccatcaacattgtgtctcctacacatatcttaccatctcatcctcctgaatgtaacctagttgccacaaatatacatcctgcaccaacaaaatctcctttaccaccatctgaaccttccagtttactcaaccctgatctcaccaactctcatccacaacaattaaataccactcaacttaataaccctcagattatacctagttctctaccccctgctccttctattgacacagaaccagtgccccttgtcacaggtcaaaggactcacagcatgcgcactaggtctcaatcaggcattagaaagccaaagtcatatatggcagctaagcacccattgcctgagtctatcttgccaactgaacctaagtcactaaaggctgcacttactgatccaaaatggaatggggcaatgaattcagagattggggctctacataaggcttagacatggacacttgtaccacttaaatccaacatgcatgtcataagatgcaaatgggttcatcatgtcaaactaaacaaagatggctctctaaacagatacaaatcctgacttgtagcaaagggatatcttcaagaagctggcatagattttgaaaaaacctttagtccggttgttaagccaacaacagttcggactgttctgtcattggttgtctcgaataactggaacgtctcacaatttgatgtaacaaattcataaataggacataatctaattttaaaattataattgattaattaaaatcaattaactggatctagaagcagtattatctcaactagtgagggg

SEQ ID NO: 309203 - DNA, 2458 bp, Cannabis indica
atatgcacttagaatatgaaaaaataatgggtctcatgcatttgaaataattatgattaattagtagaaccatctgttaaaagatcaacacttctatgtagatttttttttattattttagtaatattatagaataatctagaatcataaaaagttaatagtcataagaagttttaagaaaattttaggttataataaaatgacaatttgctagaacattctagcacaacaatacaccatccttgagtagtataaataggagaattggtcttttaggggtgtgcggtgagttgagtgataattctaatgtacaagtgtaatctaagtatttcaaagagtgtcccaaaagtgtgagttatatacaagagtattttaaatgtgtctagtatcaaaataagagtgagtgtttggtgcattgtggtttaataaaaagtgttcaagtcttggtgtaattacgtttacaataataaaagtaattatgttttccccgtgttgtattgtccgacacggtcatgttaccatctattgtgttttaatatatattttgggtgcacatatcataactctaatttaacatagatcgagtattggataattttatgggatatatacataaaatactattttttgtaaaatttttacattttcaagttcaatgatttttttcatttttatggtgttctataaaaacagcacaaaaacaacatgaaaactatataaaagtaataggaaaataacatttaaacaacactaaaacaacaacaaaaaataacatacaaataacaaaaaatcaacaacaaattaacaagagtacagcataaaaatacattaaaagaccatattttctgtaaataaatcataaaaattgtaaaaaatatttaaagtgcaaccatatttttgtaattttttttttgttgttttttgtgtatttgtgaaaataatccctaattttatagtgcacctgtaaaacaaaacagctctcacacttcctatttatttcgccatcctagaaaactttttttgcctaattatttttcatgatcgcatacgttataatatttgaaaccacctgtaaatttttagaaattttttaataagtaacaataacaaaaaattagtttaattattttgttgcacaattaactatttttttcttatacatgtgggaagtaattgtttaaacattattctaaaaactataaacttttcataatttactttaacttatatgcagtctaaaataaatacaacgtatatgattatgaataaaaaaaaaatagactaaaaatgttttcagatgttagaaacaaatactaaaattatattgttagaataattggcttttaccttttttggtgggagactaaaaaaaaatatgagttaaaactttttttttgttgcttaacttaatatgagttattctaatccttgagataataatatctctttacacctttatataattttttcttaaaaaaaaagttaaatatgtccactttgttaatcgagtttttgggcaaagttgttattcttagacccaactcaataagttagtatttgtaataaacttgacacaaacccaaatgtatttttcaaattaataatttgatgaaacttcctatttagtgtttgaaatctaataacataatttgtatgttttaatttttcatagagatgtttcttggtgagcttgtatgtggtccttgtctcctagtttttgtttgtcttatgattatgatttgaacatgttgggtccttctaagttcaatttctcatcattatgtgttgagcttttgtgataataatatagttaagattatgtgtctctaaaacatgtgaacatattacttaacttaggtaatgtgaaacattaccaataaatttctaacaaatcatttaaatacataacatcaaaatgtcactactgtccaacacctaaaatccttaagtaatctcttttatatgttaagatgttgcacttttttatggtaataaaattaatattaagaaaatgtaataaatattaattgtttttaacataatagaattctaaagtggccataggggtatgggaaggtgtgtgattttttaattgtgcaatataatatttaaacgttttaataaaaaattataataaaattatttttactttaattttgaaaagtatatttttaatcattattatataaatatgaatttaggcatatatttttggaaaatgaaaactaaatataatatattttctctattatttttaatgcttaaaaattaaaaggtattgtttcatattttaaaatttactacttgaatgagtaaaatattgaggagggggtcgcagattcatctaggttcattcgtttgtggaatggagtatggaattttaatatgtcatcaaaggtaaaagtgtttgtatggtatatgttccacttgactttaccagtagcaacacaatttatct

SEQ ID NO: 309204 - DNA, 1256 bp, Cannabis indica
gcccgatgttcagccctactatatgggatatgagcccttatttataagagtatataaagtgcaacttcggcacttgagataggacctcaaggggtatccagttttgtgcgaatgggtaaggacacatgcacttgacccaccacacacgtgcgtcgtccatccaatccgaactcagctagttagtgtggtatgacactttatattctacagaaattttatttaataaaataattctttttatttttattattaaatttattcgagaaacatgtttacttgatattgattcagaagacgttttactttctattgtaatttttcattccattggcaacaaactcagctttattatataaaaatttcatctgaaatatctttttgagggtatattccactgtacgctacattgtagtggcattctgatatagtgtaccacaattgtgctgttttatcctagggatgatcggtaatttctaacagcttgcacaatcctgggcagtgctccaagaagtacccaattttgtacgaatgggtaaggacacacgcactggacccaccccacacgcgcatcatccgtccaatccaagctgagttggtattggaagcaaatttgcaaggtaaaagatagctttacatctgtaatattaatctcaaaagttttgcctcttctttttataaaatagcatatggatatgccatgttgtgtaatctgttatccaaggtagattggaggaaggaggtttgggaaagacttagcctttcaaagcataaattcatcatttggttggttgtgcttgatagattacaaacaaaagacaggttattcaaaattaatattgctttggatagcttatgtgtgatttgtgacagccatgaagagaccattaagcatctctttttttggttgtacaaactgtttaccaagatttttagaaacagaattgttaacgcaaatttttgtttactaaatttaagcctatttcgtgataaatttgcacagaaataataataataataataataataataataataataataataataataataataataataagagaaaagaatcaacacaaaagtttttacgtggatttacagttaaattctgcatagtccacgagtctatcttattagaattttttgtacacaactagtatctttttctaaaggaattttttcccttttctagtgtatcctaccctatttatagttacatagaagggcaattaattacaatcaaattgatatcc

SEQ ID NO: 309205 - DNA, 1286 bp, Cannabis indica
agagacagaagactctctcgtgtcgtgtttaacagaatattgatttttttggggttaaatttaacagaatattcttttatttgtaaagaatattctgttaaaccaagaattgccgttacataggcacttttaatatataaagatatatatatatatataaatatatatattattttgttattatattgggtcgtgatcatcagagaaagtaaaataatttcaacagattatatgtaataagttgtgatagcaaatttgtagaaaaatctggaacaatctaatttgaaaacattatacaatattgtacgtatcctcatttttttaatttttttttttttgaaatttagctaaattttattagtcattgtcaaaaataaactttgaaaggccaaacaagattaatttgtattggagacaagtggtgaaggtgaatatgtgtgggatgttgctactaaatagaattgtggataagatgaatacataatgtttacttgaaaggatagagatggtggagttatgaatatcctctaatgaagattgttaggttaactttagtttaagtttcgggtcattttttagggtattttttgtttctagttttatgactgttttatgtttgattctttttatttcaggtccccggacatttaaaggaagtattcgtgagaatagagtggacaaaagaggaaagagttgagaaaagaactaaagtcctttttctggcaaagctcgtcgcggtgaccgttcttcctagtcgcggcggagaatgggagagagaaaattaatttgagatgtcgtggccgccgcgactacgggtttggtggtcgcggagaagccttcttgacgagttatgagcaatttcgtattttcacgaatttcaaaaggaaaactttactcatttaggggctcgtgattttttgaagattattcaaaattggaaacctagaacagagaagagaacttcaagagcggcttgtcgcgatccgaatcaatttctccaaccagttctttcttctctgtttaatttctacgatattttttgttttaaatttgactatgtgggatttgattatggtgattatgaactaaggtgacgtttggttgggaggaatgaaaacataggaatgggaatggtgaatatgaatgaaatggaataaaatttaaaatacataaaaaaattgataaataaattattaaattttttctcatcatgcattaaaatggtctttctttctattttgaaatggaatagacattccaccaaaaggccattccattggaatgac

SEQ ID NO: 309206 - DNA, 790 bp, Cannabis indica
tcttaaaaatatttttttaatttttttttctagagcacaatctatgcttgtattttttgccaagactcttgaatcacaccatattagcagcacatcggtattacatcaataaatagttttaaaaaatgaacgaaatataataaaaaggcattgttgtcagaggaaattaaataataccaaatattgtgagtattcaatcacagttagaacactcacaagcagatacgcgagtcgcgagtactcacctagaatagtgagtactcaaagtataagctacaaaaatagacacaaacataaacagaaaagtaaaaaaagacaagagaattatagtagttcagtcagagcttgatctgcttagtccattttcggtaattgttttagcttagtttatttgatttggatcactcatttatatagaaagcaagtgtcccttaggattacataaccggtcagattgacagaattaaatcaagataaacgttttaaatgaagaaaaattttgtctgttcttgacttaatttatgcaacgtatgcgacttgctaagtcacggtttgtcaatccatattctacagtgtcgtactcgtaggatgggcctttgggcctatttcgttaaatgtctatgatcacccttgattaccgtcgccagaaaagtcactatcgccaaaaaagtcatcaaaagtaggggtgttcattggatcacatccaatgaatttggacccatccaatccaatccaattatttattggatattggatttttccatccgatctgatccaatccaattgaatt

SEQ ID NO: 309207 - DNA, 2661 bp, Cannabis indica
acatattatgaaaaattgcatgtagcatccattacatgataatgtaaactcatgtaacataatagtacataatagtcttttttttttttttgtttatatctgtttgtttctgaaactaaagtaactttagcaatgaacataatattcttcagaaaaaaaagcacataacattaatttaagttttccaccggattgtaaataataaaaataaaatcgaggacagctctaaaatatattattgacaataaatttttatttaaataaaaacggtagctcaaattgaaaaacaatcttttatttataactaggttgatgttacatgtaaatgtatgtataattaattttttctgaagtgatcttaagtgatatgtatgtttaattttttatttttttttttttgaaatgagatttgaaattttaatttttaagatttttttaactactgcacctacattagtgtatatatgtcttctatcactaattagtacttcatataatcatgatatatcaagtttaacttaccttacaaatataatttggttaaaaataattttcgattttgatataaaaaataatttatataaataatatttcaagatcatgtacctttaaaaatcacgtgaaatgcatccatcgataaaattataaaaatcattatgttttactccacttgtatattgatcaaaaagaaaaaaaaaaaataatatcagcacactaaatatgattagaagactaatataaaatatttacaaatgaaattcttatataaaatatctacaatatttcaagtattttaaatttaaataaaaaaatttcttatataaaatttctatataatttttatctacataatttttattttaaatatatataatatattataaaataaataaagaattgttataacaaaaattccactgatacttcataggaggacacgtgtcaacctgagaaaaaacgaatcaacgagacatggatgtacaaactattaagttgcatactgacgagaaactattttttatatgaaaacacaatcataaggatgacatgttgactgttagaatacttagcgtatcatatacattatacaaactaagcataagagttgaatgaatctgaacaacgaatagtgaggcatccatctcgctataaaaagacatgcacatggtaccttcactaatcaacttcagacatcttttaatgagatccaatgctccgtcgagttagctctctcagatagaagctgacattcaaatgatgttgactgatgaagctcaccttgtcatcaagaactaagattctcagatggagcgttatctcttcaatagaagaaacgacagtgttttcattatcaacctcagaaagacatgggaaaagctctagctcgctgctaggattattgttactattcaagttcccagcgagatatcccaacgagatacatttttcagcgtatctaaacccacgtcagcattgacccagtaaaagcagataaatcacagctgtgtgattttcaaataataaccgcttttattttatgtgggaaaaaaataaaatcccacaattttaggagattattgttgtgggatattaatctgattgtaattaattgcattcctatgtaactattaataggtgcaggatacacttgaaaaagggacggaaaatcctttattgaaaaaaccctagtttttgtatcagagaaatctaataagatagactcgtggactatgcagaattttaactgcaaaaccacgtaaaaaagctttgtgttatttcttcttcttttactactgttatttctatgcaaatcagtcacgaaataggttttaatatatttaacaaaaatctgcgttaacaggttggtgctttcattgagagcctacgtggaaaaagctcagaaaaaaagacccttctgatcaaaagaaaaacctttctccatggttggtaacggagaaaacattagtactcatcctggaaaggagccaatgggctcacggaggcctcccaattcacgatctacatggaccacttgtcccagaaggacccaacctaaaagggacccaagtacacgatctacacattcaaggaggactcaagatgagaatggagcccagaagcagggaatgaagaacccaatcttgggggtgctcaacctatcgaatatgataatgacggtgcctatgatcccacgagatacgtgccagttgtcgagttggaaaatttccatctcaggcatcgtttggaggaggcaaattgacgaaatgctgagttggaacgtgagacagccgcggcctggtggcacagaagaacaacacacaacactaacctgatcctggagtgaggaaaccacgaggcagacctcgtggctcacaaaccaggaggcaagagatggcttaggagaatcctcagaatgctcaggaaaaacaacctggggaaatcgagggtccccctgagaatgaacaaacaaatgacctaccgaagccttctcacagaattgagaatagaagacgacccgagactagggaacaggaaattccccatgagaacgaaggaaatcctgggactcaacctgggactagtgggttgccaccaaggtcaacatccttctcgaatcacaagggaaggggcacgtacaaaccccagcagggggcatgcaac

SEQ ID NO: 309208 - DNA, 1034 bp, Cannabis indica
attcaaactcaatttaatgtatctattcgtactttgagaagtgataatgccaaagagtacacgtatgctcaatttcaatcttatatgacctctaatggcatgcttcatgaaacttcttgtgttgatacggcacctcaaaatggtgttgtagaacgtaaaaacagacatcttcttgaaactgcacgtgctctcttgtttcaaatgaaagttcctaaaccttagtattcctattaagtgctcatataggtctggaatgttggattaatggtgggttattactagtattttgatgattttgttttaaagccccatgatatgctttccttatattaatttccattagtagtgttttctccaagaaaatggttcaccatgaatttgttaaatcagagctctttggtcttacaactcaaagctaaaaggactattttgaagtgcccaatttgcagtgctattttgcagatcaagatagaacaaggacacaatgattctagatcttaatctaaagagattaatacataaataaaacaattcaattgaggaaaagctttaagtagtttcatttgtatcattcttagggacattttaacttcagtccctaaggaaaaatatttacatggtaatggtattgacattctttgctatacaaaattgttacaaataacaatcatttttgtcagtggttatgtattagcatctatctatactcatcatcatcatttatcaaacatttaagcttgaaacaagattgatgaaaacatcttcactgcagggaattgtcagagcccccattggatgatcaaatccgaattcttcttcagcttgacatagcaattcttggaatgaagaatggttcaagtatgatacagggatcacaaatcttgtcattttgctcttcccaacataaactgccaaatacccttttggaacatcttttgcactagaaaaaggcttctgaataagttgcttggcatgaactacaccgggaaaacgaaaacccatgattgctgaagtttctaaaggtagaagaagga

SEQ ID NO: 309209 - DNA, 934 bp, Cannabis indica
gtctaaaggggctggaggatcatcggtctgggcgaaaggaacctcaacattctggtcggtaggagaagtggaattggccgcctcagggttctcattggccgcttgagccatgcagtaatcaagaaatatgtccttggaagtgccaaggcagtcaaagtttgctttgggattggccttccaaaagtcataaaaaatctcgagaccagctgtctctaaggtatccaccctcttcccaagctcctccaccttggatttttggctcttaacctctgcttcaagttcctcctccctgttcttcttgtccttgactcatcctccaacctacaaagaagagtctgaagaccccctctcacatcttgcagactggtaatttcctgagagaaggaaacgttgtcttcctcaagctgcgcggtctatggcatgtcctgtagctccttggtcagcaaagaaaccctggtccagcagcaaggagtttcttatctgcctctccatgttctatcctcacgacctcaagctaggtctgcgcatcttcaacgtctttcttggccaagtttgcttctcttcgcattgtgttagaggtggcaaggttcttggaagcagccaacttggctcgagagtatgcataagccatcttcataccagtctttatggagaatgcaataaaatctgaattatccaaagaataatgaaagaaaagtgatagagggaacttactcgagaaatttccttcaaaactcctcctaagaccagctccaaggataactcagtgtccgccccggtcagctgttcgttcacttctgggagcgacaaagccacgttttaacgtccccgcatcaagcctccattgggcccttgcacccacggactaatggctcttatacacgagttcgtcactctggctgcttcatggactgatgactgaccctacagacca

SEQ ID NO: 309210 - DNA, 877 bp, Cannabis indica
ttaaatttaacagaatattcttagtatattctgttaaaccaagaaatgccgttagataagcacttttaatatataaagatatatagatagatagatagattgtgtttcacttgatactatctcaagcttgatctttaggtttgtatgccatataattctttttcattcattttttcccctttaattcaaaagatggttgaaatgatatttgagtgatttatgtaacatataatgatttggatggtttcatatttatattctatgtttgataaaatgactcaaaagtatgatttcctcacatttagcattggttgaattgagctattatttgagtttgtgcaattatttgtttttgaagctttaagtttatattggttttgatttcccatttttttgttgggatactcatgagaaaattatattttatacccactttattttatttgttttaatttttacctttatttccatattttttaagatatattcacttttaatagatgtgcctattataccttttatataaatgtaaattatgtactacacttaagtagaaagtaaaaatatattagacaattcactcataaaagtgggtagattttaattaaataaaatatgaaggtatttttgattaattgatacaaaaaagaagtattcctcaacttatctccatactcattctcaccaatgtttttggtaatgctatgttaagttatacaaagttcatattagctttcatttcccatatatgtttttgattgctctgctgctcaaaatattgtgaatagtttcattaagctaaagtattaactcaggcatataatgatttaaatttagagcattgctattaggcaccagtggtgcctagcacctttgc

SEQ ID NO: 309211 - DNA, 618 bp, Cannabis indica
acaactaatggaaaactttcccaccccaatcataaatgagttcacaaacataaaatataaataccacttgagagtctgccaagatgccttgtcaagctcccaaagccaccgaatgaaacaggtgactgtataccactggcgtcaccaaactgcagagaatggtattgtaacacttgcattccttttggcatgtaagcataatctattggaggtttttgaagtatagttacaccacctgtaatacacgattaaaagcagctggcagtgggctgcagaattgatgatccctcgttaggaattgagatgaatatggctggaagagaataaactgctataaacaatatatgcattttcatagagacaaaatgaatgaccattcaaaattagcaagaataatacatcgaatttgtctacttagtaatgaaaatgaacacattttcattacctaattactttcaacagataagctgtgtattatggaacaaagccctggataagcaaatgaccaatttccttcttattagtggaaagcttttagttatctttagcatatttttctaaggtcttgcttagttgtatttttcacttctatttcctattcataaaagtgaaaatttc

SEQ ID NO: 309212 - DNA, 1429 bp, Cannabis indica
gccgcggccagatgtgcacaattactcagaattgtgtttcttcggctcagcacgtcttttaacgaatttctgcacccgagacctctttattccaaagaacctgaaaacatagaaaacaagcgtaattccgtcccaacacagctaaaaacgcacataaattagatccaaaacataggctaaaaatagcctaacaatgggaagttcctggaacatcacgtcgatgctcctgatttctcatattgccagtattagattgactttctctattcattagaatatccctcgtagtcctaggttattcttcgtgagcatttgtgtgatttccttgattattttcttgcctcttagtcctggaacctcgagatcttcctcgtggtctccttatagatggatcacgttgagtttaaggagtgttaccctgtgcagccttcactaccgcagcctctcgttccaactcagcgtttctctggttagattcagccagacattgtcaatagttacctattttccaattccacaagtggaacatatttgatgggatcataggcgtcttcactttgcctctctgggatctattcttcagtttgaatgaaatttccattgttcttctcagaacatggtgtttcagtgatattagttctttgcgatccctaaggttcttttccagggtgatgggtagtctcctctggatggcttccttcgtgtgggggggggggggggtattattcgccatagatataggtttgtaattgtgtttataaggagagatttttttgagtttttatcactaaggctctcaatgaaagtaccaaattattaacgtatatttttgttatataagtatataagccttttacgtaataaatatactacggagtttaacaataataataaatgaacaccaaatattttacgtgattttgtagttaaaatatacatacttcatgagtccttattagggatgatgatctggatacagagtataattcttttaataaatgtaaaatacaattttttctctcaagtttgtcgtcccttttttcctaaattctgtccatatttataggtgtatgggatgacaattatttttattgggatctattcctttacaattgttcatgaaacatggacattccccgcgttttatttttatgcacatataggatcatatttaatagctacccaaccgctctttgtctttatctttaaacggttatgctgactaagaaggttgtttcttgctaaatgtgagttcttattcttcatcgtctttataggaaagaatgctaagtatagatatgcttctcctcacagtgctcttcatattataatgatactagcgaggtggctgcttcaacgtgtaaaggacaagatggatgaatgtagttattttctccatgtacaaatatgtgggtcaatgagttacaag

SEQ ID NO: 309213 - DNA, 1248 bp, Cannabis indica
acgccttaaataaaatgaaagttctatatatatatgtataaagtcggtcaattatggttttagttgtcggttcagaacccaaaaaaaaaaccgaccgtttaatggcagttttaactgtcgtcagttttttcaatttctgttccagcggtgttcggtaggtcggtttgaccgatttttttagttttctggatttcatgctcagccctaggaataggcatccatgaatgtgaggagttcatggccaattgttgcgtccaccagttgatcaattcttggtcgtgggaaataatctttagggcatgctttgttgaagtaagtgaagtcgatgcatgttctctactttccatttgatttaggcaccataacagagatggatacccaaaccgagtagaaagcttccctaataaagttattctcctgtaatctttcaacttcttccttgagggattaggaatgctctttgttgaggagcttgcgtttctattgtacaggcttgaagttgactttgtctatgttgagggcatgacagatgactaaagggtcgatcccaatcatgtcctcatgcaaccaagcaaaaatgtcttgatttctcctaaggcaagccatgagcatctcactcaagacctctataagatttgttctaatcttgacaacctcggtcgggtgtgatatgttgagggaaagttctctaagttcctcggttggaccaactcccaagtcaatttccccaaaacagtggtcaatgtcatccccatcttaggcgcaccttaaagtggctttagatgttgtctctatcttctccttattttgatctccagaggtcttaattaactctctgacttttataggagaggccttgctcgtccccctagtgccatagcagcagaggaggtcttgttcgtcccctctgtagcagcagaagaggtcttcttggtgagtgatagcaatgcattatagcactctcaagtagttccttgatttccaaggggacaactgatactagttgtcgttgggaacttgacagacaagtcgtatattgaggagatggcttgaaggtcgtaaagggcaggccttctgagcatcacgttgtacggagacttgtcgccaaccactatgaatgtgaccgtggtggtggtctactttgaggcagtactgactgtaagtggcaacttaattttaccacatggagggatgtcggtgttgggttttatgccttaaataaaacctcatttcaatgtaatccagatt

SEQ ID NO: 309214 - DNA, 1038 bp, Cannabis indica
tggttgcagaacgcatttttgtttttcaatacaaaatttttaaaagcaaaaattttactttcattttgtgattaaaaaattagaaaataaaagtgttaccaaacggcaccttagtttatccctttaatggctttacttatagggaatgagaatcaattgtatcaattgtatgttattgattctcagtggataacgatgttggtattccttatcccatgtttggcccgtggctatcagttgcttctgcttatctcgatgtgttctctggcgcaaacacgttcttctcatcccaggctactttctcacgggctggtcgtgttgcgaaccagaggatgtctctgctgtcggccatgaatggtggtaggagaagcttgtatcgtccgatcatggtggggcgtggttcgaagcacttggtgaaagggacgggtcagaagtctggaatgggtaggctagctgagcagaaagtgtgggtacccaagcggcttgcagtcaatcgacagcctggggtttcctttctgggtaatgagttgaacgttggagaagatgataggcaaaagggtacccagaatttccattcttctaatttaaatttcattgaccagcctttgatgttgactaatgaatcggcccaaggtgatgggcttaacaaagaggactttgggcctgccttttcctcttctgggccggttactgtttccaagaaaagtctcaagcaattgggctttaatgctaagctgtgcaagttaaagggggattttaagtgtggggtcggccctatggctatttctaatgatcaagaaggagtgaggggtggagggctaaatgtgggtcaggatgcaaatgggccaattggtagggtcatggacatttctaaatgcatcaacataaatggtaatttgaataatgggccggccactactatttctaatgagagctctatttgtggtcaagaggtaaactttcaccatgatgaaaaattagctttgactaatttttttcaagctcaaggcactattttacaagagcttaagaaatttg

SEQ ID NO: 309215 - DNA, 947 bp, Cannabis indica
tttatattaacacagaataatagaatatcgttacttacattttttttaattaaaactagacagcattcaaactattaattattgtttaatatattattttgttaggttacaagagagttctagattaactgtatatggatgatgattctgctcccgatcgacttcttttttttttttttatatataaatatttatatgtatataataaagacaagcctatatatatttacattcttaatttgtaagtgttttgagtctatattaattaataaaccaatcccgccaccaatctctgccactaatgttgaattatatatttaattgaaatgccttaaaataatgctaataattttaatctcctcttttttgatctctaaagaaattttcatataggaatgcttttttttttttgataaatatatatttattaatttgcagccaatttgaattcaacgtaaaatattcatggtcatgatatatctgaagtagtaacgcacgtggtggtataatagtatattttttgttatagatagagatattccaaaactaattagtatagtatgatgagttcagttaattgatatatggaacttaataaaaatccagctgctgagatttggaaaacatcaaatcatataatgtcggtataatattatttattatatgactttcaaagaagtgaattcaaaactactaaaccatgtgtttttgaaccttgacttatcgatcgatccttttctttctatacttgaaatgtgctctcttataatattaacaaggcatacattcaaataaataaataaggccagaatgatgtgatatgtctgtccccttcttttttacttctcttttaaaaaaagaaatatatctattctatataaagtgttcctatataactgaatttttggtttatgagaaatttatgggtgactttttatttatattaa

SEQ ID NO: 309216 - DNA, 1602 bp, Cannabis indica
actctacctagtaattacacagttacttccaaacagacttaagtaaattaaaatagaataaatagaatttgtccctttaaattatgactttgaagagttttgtttcttgaatttttttttttttttgattgcacaagatccttttgaattataaaaatcgatactaattaataattttatgcagttacattctgctcattttttttaataatctatttacgtagcactaacatgattttaatttggttcaattcaagaataaagataaaatataaatacataaataataatctaataatgaattgtgagaatatacatatctgtatttttagagctaattaatatttatatatttaatatcaataaaatagactttaggtagcttaaagttgttaaatatatagactaactttaccggtaagatggctacataaacaaattgtttaaaaaaaaattaaatgtatttgaaaaatggggtacttgtaataatttgtataattcgttggggaatttttttacaaaaaaataattcaaagagtaaaattttataaggatcatagtcaaggatgaccttgtgattgggtggaccttaggagaaattaaaaaactattgatccttttacatatataaaaaaaaataggtagtaatttaaaagttactgaaaaaaatatgtataatttaaaagaattattacataaaataacaatttttttcttaaatttttatattttaagtttaaagttttttcttacatacaaaaaaatcacatgaaagtaacaagaaaacaacatcaaaataaaataaaaatcaataacaaaataacaaaagtgcaacataaaattataccaaaagttcgtactttatgtaaatgaaatttaaaaaatcgtaaaaattttgaaaactctttatagaccgtatttttgtaatttttttgttatttttgtatttttttgaaattatctctaatttaaaataaaaactattttttttagtgagccctaggtgcgggtctagcctgccttagctcaagcccgaccttaatcatagttcacaagaaaaaaaaaaatcttatttattcattaaatatgtgagataatatgtgagatatgataaataattacaccaataataatataacattaggtcattttcaccatacatatgtttactagacattagtaatgccatttgccatttgtgttttattaagccattataggttgacaagtcatgatgatcttacattattggcactattatatctttccctttctttaattatttgaaaccacaactaataatttccaccaaggaaaaataccaattcttcttcttcagctttctttaaccacaagaaaatgagtgcatgcaattcaataataaagaatgataaaacaagccgcccaaaagaaaggaagaaaataaaaattacctttcatttttttatatatataaatagataaatatatatatatatatatatgagtttccatagagaagagaccatgtgtaataatactttatttatgtattaaaaaaaaccccttatttatgtattattaaattaggttcaaaatagacaaactgaatttttgccagcc

SEQ ID NO: 309217 - DNA, 796 bp, Cannabis indica
ttatttaatttaatttaaatgtaataaacaggttgaaaattaaactataatattctatttttataaagaacacaagtagagacacaacccaaagactccaactccatttctaatttaatttcagcacaaagaaaaatcaaacaatattgaatagaattatgaaaggacaatgcgatgataaaattctactattgaaactctcaaaaaagcaatgagacccgagttggtatacatgtacaaacaagtcatatgaaaccttaaataactacccaatgtttgtacgtctaatattatatatttatttgttgtgctagttcttttccatctaagcatagaattgagaattatcaatttgtgtaatttgataagttaaaccttttagttggtctcaatcaaactatttttcaccaaacttagatattcctctaaatattctctaacaacacaaaagattataatttttttttagaaaaatgcaataaaaagtggctaaagctatgaatttcaagttttaatataacaattagtataatactaaatcaaagtaaaagatatgccattataatttgaattcctctaaaactattattaaattttaaattaattaaaagcacacatacacaaagccacattattaaaaaataagaccaaatattgttttaattcgatagtgttacgaaaattatgatcactacgcaagtatacacaatcaagtagtaaactcacgcaggtgaggtcgaaccacagggaattggactattactactaaattatacttatgattctatctggtaaa

SEQ ID NO: 309218 - DNA, 1159 bp, Cannabis indica
ggggaaacatgtgagatactctccaacattgtacatcagttatatgtatatgattttagaatgctgtttgataaacctgtcttactaaagataaggttcctgtttaacaagctaaacacggaaagattacatgttgataatcttatttggataatgaaggctgtgacaacaaaggctttgctcccatttctgggtttcgcagtcataatcttttcattcaattacgtttttcattttgcaaaatatttttgacaacaaaatgattgtttcattcatgtccaatctagatcaccctgaaccaatcttctaaattttagtacatgtagtattttacacattataatataattacaaatgattaatttgttaaagttgttgcaaataatatttagtacatgtagttgattgccataaaaaatagtaataataaaaatatggtatattcttttctttttttttttttttttttttaaacttaaattatgattttattaataagacaaattgtctaataggaaagacataaattaattcaccaactatgagcaattctattagaagaataatgactaaacaaaaatgaagcttccttcaaacaattaaacaaatagctacagtcattaataactaattcaaaaggagagttcatcatcaactgattacgaacgactttaactgctactaaacaattcgtctctggcaccgctggtgactattctctatccttaatccaactgagagcctccttgctgctaataattcaactaacttaggtttcaaaaaagggagtttatcataaattgactacgaacaacctcaaccgctactaaataatctgtctctagcactactgttggccattctctatccttaatctaactgagagctttcttgatgctaataattcaaccaacttaggttttatatctcccctacagcaaatggaacgagctttaagaagaccaccctgatgatcacgagtaccatggcaatgtcaaattgatgagtggcagcgaacaacgcggtgtcaacatttgaggtaaatatgatattttcttactttgtttttatgtgggattttaagttttattggaaaatataataccctaattttcaaaaaaaaatgatatattttaataaaatataatatgaaagtatt

SEQ ID NO: 309219 - DNA, 2833 bp, Cannabis indica
ttttattaatttttttattgcattctaaattttattctattccattcccattcctattccagcggatagatcaaatcaacccaatccatgtaatacaagaaatcaagaactttgacgtgatgttccaagaacttcccatggatttacaaaccaagagaatgaatgaactgatatacctgaatcgtcttgcatgaatgcaaatgcaagacaaccgcgaccaagaaaccaggactatccacgtaacgatggaagaaatcctggaaaccaacctaagtccaatggtcgacctccaaggaattcacaaaggccttctcgcatagacagagagaatatgcacacttacttgagtaggggacgtgtgtctaacctctttcaaagaagaagaccaatgggagaagaaatgcgtgaagcaagctcaagaacaggagaatcgcaatctcacaggcacagtggatcgactagacaaatgcgagacgggagcagaactcgatgatattttactgaccatgagagtataagtaacttatgtagttaccaactaaaacctactcgcggaccaggtccataagtaactatgagcataggcatcgtgtacctgatttaagcaaaagatttaaccgaagacagccagatctttgcaagcacttgaatcaaaatgcacctaatttgcataatcaacttaaccaaaatgcaaatcaacaacctaaggatcccattcaattacgagtaattcaattggaggataaatttagtaaatatcaagatggagagtatggcaagttgccaggatatgactcagatgaagaaactgagccattccaccctattatcttaaattcagaatttcctcggggatttaagaatctacatgtcttgcatttgcaatacgatggaaccaaatatctagtcgcccatttgaacaattttaatactacaatgcgagcaagcaatgtttcaaacaacttacgttgcatattatttccaacttccttaacatgagccgcgagtagctggttcgataaattcaccaatcattccataacatcctgggaacatttgttggaggatttcaaaaatcaattccaggctgcaagagatcgttgaccaaaggcgtcatctttgaccaacataaagcatcagcgaggagaatccttcaaagcgtacttcagtcgatttagtatagccgctgtaaaagtcagaaacctaaatgattgcatttagttaatagaccttcaagctagaatcacaactgttttatcaacaacaggggaaaattatgggatgaaagagcacaagtttttgtgcttaaagaggaagcatggaatgaaatgaaattattaaagactggctcgagagataaacccagcatagtacggcaacaacaagcaccgtcactacaaaggtagaaaatcctagtggatcagataccaaaagaaaggatgagtcaaactattcatccaaggacaaaaacaatcaaaaaaaagcacgagaagtatgtaccaatctattcggtatatactgaattaaatgaaactcgcgagaacatctacctcgccaatgaaaatagggtcgcatttcacaaactagaaccaatgagacacacgaggaacaagcaagattcaactaagtactgtcgtttccacaaagatattgggcataccaccgaggaatgccatcaattgaaagatgagattaaaagtttgatctcgcggagatactttaggcaatatgtgagaactcagggaaatgagcctaatcagcccaataatctgagattgcaacctccccgcgtagagggcaaggatattttggtgatttctgaagggccacacctcgcatgaaacagtaacagtgcacaaaagaggtacataaacgaagtgaaaaatgagcaatcagcattcgctccagaacctttgaaaagatcgaagtcaaataaaccacttatcatcttctttgaagaagattcaaaacatgtgtggtatccacatgttgatccccttgtgataatagttgagagtagtggtagataatggaagttttgtcaacatcctctacgaggacacattgaaaaaaaaaatgggattagaagaggctaaactaagaccatgcatgataaatttatgcagttttacaggaaacagtgtcatgagcttaggcattatcaagcttcccttaactatgggggaaccaccattgtcagcgacacaaatgcaagagttttcggatgatgacatcccttctgtatataacgtgctgatgggtcgatcaactctaattagactgggggcagtgagctcgattaaacacttgtccttgaaattccctatgcactgtagagtgggaacagttagaggtaaccaattattttctcgagaatgttatcgagtggaacttcaaaacaaaagagccaatcatcaattgatgataattctaactaaagaaattgagaaggaagcagaagatttggatccaaaaatccaagatgataacaaccaactcaaaccaattgaagagttggaggaggtgattttagatccagacaatcccatgaagtgtgactacattgggaaaagtttggaggaagaactaaaatagcaatgaatcaattttctaaaggcaaaccaagatcaattcgcttggaaccactcaaacatagttggcataaacccaaaagtgatttgccatcacctcaacattgatcccaattctccaacaaaacattagaagcgacgaccattggatcctgagagacaaggtgcactcaaagaagaagtcaacaagttgttaactaatgatttaatacgaaagctttctatgttagaaattattttac

SEQ ID NO: 309220 - DNA, 2355 bp, Cannabis indica
taaaaaccaagactccatatcaagtacaagaacaagaaattcaagttttaaagcacccatgcaaagttatacctaattcaaagcttgaaaactcaagcatccaaaatcttaaggaaaaacccaaaattccatgatcaaaaacaaaaaattcaaatcctatattcatccctaaaagcatacaaaacaaaccagatgcaaataacacacatccataagctcaaatatacaaaaatgatcactaagcctcaaaatcacaacaacatgcataaacaactcacaagaacaccaaaacacactcaaagagcttcaaaaacacctatgattaacacaacattcatcaattaaatccaaaaattaagagataaagtagctaccttaagcttctctaaacaaaatcatgcacaagctacttcaaatccaagctactttccaccaaatcaacaaaatttaaaaaagtgaggtgaaggagagagagagggtcgactagaaaggggggttcaatccagaaaatcattttccaaatttccaaaattttattttgttgaataatacatcaagtggtcaaatgaccaaaatactcctatagtcaattataaacatatctatataatcaatgacgaattagtcattccaatcacacgcataatacattatttcaaaatttctcatttatcacaataataccaaaattaaatctcgaaaatgtattttgggccccaaacccagttcagcctaaaatacccgattgtgactataccgcaccgacttgtcaaaaaacacatgcatatagaaaaaataaacatactatataataatatagtccataagcatgacatatcataaaattacgattttacccgtctcatgtcaaaattacgaaaatgcccctagtacaccaacagggtcttaaaatgcaacctatcaatatagcttcacatattaaattatataataatataatttcttattaatacataattaaactagttagggttgctaatctggtttcataaaccttagggcattacaaagatcccccttatagaaatttcatcccaaaatttacttgaacaactctagatatttttgctgcatatctatctcgagttcccaggttacctcttctactttgctattcttccataatactatgatcaatgcaattttcctttttctcaagactttttcctttctgtctaatatttgcactggttgctcctcgtacgaaagatctggctaaagttctaatgcttcataactcacaattgggatggatccaagacatatttttgaagcattgaagcattgaaacatgaaacatattatgtacagctgcagtgcttgaggcatagccatcatgtacgctactttccctatcccttcaaggatttcaaaaggtcaaatgaatctcagactgagtttttctttcttaccaaagcgtttactgcctttcataggcgatatttgaagaaattccatatctttgacttggaaatcaatatcctatcgctttggatttgcataggtcttatgtctactctaagcagcgagcattcgtgctcttatcttatcaacttcctcacttgtcctctgaataactttgggacccaagaactttctttcacctacttcatcctagtgaactggtgatcgacattttcttccataaagtagttcataaagagccatcccgattgttgcctaatagttgttgttatacgagaactcgatcaggggaaggtactttacccatgatccttcaaagtctaacacacatgcccgtagcatgtcttctaagatttaaatggtcctttcaaattgtccataagtctgaggatggaatgatgtgcagaattttagctgagtacccatggctcaatgtaagctctcccagaatcttgatgtgaacttcggatacatatcgaaaataattgactttgggacaccgtgaagatgaactatttctctaacatacattttagcatactgttcaatggagaaatttttccaaacgtgcaaaaagtgcgctgactttataaacctgtcaactatgacccacacagagtcgtactgcctcgtagtcctaggcaatccaaccacaaagtccatggtgatgtcttcttatttccattctagaaggttcaatggctgcagcaaacctgcaggcctttaatgttcaactttcacttgctgataggttaaacacttgtcgacgtattgtgctatatcgttcttcattccaagccactacaacatggccttaagatattgatgcatctttgttgtccctggacaaacaaaataaggagtcatgtgagactcatttagaatttctctcttaatatcatcattcat

SEQ ID NO: 309221 - DNA, 1648 bp, Cannabis indica
tttaagcatcttttgaagtaagttgttatgtttttttcttttttgccctctaatgctttttggtttgtttaatgatatgcatattttaatttttttttgcctgtactgaaggtggagaatacatataagaaaggccttgataggatcagagaagactgaagttgcaaatgttaaaaatgaagaaaaggaggatgaagatgatagagtagtcagagaaatggaggagttgactcatgtgttggagtgtaagaagaaacgtgtgaaaaagcttcatgcgaaaaggcaagctaaggtttgttcccttgttcatctcccaccctctgcaaaattcgattcagcatagattttattcgtttgtagaaattccaattctgatataatctgcataaagagtggtctagaataaaagactattttcagatatacaaattttgtatgactgaatttcaagtgattgatgctactacttgtaaattttccttttgtttctgaattttttttgtgctttatattttattttatataggagaaattgcgtaaggaaatggctatgcaaatggatggagtggatgatagttatgttgaccgcgaattgttctccctgtctaccattaaggttcgctttaaatcaaatttcttgttcctctaagaacatatatacattcattcattattattaggcctaaattgaattcattcgcttaatctttaatttgaacataacatgggtgtcacattatgagtttttgatgaggatgtagatatatgatcagatgtttcttcattaattttgcctaaattaatagtttttttcttagtttgaaatttggtctagttctctgtgtgattttaggacagttttacaactcaatacagattaagaattggtctaaaaagtagtagtacaacaagctgaatgtcatcatatcatatgtcctaattaagcaacgttttattaatatatgaaagtctatttatggttgatgctattcacggcaagcttttatgatttgccaattgaaatattagaggaaatcttgttcttggtacctctcgattctgtgttttagtttaaatttgtaaacaagttttgttattcccagatctcggctttcattaaacacccgtcatttgtttccaagcacatcggaatgaccaaaaaccagtcatttgtgtccttatttttcagtcagcctttcctccatgttgatgataatgtgaactattaagttataactgccatatggtattaatgtgctttctaaatataacaagtggaaaaaagatagttttagggagaagagaatttatttatttatctgatacttcagatagagatgctaaagttatcaaattccagtatcttccccatcatcagcttcacaataggtaaatgatgtttttatctaaataattttaatgcattaattaattattttattgaattagttgattattttttaaggtggaataataacactcgacattagatcacggaggaaaaaaaatatggttcttcacagaaaaaagttgtgtatcatgaactcctgtgacagtcagtagtcccgtgatccgtaaggggatataccgggtaagctgtgcaatctcacaccgcctggggaaggtcaagtgggatgattctaaggct

SEQ ID NO: 309222 - DNA, 504 bp, Cannabis indica
attgttgagatatacagtaaaaacttccttaatatatacaaatttgtgacactagttgatttttcacttttgtgatttggaaagaaactaatccactaaataagtttggttttctgcattgtaaaatttgctttgaactatatcaaaattcaaaacctatgattattattaattaattaattaattacttgcttcaatataaagactcgacccgaaacttccactactataattctaaggtaatagtctagtcattatcattacccatttctgtaatttaattttttttttttattatcaatgaatttttcaaaattttgtagcccattattaattgttattattgtttttagttaaacaaatatttcttcaaccggccaataatttaatttttatatgtatatattactacaaaagaaagaaacaattttccttattaaacggttgatttaattataattatacatttagggctcgtttggaacgccgtattaggtcgtattg

SEQ ID NO: 309223 - DNA, 631 bp, Cannabis indica
tccaatatataattggatcggatctgaataggcctaaaaatattggatgtgatccaatgaacacccctaagtgagtggctggcggatcttggtatagacagattgactactgagattattattatccctattagtattattggggggttatgtcagtttttttcttgatacacacaaaaaaacattaaaatgaaaaagttatacactcaccacagaatactactctttttcaacggtgggtctttcatagaagtgagatcaacattcaacaagggttgaatttataatttcttaataataataatgctgttaataattgtatatatatattaaagcaatcaaattaagtacaaaatgattaatatattataataattaattaattacccctagtaaagtagtactgtttttccatataattaataaagttgcggtgaaaatgagaggtatatatatatatagagagagaatcatcttttatcttatataaatatccttttatattacaaaggatacttttagttcacagactctgaaattaattaatatataacaaagagaaaaactccattgagcattatctaggacctttcatttcatatatatatatatataaattattttttttctt

SEQ ID NO: 309224 - DNA, 965 bp, Cannabis indica
aaacaaacaaggtaatatttaacattaccattctcttgctaatattaacgtattccaaacacccttttaaagatttagctgcatatctcactaaaattatttgttataatttattttgtcctaatttaactaatatatcatatgtttcttcttactatcaaaaaatttcttgcaataactgaactaattttttcttaaaaaatatactaattattggaaaaatatgtaccctctttaagaaaaaaaaggtatttttgtaaaactcatatctatgtcattcaatagagcttcttattcaattatttttcttcaatcatacacaatgtacttatttaattaggttcatttttagaaaattctaaatagtatataaaaaaggttcaaataattgattactacgaataggagaaaaaaaattatgcatgcaacaaaatactctaatcttatttttgacactgtaaaattatttatttattttttttaaaaaaagtattacaagtgaccctaaataaataaaaaatacaaggaaacaaaaatagaccaaaactacccttaagatgtactatagacttatcctaaattattcattttattttttatttgttttatttcatttgatttcaaggtttttatatagatatataaaggagttttttcattttacaattttaaaaacacttttttttttttttttgtttattttacttagaattttagttcacaaaactaacctactagcaactaaactagagtaacctaaactacgtaactaaaattacgtatagcaacccaccatagaaactaaccggacgcaactacaataagtaatttttaaaaaaaaagtttaaaaaaaataagtatataagtaattttaattctagttattttctaaaataactaataatattaaaactaaaagtacatagttgtacatcataactaaaataattatttttagtttttta

SEQ ID NO: 309225 - DNA, 1728 bp, Cannabis indica
tcccaggtatcagagatggtagtcattgtgcaccacccttggtcatgatgtcagggcttgtaggtgtggtgcctccactactcgtacccttcctcatactcaggtcatgtaggtgtcatggttgtaccgtaacatttgcccacccacgtgctttccttgtgttcttgattgtcggcctaaggactatacctttaacacttaagaaaaattcggtaagtgttgatcatggaatgggcatgcttgatgcatgcagagtgaagactcataactgcaacctcattcacacataatctctctcttgctcatttcttttttgaccttcgctccccaagtcaccaaccacttcttttggcctctccatctcgccaacatcacccactaggcttcctcatctcgccaatcaccaccctcaactacccatctcgccaatcaccaccctcaacagcccatctcgccaacacccctatcttgcaaacaccacccatcttgccaacaaccccatcttgtaaactccacatttctcagacccccatgttgccaacaccacaatcctcatctccacatctccctaagttgccaagatcatcatgctcatctcctaaagtgaccaacacaccatcctcatttccctaagtcaccaacatcaccattatcatctccccatctccctaagttgccaacatcaccatcctcatctccccatctccccaagtcaccaatatcaccatcatcatctaccaatctccccatctcactgagacctcttctcgacctccccatcttgcccaacactcgtttcatgggaagccatgagtctgacttttaataacttttgaaaataataagtgccaatttttggggttaacaagcaatcttttgggtacacagccattgatcttctggttaagcatcagctaatctcgaaagttagccttgctaatttttgggattaacaagtagcaattgttgcctaaagaaaagaagacaccactggtcatgctacaacatctaatgagattttagagtttaataatcttcgttgatgaaggaacttgtacgattggcatgcagaatacaacatgagtcttctaaatttaatggattttcataaagggaaaaccaaggaaaatactaaccaaaacatagtccattgccacgctcagcagcaggagatgaagtgttgatcaagtggcactctctctcaaattttaacgcaacaaaggaatatatctttgagattgaagaacaatttcaaagttttcaccatgaggacgtggtgaacattcttggaagggtattgataggcctaagacttatcttttatatcacataatcattaaatgatgaaatacttagtctcttatgtacataggctgaactctcttaatgttttaataatgtttttccaattgtaatactaggtggcctaagttcttttaagacaaatccttataaaaagagatggagaaacctcatttagattgccttggaattagctcagagtagaaactttgtggatagaccaatcctctcaaaagattgggaatttggagagatcagccttgaaagctcgatattgtaactttatcattattttttagaataaagatcacttgggaaatttatcatcccaaattttttccacctaacgtggcatgtccacgtaagccaagactaaggacaggtggaatacaaccttgccaatagcaggacaaagtctccttataa

SEQ ID NO: 309226 - DNA, 2521 bp, Cannabis indica
atgaacccgactaccaatcccaccattcaagggctcaaaacggtggataaaggcaaggcgattgctatgacagatcctgttggacaattaatttctgaacaacaggttctaaaggggaaacacaaccatactcagcaagcggatttacacgggataagtgggaaattaacgaatactaagagaagcggttcttggagaaatgaggagttcaacaatatctttaaagaccataatttattcaacagccagcacaagaatggtctagaggggcctgcaattgattctctaaacattgatactgagagtctattggatgttcctgttacatacacaaccggttgtgattttctttcaaaaattgaaggtccaactaagcggaggaaggtgatcccgaagagaaacaagaacaggaaaggaactaattcaaatgaagcaatctcaacagacccgatgatagcaagaaggaaggatgatgcaaaggaaatttcagttgtttctgatttgacctttgctatgaacttggaagcgacgaactcagcagcactgggtcgccgagagcaatgatggcccttttttggaatgtccaagggcttgggaacccttggactctaaacaccttgaaatcccatgtcaaagactatcatcccgagatgatattcttgtctgaaactcgattaactagtgctcgaatggaatttgtccgcatccaattaggctttgatagttgctttacggtggatgctaaaggcaagagtagtggtttggcgcttctttggtcaaaagattactcggttcagatcaaatcatatacggtttcacatatagatgccattgttgaaaataatctgggtttttcttggcgatttactggtttttatggcagtccggatccgggaggacgaatggaaagttggaaatttttgaagcgtctcaaaaccatgttttcaggtgcttgggtttgtggaggagattttaatgagatcattaatcataacgaaaagagaggaggaggtactaaaccagattacttgatgcgtaattttcgtatggccatttctcattgtcttctaaaggaaattcaagcggatggagatggttttacttggtgcaatggtaggacagccaacttaatctttgaaaaacttgacagaatcctttgtaactcggcttggaacaagaattttaagcagaatacggtgtctcttttaaactggtggaattcggatcatagacctttgctacttcaggctcagctcaaggataaggcgaagttttcaaaaagaaatgggggcacagatttcattttgaacaggcctgggcggataatgaagagtgcctcaaaattattaaggatatttggagacaaaatgatcaccaaaacccagtatgtaaattgaagcggctgcttgctgattgtggacagcaattaaatcagtggaaccaaactcaaaagcgtgaatcagtagcacgaacgaaggagttaaaagaaaaacttggaagcattgcggattcagtaaaaataaatgattggctcactaaaaatcggcttgaacatgaccttaattgcgtggaggaaaaacgagagatatattggaagcaaagaagtaaggctctttggttaaaacatggagataaaaatacaaagtattttcactttaaagccacttcaagacgaaagaaaaacacaatagagggtctctttgatgataatcaacaatggaaaataaaggagaaggatgtggaggatattgccatttcttactttcagcaactgttcaccaagaaaaataatggtattgatattgctgatgttctcagaaggtgtgtcccaaaccgcttaagttcagctgaaaatgctcttttaatggagccttttacaagtgaagaagtgaagatggctatgttccaaatccatcctctaaaagcgcctggaaaagatggattaccggggctttttttccaaaaaaaactgggatgtagctggaaaggaagtgactcaagcttgtctagatgtgctcaataataatgccgactgccaccagatcaatgaaacactaatttgcttaataccaaaggtcaaacagccaacaaagatgtccgaatttcgccccattagcctctgcaatgtgatatacaaggtgatttctaaatgtctagctaatagaatgaaacaaagtctaaattcggtaatttcggacaatcaaagtgccttcattggaggaagaatcattcaagacaatgcgattattggttttgaaagtctccattgtatgaagaaatgtcgttttggtaatggaaaaaagatggcagtcaagttggatatgtccaaagcttacgatagggtcgaatggaactttatagaagcaatgatgggtcatttgggatacgattctcaatggattacaaaaattatgaactgcgtaaagtcagtttcattctccattctcattaatggatccatcaaaggttccttccttccagaacgtggattgagacaaggtgaccccctatctccattcct

SEQ ID NO: 309227 - DNA, 1705 bp, Cannabis indica
ctactcacctcccaatcttcaaaactcgagttagaaattctgtcactcgaagaggacgaactagcgcaaagacggggttggtcctcgtataagagctgaagaagatcctagtcgatatagtgtttgcctccccaaaactcaccagggttcatctacaaaagataatacacgagatgagtatttggccaggatatcaaacaaaaacaagcaaatataccgaccagttctaatcgacatatcaaaaagatgaaaaatttcatgaagggtaagttcgtaacccagaatttcaaaaattttgaattaagggttgatcttcactaaacccggaacgggcaaagtgaagaccaaacattgcgaagttaaagtcaaaatgtcacaacaacgaagtcgtatgatctattacagtcgaagtttcaagcctagattttctatatttttcctaaaacaagtcaagaacaatcaaattttctacaatggaaactcagaaaattgaagattcaagaataaaggagaaaaagatgagaaacttactcactgttcaaagctttgatgttgttcggacgaagctgatcggtcctttttactaaattccacgacaaattcgagagaaaaaattacttttgctctgagattacttagcaagaaaaatggtaaagtagtttatgaggatttttttaccctatttataagcaaatcagtgaaagagtgtaatcaattaaaatctcaaacgcttcgatttccccccaaagtaaatattaggaaattaaaaacaattaagtacctagagaagagtaaccgtcaaaagcgtgtgagtgaaaggcgcgtcttgacgtacaatttaattagagcatttattagccgaaaactgaagggactcctagtcagagtcacgtcggatcacaaacaaatgcatccaacacatgtcactcatctacatgcaaggtcggctcaagtgaagtctacacatgacttcggaagccccgtgcagacttgggggacaaatgttatcccattttctgcactatgacgaggcagcacatgctagtgacacgtggaccttattccctacatttggctaaagaaatattccgaatagaactcagcatacacctgcacggatgatgtcttcccagccgagcagtagacaatctaagtagcgcatcagcacttagcagttccaagacttgcatcatgaagcataaaagcaatccctataagtctgggatcatatcatagagatatgacaagttgtccaaatcccacaatcagtgtgttctaaatatgtaatatatgttcttaccaactatagacattgtaagcaaaaaggaaatcttccctcaagcatttaaccctataaatagtgatccattctcactggtataggggttgaaagaattactttagagaaatctaagagagcatactcagaggtttcattgtaagagcttcaagagaggaaacaatgttttctttgttcttgagttaatacaaatcaaggggagtaggctattactgaactgacggggccaaacctctttaaaaccctgtgttctttattgtttattcgttcatatttccttttaattatattttctattgcttactattttactcattgtcgttggctaaaagtgaggtcaacaaccataatataacatttcatttctccttgtatctttctaacaagtcgtctaatttattaata

SEQ ID NO: 309228 - DNA, 561 bp, Cannabis indica
aatcacgtaatacgcctatgttagttagggtgttacacgaatggttggaaggctgaccttggctcagagaagtcaaggtgccgcacgggtgttccgctgcctgaaaaggtgagcccgtgacaaccgacgatgtccttgtgatcggtgccacaaatccgatggctccaccacaatctcaacattctgctagaacacgtgctccttctccattaccagctccaagacctgttgtttatgacgccaacttatgaagatatttgtagtccttatactgcatttatttcaattttatactattttttgtaaatttaaatctttttatgtattatgataaattatgtgatagtttcttaaattaagcattgatgtatacttgataaaaaaacactcaagtattttattttctttcaatttattttgacacaacttaaaatatagtacacaatatatttagtttgttcaattagttatacagtagaacctctattcaagaatactctattcaagaataacctctaatttgttataaaaaaatgaagtcccaatttgggccagttataa

SEQ ID NO: 309229 - DNA, 686 bp, Cannabis indica
tttttttttttagaaaaagaaaaaagaaaaaggaaaagtaactttcttagagtgttcacacaaaatatgcaccaaaatattataatattatttaaaattgtggctcttcttaattaaagtcacatgtgatttggctgaaatctttcgagtgttgagtgcaatgttttagtgtatatacagtatttatgtggacatgtcattattcagtactatatttttttggtttgtgttttttaattattaattgatttctattttgatagttttttttaaaaaaatatatatattacaaattttttattatcttagaaattattacattggaaaatacaaattgtcattttatttacaatttttttttcataaggtgtgtggataatatttataccttttatgtgtttttaattatcaaaatacccattacaatttacacaattagacgaatgatttagatatttagatatggaataatggggctaaaaatgttagttttatcatattaataattatatgttaacaattatgttaaatgtaagatgtattatttttgtgattctagttgggtaaatactattttggaccttgtgttttgtaaaagttaccgattggacgctgtgttttgttaaatgacaaaatagactatgtatttttcaaaatagtaagggaaatttgaatttatatgctta

SEQ ID NO: 309230 - DNA, 1377 bp, Cannabis indica
acccttagccactaatcgagcctactaccatttgatagacccatcggacttggtcttgattttatacacccaatgagaaccaatagcatgtttaccaagaggcaaaagtaccaaatctcaagtatgagtcttttgcaaaacaaacagtttttcattcatagcacactgccaaagggggtcaataactgtctctttataggacaaagcctcagaaaaacaatgaatagatgccaaaaacagagtaaaagaagcagaataagaagagtatgtaaaatttggttggcgagtagacttacgaatgcgctaaggatagcgaggaggagggtccacaatctcaaaaggatatggaacaggtgcataggagggaaaagagcgattttaggttacaaagtaccagtatctaatggaggggtgatttcaggttgtaaagtaccagtatctaattcttgagaccctccaacacgatgcatgcgagagtaatgaagaggagaaggaactgtaggagtagtggatgattcagactcagagaataggtcaatgttgaataagatctatttttatcaaattatgagaagtgccaggaatagtaaaaaggtatatgctcaagaaaaataacatgacgagatacatacaatttatgagaaactagatgaaacaacgatagccctttttcccttccccataactaagaaacacacaaagactagagtgtgacgataattttgtatgctctacactaggacaaagcacaaaataagtagaactaaagaatcttaaagaagatcgattagtcaagaatacaaccatatagtttctcaaaaggagacaaacctgaaatggaaaaagacggaatcatattaattaggtgaactgcagttagagctgcccactacaacaaataagtctattaccggcgggtttattgccggcggaactcacccgccggtattaataggggtattaccggcggaaatagccatccgccggtaataactatataattaatattatattaaataaataaaaaaaattattttaaatttattattaccggcgggtttgtattaataccggcggaatcccgcctcgaaaaaagtgggcgggatttttaccgcccaattttttgaaattagttttaccggcggattaataccggcgggacccgccggtattaatctgggattctgaccgtttttattaataccggcggaacccaattaataccggcgggtcccgccggtattaaaaatctatataaacccctccccatttcagaataccattttttccatttcctcaccccccaccttctccattccacctcccctctccgttttcaaacacaatccgccccttctccggcatcatttccccgac

SEQ ID NO: 309231 - DNA, 1592 bp, Cannabis indica
gaaagaaacgtatgtgagtgagagactctagaaagagaacgagcaaaataaaacaatatttatggactgatgcagagatgagcgaaacaattggtccacacttggactgggtgtcactgaaccaaacttgtatacttttcaattttcacgaaatccaaaatgcattacgtatgagcttacaacaccaaattactaataaggcaattttggattggagcctatttatacaaaaattctgaaacactataaaagggcatctcgtatactaaagttttccatctcattctatctttttggaaattcaatggctacaaaaaacaacaacttcacttcgtcttatttcctctaatggcacaaggccacatgattccaatggtggacatagccaaaatgttagcaaaacgcggtgcccagatcaccatagtcaccacaccaggcaacgcagcccgtttcgaaaaagttttcgctcgcgccattgaaaccgggcttagtatccatctaatcaaattgaagtttcattcaaaagaagttggattacctgaagggtgtgagaattttgacacgatgccttctttggattgtgtgaaaaaactcctccatgcagcatcaatgatgcaactaccggcagagaaagaacttgaagagcttaagctgaggccaagttgtataatagcagatatgtgcttgccttggacaatcaacatagctcgaaagttcaatattccgagaatatctttccatggagtatgttgcttattgctcttaagcgttcataatatacgtagctcaaagattcttgacaatgtaagttctgaaacagagcgatttgtcatcccttacttggctgagcgcattgaagttaccaaggctcagttaccagctgcaccaactaattcagatctaaaagaatttcatgaccaaatgatagaagctgagcaaggatcttatggagcaataataaatagtttcgaagagttggagcctgcatttgtcaaagactacaagaatgtaaggaacggtaaagtttggtgtattggcccagtctccttatgcaacaaagatgaattagataaggcccaaagaggtaacaagtcttgtgttgatgaacatcattgtctcaagtggcttaatttgtgggaaccagcatcggtaatttatgtttgccttggaagcttatgtaatttagtagtgccacagttgatagagcttggattgggcttagaagcttccaacaaaccatttgtttgggttataaggggagggactagtacttcagaagaagtagagaaatggatgaaagaagatggatttgaagaaaggaccaaggaaagaggattggtcatccggggttgggctccacaagtactaattttgtcacactctgcagttggagtgttcttaactcattgtggatggaattcaactcttgaaggaataagtgctggggtccccatggttacatggccactttttgctgaccagtttcttaatgagaaactagttgtacaagttttgaatatagctgtatcgcttggttttgaacagccaatgaaatggggggaggaagagaaagttggggtcaaggtgaagag

SEQ ID NO: 309232 - DNA, 1186 bp, Cannabis indica
taacttttctatgcatggttgatggaatttcttgtgctcaacactgcatatgccgaagagagagatccatccacaagttcctcaacccatttctctcaataagtggtgcaaatcctcaagaccactgatttttacagctacgaatgatgatgaagtcttattagaggctcctaatctgatcaattgatcactgcactcttcaataaccgggtgtgatttgagcaaacatgaaagtggattttgaagaatccatgcattgtttttctttctcaagaaagatctattagcctaaacttatgtgatccaattttacaaaatttgtttgtcttctctatatgtatttatatgtcataaggtgaggaagacatcaagcatcttcttattcaacttgcacgtgagattctgatttggatatatagccgctgtctatgcaatgttccctaatcttagagaatctctcttcatgatcacataaaattaatattttcattgaaacacgagttttaatctattcccatcttctgaatacaatatatttttttttattgaaattttgcacacaatattatgatattatgtgaagtaccaatttaaaaatgttgaatatgaatcgttcctgattttcttgagctgtccccgctttgaagtgggacgactcatgaattggctctgttgcaatggatggcagagggttcgtagtacccaaagcactggagtgatccaatagcaaaggatttcgtagctaagattctagtattttaatttacaatttccagccaaaatttaacctttgaggttgagtgctttcttccattgtcgaagctttttgaattgatcacttgtcaaggacaacccaaaattcccattgattgtccaacaacggaaccttagacaaattggaaaaaaacaacaaatactagactagtagttgagtgctccttattttcagatcttgatggggtccgagcttcccaagctctatgcgttgttggggaactctgcaagggtcttaccaccttcttgggggaagacctatttatagttttttcttctacagtcttttttctctttaaaagtagatcatattgtaggaattttccttggtgaaattccaagtttaacctacaccaactcaagctcacagttaaaaacgacaaggacagaattgtcctttaaatcaattaat

SEQ ID NO: 309233 - DNA, 2302 bp, Cannabis indica
acaaagcattgataaataataagttcgaaaaaaacatagcagtttgcatgtgaaattactaaaataaagaaaaatattcatcttaaaaaaagatgacaaaatcacgatataaacctaggattaacgactgcccggtcagctagtcgtttcaaaataaaatgaagtattaccaagtttaaagaccgcttggtcgatcatattgtatttaaaaaaggcccatgagctgaaaaaataataaaaaagaaaggatcacacagtaggagtcccaagttccttgtacaggtcaacttggtcgttggaggcgagagtctcagggatctggtcggtcacggttgtggagctggctgcctcaaggttttctttgtctttctagcccgtacagtaactaagatatgcctattgaggtaatcaaagtttccttctgggttggccttccagaattcatagaaaacttccacagcggcagactctaaactctcgaactccttcagaagctcttcctccctcgtctgcctggatttgatgtcctcttccaagtttgtcttatctgtggttaaggttgcaagaagagtctagagactccccttctcgtccttcaaactattaacctctttggatagaacctcgacatccgcctcaagttaggtggtacatggcatctcctgaacttccttctgtagctcctcaactcgattattggcagctaaaagttgttttttaacctcgctcagcttttcccttacgacctcgacctccttcttggttgcctcctcctccttctgtagattggtggtggtggtgatagtttttagggcagtagatttggctttggagtaggtgtaggccatcttcaaattgacctacatagggaaaagttaaaactagcatggataaaaggacaagataaaaaccaaaggagaaatacttactcgggttgcctccttcaggagcccgcccatcagaaactccacagacattttgtccccttcgaacaactggtcgtttacctcaggaagcagctgatcctaatagtgctaaagcatctccttgcccttcttggtctcagggctcaacacgataggagtgtttgagggaatatgtggaccagacccatctgtgctacctcccttggcacatttggacttggagggcttcttggttggtgtaaccttggacaccacctcctcaaagacattgataggggaatcgactgagcttttctccttaggcagtatttcatcaccctttgatcgtttgggtggaggggtctgggcggagctgtcacccgacctcttcttctgagccttgaacaccttttgagacataactgcatatgaacaaacaagaaggttaaaaacatgtatgatataagccaaaacagacaaaaattaagtatgagttaaattaccctacatgtacgctgaagtattctcccggacaagcaaagatggaggctataagttgaggagtcttctggctcctactcagtcaggacaacttttccctttcccgccactgggcggattgccgagcaggtctttcaggctcttccctgatcctgatagaccgctcaacaggtacttggctgcttggaggggccttcttcctctttttgcttggagtctcttgttcgggaacagtctccaactcgagcgtagcctctttcgccttcttcacagcttttggtataaaatcagtcaaaaaaagggtacttgacgaaattggcctcaaaagtcaagagtgagatgttccgtgcatcagaaagttgaagaatcttttgtgccctcttcctaagctcagtgtgaacggagggtggcaataggacggcacctgctgcaagctgctgtgaacggtgcccattcctttgacgaagtagttttcgtccacaaagcccctatcttggtaacctcggtgaccgtggtgcaagtcaacttttttttatcagggaaaaatagaactttcctgacctattctgcttgggacttcaccttagatcaaaaagccagttggtgtcatgcggggacagctcaccccatccttgtgtggcgtagaggacaaatagagcagacaaatgcttgaggcccttgggggtgaattatgtcaaaattatatggtaatagtccacaatcctcttgcagtatggaagcaagggcaacatcgcaccctgcttggtatgaactctcgactaggcgtagtaaccttcccttgggatagttgccagctgattaggagagggaaggaagcatttgacactccctaggtaactacggttgagaaaattctttgtaacgtccccgcttca

SEQ ID NO: 309234 - DNA, 1217 bp, Cannabis indica
taataatataaaaataactcagttaaaaaaaataattgcatagactaaatatatatatatcgtaatattttatttataataaatgataatattattagtatttaaatttatttattaattcaaaaatgctattcaaattaatataatagaaggtaatacttcaatcctacctttttttaagttatcaacattatcctcctgagtagttatattacttggggtaacattctaatgctaaaccctcaaaacaaacaaattaatgtttcacattattattcccttactagcattaacacatttcaagcagcccattaatttaatgtttatatcaaatgctaaagaagttatcttaacaaaatgcaaaaagggtttgcaaaaacgagaaaaaaaaataaagcatgcaatttaaagttaaatatttaatttaaattatatcttttattttaaacaattttcaaaagaataaaattaatattaaaaaacaatgaatttgtcgttaaattaaattgctaacgatgaagttgttgatgatgcaagtaattagctcagatgtatttaggttttttgacttgaaatatacataacgtagctaggtggattttgactaatagtgtcaccggtagagatacacatttcccccatagagatgaggccctgcggggacccgctcctaatggggcgggaatttcctgtttaaatgagaaacgagacgagggcagatgttaccttttcttctcgaatgttaaatgattcccatccccgccccgatggagacccgtttagtattttatttaatatttctaataataatttataatttataatttatgtttatattttttttagtacattaatatctttctttatgaattttaagttatgttttggataataattaatttattgaataataattaatgtgtaatattttagtttttatatagtttaataattttatatatttaaatttttattgtaaactttattttttattaaaagattttccgtcttattcccaatgaagaataagtgggagatgaagattaaaatctttaatgagaatgagaagacgggagaatgctccctgcgaattccccatcctgtatgcatcactcatgatactatgaggctacctctatactagtaatagtagtaaatattactttattgaccatgaggtctaattaaccacttgaggtagctcaagtggccatagg

SEQ ID NO: 309235 - DNA, 1177 bp, Cannabis indica
ttttttttttcttttctttttgtcagaactattttctatttttaaatgaaaaaaaaaatatccaagaaagaaattaaataatttatctttgaagtttagaattcccttggatcgacaaatattgaaaggccgggtttggacttggtccaatccccaagaggcccatccccataacccgagaccagcctttttacgcaccatacatcattggcgcacgataggctatcccagtggggaatcgctaacctcaacggatcttgactagccacctcagtggccaccactccacacctcaactccttcgccatgttatgcgcgtgaccacaaagcgccctaaccattctctccgcgcgtgggccttcccctcccaaaccatacaaaaacaccatcccaaacggcctaaacacctccggcaccgacggtatcctcatccacggcaaagccttatccaacacgcgcgtaaacttagcagccaaacgccgtgaacgcgacgcgcccctaatttctaacttaaagacctcttgactattccaaacactcgccaccgcccacgactcgggcggctcagacaagaacgcgtccatcctagaccctaccggaacggcgacgtaagtgccgagatgaagcttattgttgagaactcgatcaatgtcggtcgggaaaaactcggtggcggagaatcgggcgcggtagagcgagtcagcttcggttggagtgagtttgaagatggcgactcggttggcgtaggtcgggagtgagtgagcgaaaacgggttggaccaatacggaaggcgtacggaacttggtgtagtgtaatttctgggtgaagaggtttagtgatggttggttatcaagctcagtggccatgtacgaatattctgccccattttttatgaaccaattttccatttctttaattaatttacacccaataccttttcgcctgcatacatgccacacccataaataaaaataaattaaattataagaagtgtcaccaaattgatgtagtataattgtattattttagttgaaaaattgctaaaaatattattagtgcttaacacgtcataacgagtattgttattaggcctcagcagtgtttaacacttttaaatatattaagggttaatttcacaaatacacaaaaataacaaaaaaataacaaaaatacggtt

SEQ ID NO: 309236 - DNA, 1017 bp, Cannabis indica
aagaatgttcaaagcatgaaaaatcttgaatacaacaatgtcaaataaacaagtagagaatgggatttaaaagcttacctactagtagaacacatcgaggaagaaggttgaaagattggatcgtcgaaacaaagcaagaatctcaggtgttggaagactatggtgtgtcgaccacaatgggaagtgaaagctttctttggtttccttttttgaagagagataattagaagtgtggaatgagaatgagttacaccaataagcttatatagcttttgatgggtctctctctcatttaccctacaacatgcaaaaaataacatgcagaaatattatcagttttctgctaaggaatgtgatcaaacaaacaagagtacatacttcaaggttgaatatattgaaagatattcccagttaaggctccatcaatccaaactcagttaaaaagtctttatccgtacagacatccgcacatggacttagagggaaaatattaccctaattttatacacatgatgtggcatgtccacgtggacaagattaacgccacatggagtacaacttgtcaataagaagtccatttcatcattcacaacatattagttgatggaaagtctaaatacttaagcgggacaaagagacaatgaactggccaccttaaggggtctaggcgaacccccctggctggtcctatggccaacataggctagccagcctccacgaaggaaagggtcaaccaacctttatcttggcaggcacttggccggctagcttgcaccctggcaggcacttggtgtgtagccttgaccctagcaggtacttgatgtgcaacttgcattcgggacagcaatccaagctgcgaattgggtttcaacaacccacgaaaatagaggataaatataagctatttacctattcttaggggataattaaactatttattgtttattattttattatgtaacaaatacattatatttcctattttttagagatattaggttattattctcttgtaag

SEQ ID NO: 309237 - DNA, 756 bp, Cannabis indica
gggggcctttactcattttttagtgtaactttacataaccattgctttcgtagtagcatgcttttgactgctaatatgaggagcaggaggtgttaaacccactcatcgtccagctcctgatcctactaccggcgttggttgactacatagttgttatttgctttgtcttagtctattctgtttttttagcgagtttgttgatggtcaacatggaacatacaatggaaaattgacctctgggcacctcactccccttggagaggaagtgttgtcctttggccagccaaaggcgcatctaatggtgcttggctagccctaggctgtacaatggggggtgtcactgagccagagatcccttgctgaccccctatgctactggttgccagactcttgctattctcatcattagacctttgaggaaaagtctgtcttccctttgccaggggaagattgatcctagttcctaaggaaacaggttggttagcttgtcgatggaccctccctaatcaataaacaattcttcattgaagtggatctcgcgtcctctcccatcagttctttggttaaatttccttatcagatcgctggcctctcggttgtggcaatccaattgtgcttggtgagattgaaggtgttgggttttatgccctaaataaaactccttacaatctgattagttatcaatataagaaatttgaagtgattgatgtttgcgtgaattctacatgctaatggtttaatatgtttaatatgttt

SEQ ID NO: 309238 - DNA, 953 bp, Cannabis indica
aactcaaacttagctcaacaatgataaatttcatttctttgtgtgtgagctactgctatttcttggattatgttcattgatgtttagttaggcattctggagagtttgaccaaatttagggtaaaattaagagagattcaaagttcttggggttttttgcaaaaaatagctaaccatttttccaagtaggaccccagaaaatggtctactgttttggaaatccagtttactacttttagcagttttagaaccctagtttttgtgtttcctcaatatttagagtattgtaatgctatctatcgataggaaaacttgtagttttgaatttaggtcctcgcaaaggttttagcaagttgtttacttgatttacgtgattgtggcatatggcctccgttcagcacgtgaattttcattcaggttgacaaacacgcttgaatcaaaaaatgaggtaagactagtataaaatgtgtatatatatgtgtgtagatatgtatgattatattgttagaatatatgcattgatatcatagtggcataaactatagtgttaagtctccagcataactatagtgttagtagtggccaaaatgaatgaattagtaccatagcgacacaaactatagtgtcgggataacagtgcgagtatagtgctagttgtgctggtatttaattccataaaataaaaattgacgctatcatagcggtaccaactatagtatcaacactactacaatttagccttttagtgacactatttagtgacacgcatttttgtgtgagtcactaaagagttatgagtgatttttagtgacatgcacaattagactctaaatgttggttgttagtctcatgtaatgtgtgtcactagaaatatggagtgtcactaaagagtaaaaccaaaattttatatttttttttattaatttaaaaaatattagcctatagtgacacac

SEQ ID NO: 309239 - DNA, 820 bp, Cannabis indica
taatatatcaaacaaaaatataattttctcaaagtaaataaaaaaataaaatactaaattgtttgagagctataaatttgtttatttaaacaagtgaatcatacaattaaaataataaaaaatatatattttaaagagaatatattatctccttattcttttattatttaaacattcaaatatttattttgtataaattaattaagtattttattatatgctgagaaaataattatcacccttaaattaatttatttacataatttacatttatataattttatatgaattaagttatttaaaatttttgtctcatgaactataatttatacattattatgctttctgaatttttcagtccgttaaaaatggtcctcgaattattaatagtgttgtaaattgatcattctatcaagttttgtcacatgtggcaaacaaaatgatattgtggcaatttaggcaattgccacataagcgttatatctaggccacgtgtgtaattaattaaaaataataatttaaaagtttttaatttagttttgtataattttttcaatcatcaataattttcaatttaatgatcttttaaaaatataaatattttaattttttattttgaattatacacgtggcgatgatatgacatttgttcgaacaatcacatcattattttattagccacgtgtaataaaatataacaaagtgaccactttagaatagggctgtacaaaaaaatttgtaaaccgcctaaatcgaataactcgcccaaaccgaaccgaaaaaatcgataaaaattacaaaccgaaataacccgaaaaaa

SEQ ID NO: 309240 - DNA, 2150 bp, Cannabis indica
aaatgagagctacgacttgtgacaagtaaaattcatactttgatacttcacctattcggcaaggtggaatatcgacaaattagccacaaatcaggaagttttcaatctacctgattttgcggaaaagtgacaccttcaagaaccggtgaacgacttcaccaaaactaagaaattgactaggtgatgtcaagatattacttaggcatcaaaaaatacaagtttgggacactttttcactcacacaacttctaggttgacgtcagtatgtcaacttgggcgctgggtgttgaacaaccttcatataatagtcataactcccttaatattgatctgattgattcaattcagcttgacttttaaagatctttccaagctctttcaagtcatctatcacacccatatattaattcggaagttcaagtccaaaatttgtccccaagataagtgcaatttttttcgcgaattactcgaaaacggtccaacggacgagatttgagctccaaaaattgacaatcatcatcagaagtcatttttaccattagatcatcaacaatggacaagatcaatctaaaaatatttttccatattttagtaatattttatcattattttaatggatctcattccttataaaaggagagctccacactagctcttttttcacattcaactaagtcctcataaggtcatagaatctctcactactttctctgtatagaaatttaacctctttccttagtcaattctcttgtaattttcgtgagaaataaaaacttgaaatagacataactccatttccttcgcgatatgaggagtgaactactctaaattctgcgtctctcttcaatatttacttgaatcattattcatcctgccaatctagcaagctagtgttggccatttttcagcatcaacaatgacacaactcaaaaatatgccagcggtgtcccaaaatctcaaccctccaagcttagataactggatatgtacaatcttcattaagctcagctctcactgtggttcagccttgtctttgcctttaactacacatagaaacatatctgtgagtcgacagactcagtaagaaaagcataacataatacaacatatatctaacttgtaattaagcgtccatacacccaattaccataagtctattaaccacattcaatgagtataactgagatccgaacggttgtacctaaagcatgaataactataatattaacctaagctcaacattctagtcatattggtgtttgtagcattaattcatattattcactattgtccaacatattagatatcatcatcttagtgcaactctaggtacactgatatcgctatctccaatatgctagctacatggtaatataacatacatgtatattaaacatgtgcatatgtgaacctgaatactattcttacctcaattctaaattcaggtatgtcagtcaacctgagtaaaaatttgctcgatgatcggatgccctaactcacattagttgaacattggtaagtatcttgctaaaacactttttaggactaaaattcattatctgaagttttcctatcgataaataaggtggaaatgtcctaaatatattaaaaacataaaaattgaggtacccccaagaatccctaactgggcatttgaattcctaactaagagcccaaaattctaggcactaataacgggcaaccgattctgcctagatttctgcaactctaaaaattttctagttctaacatttcaaacctacaccaaactagctataacttcctagaaaaatacatttatgcattctaagcatagccacaagctcaaataatagaataactcaatgaatcaagaatcactattatgagtaattctaatcactatatatataaaaaaaattccccttagaattttcgacaaatcatataagtcagataatattgaaagaccttttttttttcgaaacagaatactaaaagaccttataatacaaatatatcttgtccattctcaatctatatatcactctttgaaatgtccagtaatctcgatctctagcactcaaatttataagaatacgtccttaaataattttaattggaaaatttgattttatatacttacatatatctaatattttatccttaaa

SEQ ID NO: 309241 - DNA, 1822 bp, Cannabis indica
gggttcgatttaggctccttcccttccactgcatagctgcgctagcaggtactacgagccctctgtcccgcgcatctaaccagctcgcgtggttcaccggttccaccgaaaactctcatttgttgaagcggagcatagtgcgctttaggcgccgagcgagaaaggtctcttctttctattcggtttattcactgatctgattagcacttgttttcttattgattccaggggcggcggcgttcttgaatgaagtctatccgaaccgaattagcacttctcagatcaggctaggcctctccagctgagctgggcgccggggccctggatgcgctagcgatcggcacataggggagtggttgcccgggtttctcggcctggtatcctgcacctcgcgttcatgatatctacattcaactgtgccccggagacacggtcgaaacacgcccgcccagtgtgcttctttcacgacatgctctggtcccgggtgtcttccagtggtcttctagcgttagaagaagtcgtgtccgtcccggacatctgcaacgtcctcccacgctttttttttaatataggacaaactgaaggaaaagactgacccattcggtgactttcgcggtcgccctcactgaaccgacttgaatctgaactacgattcagatcaagtcttaccgaaatcggatttccttttcgtgccatatgcgcttagactttactttttccccctttttcttcccggtccaatatttgttctcgaaagtcttcgtttccgtgtagaagcaaactctccaaatttatgaccaaccttttcttcagtgatcttacaacgaacaggagtttttccattgtaaattcgtacggagcaatcaacgaattccggcaaaatagaagatctacgtgaccaaattttcctgttcaaaagaagatctctcttcttcttcattctcaacaggaatgcatcaacaaaactgcctttccagatggatcgtcgtggcatgaactcatttcttcctttccccacccctgcccgaaatccagctttggtgggcttccctcaaggtgacaccgaaggtctacctcctttcgtgcgcccctcacctcctccatgaggatgatccactggattcattgcaacaccacgaacaatggggcgtctgcctaaccaccggctttgtccagcttttcgaagcttacgtgcaccatggttgggattggaaactataccaatagtagctcggcatcgggaatccatgagtttttcaacacccgaaggtagccgcccaagcctaagagagagtgtagggggccttcattattttagcaaaagttcctgcggcttgagccagctttgcgccttgacctggatgacattcaatatcatgtacccatgttcctatacgtatataggctaatggtatgctatttcctatttgaaaatttagaaaaagtatctcgtatctataagcaagggggcgcggccaagaagcagccagctgacttcccccttccactcggcctttcttcgctgtggcgaatttagtatgtatgggcattctgggcgggtcgcaataagtcgctggtcgaaggtttagaccaattgcaattcatcaccatcttgcccgcttccaattgatgactggctattatataagtgttgacctaagcccctgtgctggggctcggctcccgaaccgtacgtgagttgcctcgtacggctcttcctaagaacttgaagccccctctctcataaggaagcaaacgaaattttaaaatgcatttacaagaaaaaaaatactttttcaaaaagccttcgccctccgattca

SEQ ID NO: 309242 - DNA, 1086 bp, Cannabis indica
tttcatagcgatcaatatttcttgcattcttttattttgttctttttattctaccaactcaacatcatggtcattagctctttgccttaaagccactagttttgtgtagttgtctttgtcatatgcttcgaactcatcttggtcttaagtatactcagggtcgtcgatatctccttttccttcaacatccacctgagaagccacatcttcttcttctggaccctttgggtcattagaatggggtggtggacgtgaagtatttcttgttaataacattatataacgaggcttcttatgatttcctcttttagaaagcttcccacaactctcattgaaagcaccaaaaaaatgactgagatttttgaaaactattaattagagttgtttatagtaattaatggaagttatagaagataatttttacgtggttgtagaattaatgagccttagtccacgagtcattgttattaatgagtttcttacaaataattcccaaaaaaatccccttcttccatacatcattgggtatttataggctcataatggtggtaaaatgccaccattatcgtgtttgtatgaatcacgtcttgcacaatttcccaaatttaaacatagggcatgattgcctattttctttggtgtgtttaggcttgttataggcgttcggtgagactagacttgtctcttaatgatgatttgatagctcataatatagccgtcaaatgatgtatgaggtattgtgaaatcagggaattctgagtttaaactcttgatcacatctttttagagtaaggtgtagggtgttcttccccaatgccacattagatacgtgtacaatgatttttgacctcgagcggtgggccatgctccgcatgtcctcctatctcttcttcgggtcgagttcactaatagagagggagaaacaaaattgttatccttctggaggtgattaataatttgccattcttgcaaattatccgactccaaaattagtttaatatgacatgtctcgtagtgcgggtcctgatgtcgcccaattagttacactgcggtcgcggtattaaacgggctatatgtcgtatccac

SEQ ID NO: 309243 - DNA, 567 bp, Cannabis indica
catgtgactgatcataaacaacagctactatgacgtttagtggctggtgggaggaaggtttgaacatttggagcatgcctgagtgcttggaagtggccatgatgttatggtcaacttggaaggttagaaatgacatggtatggaattcttagcagtcaacaagtgaagaagtgttgcttttagcaaaaattaactttgtggactggtataatgctcaaaaagaagacattgattcttctaatgacgccaacaggaaatcgaattgagcattggaaacccctagattttaacaaaatcaaagttaatgttaatggtgtattttttactagtgagaagaggtatggtatagggctggttgctcgttcttcagctggagcaattatttaggcaaataatatgaataagattggtacatttcagccccatgaggtagaagccattggaataaaagagcctttgagttggatcaagaatactggatgaactaatgtgattattgagtctaattgtatgagagttattaaagatttaaaaaagaataaaattatggcttctccttatggccat

SEQ ID NO: 309244 - DNA, 1337 bp, Cannabis indica
ggtccgacgtatgcaacggagagtagagggggaccgacgggaggaggggtgggtggagatcgatggacgagagagacgagaagaaagggagatcgagagagatggaggaagacggcgagagaggatggcgatggtgcgaaggcgtgggtggagttttggagagttaagatttttgttttagggtgtgggaaatgaagaagaaataggtgggcatgtgttaaattgaaaaaaagtaggtgggcacgtgagaaatgtggcgagaagtaggtgacgattttttaatggacccttataggcgacagtttaaaccgtcgcttataagggtccattaaaaattcacattttattaaaaacgtcgcctattttgttcactacgattttaaaccgtcgggaatactaaatttttcctgatagttttaaatagttacttaatttttttagcgacggttctcgaaaaaaatcatttttaggaccgtcacgaattttgatatttgtagtagtgtcagatcaagacccggacatggacctagactcggactcggatctgaatccaaactcaaacaaggaccgggacccgggacctagacctgagacctgagacccgcgaccctaacttggtacccaaaacccgacctgtagttattagtgttggggtcgagtctattgaaaatatgttataactttatataatctattactacaagccaataccaaacatagtattgtaataataaactaatacaatacaatccaacacaatacaatacaatactaccaaacgagccttgaatggtagaagtagttgaaatgtccatatcaaattatatatttaatttaagagtcatcctttgaaaatgttgaaatagaaatagtgtggctggtaaaacatgaaatttctacgtaacttcatctccaccattatcaaaacaaactcaactatagggaactaattattatccttttatataattatacacacacattgaacattaatttcttgagctagctagctagctatagcttgtctctttcaaatgacaccttctttaactactctattgttaatcgtccttattttgttaattatcttcatccacatattgttgctcatcgatgttgtgaaagaagaacagaacttaaacaagatcatttacagaactgtacaaactaaacaagaattcaataatcaatttgaatgaataaaaatagtagggaagaatgaccccagaattttaagtagattgagctatcactacaaaaatttttacttttagtcacaataaaatttgtgactaaaagtaaaaaagttgtgagtaattataaaatatcattcttat

SEQ ID NO: 309245 - DNA, 687 bp, Cannabis indica
tttttttttttttaattataccactatttaaccttatttatactgtaatatgtatgatggttttaagaatgtaatagtttaggaattttatttaaccttattttgtagtactgtaatataaggtgctttattggtttaggtcgtgaactccaactgatgtctcttatgaggtgttgtccattgtaatagttaaagtttgacactacaataaaaaggttctacgggcatgacaaaagtagtgcctagaagttcttcttttcgtgcccatcatcctattggcatgacatgtcgtgcttattttatatatttttaaaaaaagatgaatatgtagttaaataattcgttatgtgctattttcttagttatagagctacaaataaaactcaagtatatgttccaccaaggctggctcaagtatatatagcagcttgaattattgcataaggtttcttcaattaaaatgctttattttttatcatccttttatatatataatataataggagaattattgcatatatttattttttttaactttttttttaaaattacggtttggaattctaaagtggttacagtgctagttgcaacaggagtttctataccattttttgttgcaatttaggttgcagtgctagttgcaataggaatttttatgtagagttctgtaaaaaatacaaaaaaaaa

SEQ ID NO: 309246 - DNA, 1687 bp, Cannabis indica
ttaacttcaagattacacttaaacaaacaaacgttaaatcaaaacaaacaaatcaagaaccaaaaaaatcagtatacatattaaactaaaaagataaatacagataaatctgtataccttccaaacacaaaaatgcacgagaattatactggtttcaatcctaagtttaatgcgaacttggtcatactctagtttgaaagcactgccaccaattttcattgataatgagaattagagatatcaatctcacgagctacaagaaaataatcacagtaagtcatacatggtataatctctcgacactcattaactcacttacccgagccaacataatcgacaatgatgctcaatacaattttctaatcccaactctctctctcagatatctctctcactttctcactctaacttctccctttactgtgttgtgtcttcttattatttctctcttttgaaatgagaggagtagtcctctttatataggccaaaagatccaaaatacttgttgtcatacttgacagctaagttagttgatgaataattagttaactaatcgaatcttggttggtggtttaaggaataatactacaaattacaccttatttcttcaagccccaacaagctaagcatatttgtccaatagaggtggtagtgctttcatgtgtagctacttagcaactatggtttagtaagtccaagcagcgcttgaacttactaacagataacatcttagtgccaatatcaacagggttctcttttgacttcactttctccagctttattacttcttcttctatattcccccttataaaaaacaatcgaatatcattgtgttttgtcttctcgttataaaatggattcttgcacaagtgaatagaagattggctgtcagaatatacccttgcctttccaactaaaagcttcaactcctttagaatttcttatagccatatttcttctttgaatgcctctatggtcgccatgaattttgcttctgtagttgaaagtgataccacagattggagctgtgatttccaactaatgcaatctccattagtttaaaatacataagaggtagtatgtaaagaccgcttagtttaaatttggaaattagcaaataattagggtttaattatgaaaattatttattgatatttaaataattattatattgatttatttgaattcaaaattcatttttatgtcatatagtgaaattttataattttgcattttcggtacccggcaacatggaacgcggtgtatggcttagtagaatcacaatctagtatttttagtataatgggaaggtttatttagacattgggaatgtcgggattggtcgggaatttcggaattttccaaaataccctttgtaacccttttatgttattttggtgtggaggggcaaaatgacctgctttgtttgtatggattgtttttattaagtttaaatctttttattattgtttagttggctgaagtaattcattaattgggaaaatccactctttatttcattttactcaaaaattagaaaagttgagaaaaatcatatttcttcctctctcaagctctctttctctctctctcgaaaatcctaggggctgctagggttgattttgttcttcaattcagcaagttttcaacaagttttggtgtatttctagttgaggtaatatttgat

SEQ ID NO: 309247 - DNA, 2054 bp, Cannabis indica
gcccctgttttatttattccagaagaagcggtagccttgtgcattgattatcgggcgctcaacaaggtaacctaaccatcaagaacaaatatccactttgattgcagacttcttcgctctaatcaataagcgcgagatacttctcgaagttggatctacggttgggctactaccaagtgcgtatcgcggaaggagacgagccaaagacgacctgtgtgacaagcaagcaaccttactaatgaaggggcatttgatttggttatgccttttggactcaccaatgcccctgccacgttctgcaccctccacaatgagctattccacccgtacttagacgactggtcgtatactttgatcgtgggctatagctatccgttaaacgaccacgttagccacctccggaccgtttttaaggtattaaggtctctcgagcctcaaatcaagtaagtctaatgctcctttggacagacggagatcctattcctaggacattggatgagcatcagagccatcgaggagtggcaagcacctaccaaggtgagtgagctaagatcatttttagggctcgggaactattaccgaagattcatcgtaagttactcgaagagggctgctcaactcaaaaatctcctaaagaaggacgtacggaccgatcatggcactgcactgatcggaagagtgtcaaagagcttttgaggacctaaagcaagcagtgattgatgaccccgtattgcagttgccagatcacactaagccatttgaagtacacacggatgcgtcagactatgccgtaggcggtgtgctagtataataaggtaacccagtagcatatgagagccgaaagctcaatgagaccgaaaggcgtggtccaagagaaggagatgacagcaatagtgcactacttgagaacgtggaggcgggtcacgatttgtggtcaagacggataatgtggcgacgagggacttcctgacccagaggaaactcacgccaaaacagggacgatggcaagtttgattgatatggtgctagagtataagcttggtggacggaccaaccaggtcgcggatgccttaagacagagctggcggcatttaagtgtgaggcagtggcagccaccaacaggcttgcagacctaccgcatcgtattcgagatgggcttgaaaaaggacccgcgagaagccttttgcaccaagctaaggaatgcaaaactcggcttggatcaaggaagggctcttggtcacaaaagggaatctactttttttcttccaaaacctttcttttttcggtatgccgctccgcgagcaaggagtgccacgcacgagcggagcgaaaacaaagcagggggaaatcctttgattgcgtattgaatatagatccatgtctttcttcttccactagctaggacaaaattctcacatgtccgtttcgttattacaaccttattttttgatgtcaaagaccagaagctacgcgcaaattatcattggatctcggttgttcttaacagcgatggctattcatttaagtcttcgggtagcaccactagatcttcaacaaggtggaaattctcgtattccgtatgtacatgttcctgcggctcggatgagtattcttgtttatatcgctacggctataaacaccttatttttcctattaacaaaacatcccctttttcttcgctcttccggaaccggtacagaaatgggtgctttttttacgttgtttaccttagttactggggggtttcggggaagacctatgtggggcaccttttgggtgtgggatgctcgtttaacctctgtattcatctcgttccttatttacctgggtgcactgcgttttcaaaagcttcctgtcgaaccggcttctatttcaatccgtgctggaccgatcgatataccaataatcaagtcttcagtcaactggtggaatacatcgcatcaacctgggagcattagccgatctggtacatcaatacatgttcctatgcccattccaatcttgtctaactttgctaactcccccttctcaacccgtatcttgtttgttctgga

SEQ ID NO: 309248 - DNA, 1431 bp, Cannabis indica
ttatgtacacacaatatacatggtaaattttgcaatcataactactttttaacatagtgcatatcttgacaatagatttgctttcatgtatatatgatttcattttgtgtaattttgtattatatatttagtttctatgctttgatgagtatatatgtgtatgttaggtaaatttatttgttatttctctttcttatgggttaccttattcaaaaaagaaatttaaaagtatggactttgtataaattacagatttgatttcttgttattttcattataaattttgtatgcttttgcattgcaaaagaaaaagtcataaaatttccttaaatgatgctttcttgttctgatattaagttattttggtcactccttatatttgtactaccgatttaaggagtagcagtaatactcaacattaatcactgttattgttcatttcttgagttctctctagctctcaatctctttttgttgttcttcaaagggtgggttctttttaattttatttttctattttgctgttgttttagtgtgatttattttttttgttgtttttgtttcctacaccttccgctgtatactgggtgagtgcatatacattatatatttattggtatcccacacatgttgtttttagtaacaatcatacaaatattttattttgttcagcctccaccttcttttgtctcaattttgctagaatttacaatgtacaaaaattactaccatctttcacttaaagcttacataataatgtaatgtggtgctctacttttaattatctcagctctgaaaatgtttgaacttgaatagtttatttttctataaacatacacttattaagagtgacttaccagtttcaactattatttctaagtttttaaatttatccttacagttatgacttaagttatttaaaactttatgaactttcttattctcttttatatctactagagatttaggactatgagtagacttaaataagtttcgtttttagaattaatatatgtttctctttatcttctttttaattgcattctgtcattgactgtgatttgtggtttacctctataatatctatgtttatgtatatgccaaaaaaaatatagcatggatatgtagcaacagaatacactttgtaagaaaaataaatgctgttctaaatgaaaatcaaattcaagtaataaactacacatagaacaagacccataacaataatagaaaaattttattttgttcaatctgtaacttatcttctcaaaattctattagaatttatagcgtcaaaagattattatcatcttttaattaaaccttacataataatgtactgtgatgctctatctttaattgtctcaactctgaacaagtttctgcttgcatgaataacttttctgtaaacatacattaactaagattgactta

SEQ ID NO: 309249 - DNA, 1254 bp, Cannabis indica
ggcaaagctgttgttgaacgacattgagtttggagctggatgagattgtacatatggaaacaattcgacctggagtgctggatcttcagggacagctagggctcacgattttgtagtcgctgtgcgacatctttttattatgtatagttaaaaaatataaatatgagatctcaaattttataaatgtaatacagtttatgtttattaattaaagtttaaattttatcactttctgataaaccctttgattagcaaaggttgcacattatttatgcaaagtactgtagcacggctaaactagcagcgtctctaccctttcttaagttcccaaatgaaccgaccgtatccctcaccttagatctggtcaggatagaagtgatgttgcatctcgggttctagggaaggcgtgtgttaactacttatttcccaatcatcaaagctacagttagaaagattatcactggacaaagatgggctagcatggagacaaggatgatcctcttacagaagttgaaacagatcctggtcgatacggtggttgcctccccaaaagtcaccagggttcatctacaaaaggtaggagataagaaaatgagaattcgtcggagcaacgaataaaaaacaggttaaatgtactgactaggtccgattgagggatcaaaaatagaagtttcactcaaaaatagatttttcaacctaaaagttcaaaacttcaaatcggaatctgattttcactaaactcctaatggatgagtgaaaatagatattataaggttaaaaatcgaagcgtagttaaaatcaaatgttatggttaagcacaattaaggtttctaaattttgaacctaagatttctatggttaacctagaacagttcaagaacagtcaagattcacagccagaaacctagaaaattaagcatccaaatatgtaaaagaaagaaataaagaacttactcactggttcgaagcttcttgttttgctcggatgatgttgtcaagagtttttctgggaatccttggaagaattttagagaaaaattcacttgaaagctttttgctctgcttcttcaagaatgaaaatggctaaaagaatctttgaaggccctcgatcctatttataagcagttttcaaaaatttaaactcctcgaattccccccaaaaatatccgttatgtactcattacaggcagagtaaccatcaacacgcgcagacatcgagccgtcattcgaggtaggtgttggaaattattttac

SEQ ID NO: 309250 - DNA, 1590 bp, Cannabis indica
accaaggccaaaaaggaaaattcttctggccaaagtccggacaaggagaaaagtatttcccaatagaaagtcgcccaaggcagggatgaggatgtgataatactggataactgtttaactactttttattcttatccttatagatggctaatgctgatttatacaattgtatctcgcttaactccgagttgttatcctcgactatcataatgtagaaaaaatgctaagtgttagcatatggttcgcctcgtcaagtttctttagttagaattgcgaggtggctgtctcgctattcgtaacccgaggtttctttgtatgattgtattcagtctactttgaataaatgaattatcttctttggctatgtactccgaggcaggtgtgtgtcttgtcaatataagtttcaatggtcttttatccttatctcgcttaagactatgtagtcagcgagttatgaatattttctattaatcctttattaacgagttattattttttacattaaatgatataattttattatatcaggtggttcatattccactgcaagacacatgtcactttctgaagtgtagccgaattttggatataacaattgccccttaaaaagttcttttttaataaaaagatctttttaaatgattacaagggtatttttgtcttcatcctagtttgaaaaattacatgctttgagttttggcggttcatgatttctaggcacatcattagcattaaatgcccatcttttccaattcttccgtgttcccatccgttagatctttattcttataatctaactgtgatcatttcccaggtataaaagtcgagaacagatactcatttcaccatttttgccttccaaaccttcaaattttctacaaaaaattgtttcgattatttttcttcttccatatttgcaagccctcattatcgttgacctattttttgtgcgtttcattagatttcttcttcaatctcagagaatctcagaactcatccctccagccctcgacgagttcttcatttcccaaaaacctatgccaaaacagtaagtggtttatttctttgtttctacttttcctttttccaaaatttgtaaccttgtttttgcttttgattgtatcttcatttactgtatctggtttaagcattttttgatttagtttttgaataatttctggggttttagggagagaatttacgtttacttaatctataggatcctggtttggattgaatttatttcttccagaaattgcaattattcttttatgtcaaaatatcccaatctagttttgaaatttcaactccagattttcttgaaatagaatgtcctaaagaattagctcttccattcaaacccaaaatccaaaaacctaaatcaaaacttgagattaatgatgccaaaattagagatcatctaataagaatcaatcaggatgaaatttctagatgctataggcgatttttacaagaaataactgagggtaaacgtcgttatctgtgagatgcagcttggcctcaatcccaaactttatcttctatccctttagcgagacccttgtttttacctcgagtcactgttgcttt

SEQ ID NO: 309251 - DNA, 579 bp, Cannabis indica
gggcacaaaacccaacaataggatgatatttatgaaggataactctatatgctggattcatgtggtgattggagaattaaattaatatttttttaatgaaaaatgttaaaacaaacaataaaaaatgttggggcaataaatgcaataaaaaattaaaatgagaaaaaatttcttaactgcactataaaacctaaagcaacaaaaaatgaatgttaatcatatataacaaaagtcacctaataagatttatagagatatagaaagtcattagttaatgaattaatgattattaactattagtataattactaataattggttggttacttatttatttttcatttttagtgaacttaaagttaattaaataaaaaaaaataaaataaaaagctaataataaaattttaaaaattgaaagaagcaagattcagaaataaattcacatgggttggtacataattaatttgaaagatcataatatgatgtcaaaaggcattaaagttagccatatttttttttctcaccccttaggaatttcaaaaaatataataacaaaaaataatgtaataaataaaatat

SEQ ID NO: 309252 - DNA, 2935 bp, Cannabis indica
acctcctccactgtcaaggcatttgaggagacaatgaaggcctcttccgttgtgaatacagtaaaagggacgatgaagacctctatggttaagaccaagacaaaatggataccgcacctacaatcgctctaaggtgcactagagacggggaagatttcacccctatcttgatcgaagaatagataacgaatgctacaacactttattgacagtcgtcaagaagacctcttccactgtaaagtttagcagatgatgaaggcctcgtttgctataaagtcgaggaaatgttgaagacctccttcgttataaagcagaggagatgttgatggcctactccgctataaagccgaggagatgataaaggcttcctctgctgtaaagctaaggagttgacaaaggcctcctctgtagtgaaggtgaggagaatattaagactacctttgctgaaagtacaacctagagaatgataaacacctccaaggatgcaacctacgagggaacaaagactacatctatattacttaaactagcagtgtgacaagagaactaatgctaagaaaatagccaaagatcaaagctgacatcgagaatacggtattaacatgatttcatgatatctcaaatcaaaggaaagcactcaaggagtcatttaaattttaagatgaaaaggaaaagataaatgataagaaaagatgatcatcttttctcttctccttttacacttagaattttgaaatctactattcaagtgggaataggaattcaaaatccgactctcagtaggaatgcttgaagaagaaaaacaattgtccaagatttgaaaaattgaggcccacctagtagtttcgagagaaacaagcttagttcacgtcattaagtcaacctcgcacaagtgtaaagttgactcggggaaaatatttacaccaaaagtagccttaatgatgtggacatcaatgtttgacacattgcaagaaagaaaacatcccggagcaagtcaacctaggaggagtccctagccctgcgcccaggttaactttgggattccaaaatgggtgtttggattcctccaagttgtttccaactcactattttagtattctacaccataaggacatgaagcatccaagtccaaggcccaagagttgaaaatagatgaaacaacaccacataaatcaacctgggcgcctagtgtttcacctagcacccaggttgacaacccaactagggttttagtttcttggattgtcttagtacaaatgggtcaaaatttgtactaggacatgaattagacatctcacaaacatatttgaggaatcaaaattaaattcagagaactttcattttttagcacccacaacactaagtgccccaggcacctagcgcagaagttgacatattgtcaacatgggccactttcaagcatcaaactgaaaatatgtcatgggtatttttatgtcttcatcaaaaataaggaaacaagtgcttttgaggaagaaacagactaaccaagaggccaaaatgaaagaccaatgctcgggttgacatctagtgttaggccactgcccagattgacattctatcaacttaggccaattctgaggactttttccaaaaattcttccaagcatattctccattttcgttaaagaataagattcaagtgttttcggggaacaaatagaaattttgaaagacctaaaactggacccagcgcccaagctgacacatggcactaggtctagcgcccaggttgacatattttcaatgggctatttccaattagttttttgaaaaagtgttacgggaatattttttgtcatcataaataacaaagatacaagtaaactcggggatgaaatgaaaattccaagtgcatcaaaattgagctaatgctgaggttgacctagtgttgggcccagcgcccaagttaaaaaatgacatggtgcgctggttttgatcactcaattgcagattctgctctgataattctctctaaaatggtgaaaatagggtaggagacctcgtccttgattttaagagctttagaagtatcaaaacccaacctagaagctccaaaaagagcactcaacgcctaggttgacatatggcctggtgcactgggctctacttatccaatttttatttcgtcttgactattcgtctacttttttatagtgactaagagctatgaagtcagaagagtaaaattcacaacttcatattttaacttttttggcaaagtggcttattcagaaatcaagtagtttcaagtctcccgtttttcgcaaaacaataacaactccaagaattggtggccaaattcatcagaaaacaaaaactagctaagtgatgtcaaaatatcacttacgcatcaaaaagtacatccctaacacattttcccactcatccatcgtccaggttgacgtcttatgtttgggcactgggagtagaacaacgtttagtaaaacgaccataactcactcaatattgatttgattgatgtgattcaacttgtattttgaaagccaatttaatgctctattaatttgtgtctcacactccaatggcaattgtaaagttatcaactacaaatttcgtcctcaagaaagttacgaatttaagctacaacttacacaaagtgggtcccatagacgcgactcaagtttcaaaaattgacaaccgacctctagagtcaatttcactattagatcatcatcaacagtaaaatgtagcctaaatatattttttcatattttttgcaatactttattattattttaatagaacctcttatcctataaaaggagaacctctctagctcattttttacattcagaaaaatacctctaatgtcaaagaatctctctctagaaattaaagctttcaaacttagccaattttcttgtaattctcgtgagaaataaaaacttgaagt

SEQ ID NO: 309253 - DNA, 887 bp, Cannabis indica
cctatcagtgacctgttaaacaagttataaaaaatgtaaccatggttacatttttattgtaaccattgaatactcacccataaatatatatttattcattttgtagggaaagtttggaagtttattcatcagaacttgcaaagctagccattattataatctctcaaatggaaaaagctctaggaacaaaaagcaaggaaatttccaatttatttgaagatggattacaagcaatgagtatccattgctaccctccatgccttcaaccagagcaagttgaaggtatagcccctcattctgattcaactggcattacttttctccttcaattgaaccaagtagaaggctttcaagttaagaaagacggcatgtgggtccccgtcaagcctctcccggatgctttcattgtcaatattggagatctactagaggtaactcgatcctaatagtttttctactctattcttcatgttaaaatttagaagtgtatggttgaaacaggattggctttgggctataggtctgtgcctagggtccatccaatctaagggtttaaaagaaaaaaaaaatcttaaaaaatacatatattttttgagtaatttttaaaagtaccacctatattcttttaatatgggctgaataaggtgagtttataataagatacatgtgattcaattttaaaatcaattgacaataagagaaataattcatgcatcttatatatagtattaattaaaattcctacaatttatggatgtgataagactttctaataatcattcaaaatatctcaacaaatatatacattaagtagttcatttttctattttacctcacatatatatatacattacaccgtacatcaatttctctgtatttttattttt

SEQ ID NO: 309254 - DNA, 949 bp, Cannabis indica
aaaattctcatctcgctttcttacagctcactattataatcatgttttaatagttgccgaaaatctcggtcaacaattattatttacaaaatttccactattattataaatcaaccatcatttacaacaatagcaaaaataagatagggaatttttcctaaccaacaaatatcttgattcaactctaaaacatgttttgtcaaattatgtgttgcacggttagcatttctcctaacataaaaaacaataatattaaaaaaaaaaaaagataaaagacaacgaacatctaggattaaatctggaaaataagataaattcttagatgtagcattcaaggcatcaacaactcggagcgcatccgtctcaatatcggtgatgtgtaattgctcctgtagtgcccaattgagactgtagaaaagaactttggcttccaattcttccgaacaaaaacaaccttgtactaactttaaaagggtagcgataacacaaccatggtgatcttgaactattgctccaacacccagtgttctagaagcatagttgagggttgcatctacgtttagtttcagtcattcacagacggtggctgccttgggaaacaattattatttaaaataataattattattacttttttttaaaaaaactattattattaaaataatttgttacaaaagctttctaatatatttatttataattatttgttatttacatcaagcactaattaaaatcataacaaattaatcttacctaatatataaatgtctatcagattttattatgaacttaacaaattgttatgtatttaacagaagataccatttaaaaagttaactttaacagatacacccattccattccaagtacagtcaaacacccattccattaacaaaaaaactattattaacgagacactctccctcagaaaagacacccattccattta

SEQ ID NO: 309255 - DNA, 1873 bp, Cannabis indica
taagtggcttcatgggtgtaaggcggctaggcgagctcctgttatttctcatatgttatttgcggatgacaattatctttgtcgagcaaatgaaagagagccggccaagattatggagctcctgacaaagtttgagcaagcttcaggttagcatgtgaatattgctaaattgtcgatcttttttaacactaatacctcggaggtaaaccatgctcgagtttaggaaattttggggatgcagaggttataggtgatcaaagtttgtatttggatcttcctaatacaatgggcaggaataaaaagggttctttgggtttcttcaaagataaaatgcataagtgagtagaaagttgggacagaaagtggctctctaagtcgagaaaggaagtccttttgaaatctttcactcaatctctctctacttacgctatgagtgtttttctactttcgcttaagctttgttctgaaatggagcaaattatgtgtaagtagtggttgtgggcaagtagtaatgacccatgtattcattggttgtcatgggagaagctgacggttgtaatgacgcgatggggtttttgaagtttacttgattttaatctagctatgttagggaagcaagggtggcggcttttaactcattctggttcactttttggtcgtatatttcaagtgcaatattatcctaatggatcatttttgtctgcggagttggagtcgaatcctagttatgtttgaagaagtatccttgcttttcaacagttattgaaagttggttccaggttgtgcgttgttgatagttattctattgacattttggggcagttgtggcttccatgcgaggagcagtccgagattacttctttccatccaagtttggaaggggcgaaggtcaatcagattatggtgggaggggcccgagtgtgggatgatgaatttctcgaggatttattcaatgcttctgactgacggttaattaagagtatatattgtgttggatgaatatcttgggtgggatcattggtggtttaaagagatttcaaggatttatttggtgaagagtgcttacaagcttcttgaggtgcttcatggtaggtggtcggaagataataattcgggactttggagggtattatggcaactcaaaattcctcataaggttaaagacttactctagagggcatgttttgggtgtttaccaacactgacccagttaaaaggtcggcatgttaatgtggttgtcatttgcccggtgtgccaagatatgaatgaatcaatcctccacattttggttgagtgtcgtttagccaaagattgttggcagcaggttgatggggctatttgcaacctttcgaccacagatttgttaggatggttttatcaactagtcatcggatttttgaaaactttggtttgtcatgttgcgatgatttgttggtctctttagaaagcaagaaatgagcttgtttggcaaagtaaaaattttgttacaaatggggtggtgactactgcgttgtctactttaatcaatggaagatggctcacaaaaattctgcaaacataacagatttcagtccttgtgtttgggtggagcattggtcggttcctagtattgatatgattaaaatcattgtagatgcctctgtcaactctaggactttttatttcagaattggatggttggcccatgatcatcatggaactgtcatttatcagtgatccaaacaattgcctgatcgtgtctctaatttttggcggatgtaattgcattgaagaaagctttgagctggatcaaagaacgagacctaaatcaacttgttgttgagtcagattgtaaaagcatcattgatgctctgtatgttggaaattattttac

SEQ ID NO: 309256 - DNA, 878 bp, Cannabis indica
ttattttattttataaatatacatatttatttaattataagtaggtcagcaagcacatccttaataaagtaggtcagaacaaaattcaacctttagatcactataatttttaaagaatattactaattaatcgtaaggtattacttttaagtagtgttaagtaccacttaataataagcattactattaaatattagtggtgtctaacactacttagaggtgatactttataattagtaatattctttaataattatcttaagttaacttgatacttaattatattaatagtgatatgatatcgaagagggtattaggcaccacaacatttttctcaataatactataacagttgataattttgtgttaaatttaaattaaaatatctaaaattcgatatttagtgaattgattaattaaaaatattataaaaatatttttttaattgccaaataagcacactgttagtttttttgttagttttttttaaggaaacttacaaaaatactgacttttggttcaatctttacaaaaatactgctacacggcataaataacttttatactgtcctggcctattttttcttttcttttatactgtaaacaccaaaaaaaaaaaaaatgaggcctccatctgtcacactcacagatagaaccaccacaggagcaccagaacaatcggaaaacaaccattaattccggtgagattgagaaaaaacagtgaaatcgacgtcaaataaataatcaaggcaaaacaactgtaaaacaacactaaaacaaattaaacaaaagaaaaggaaaaaatgattaaaaactaaacaatcttctgcacagcctcaataccagatgcaataacggttatatttgcaagcccagtc

SEQ ID NO: 309257 - DNA, 3338 bp, Cannabis indica
tatccatatgttatttttttattggtatatttaaattaatttttaaataaaaatataaatttaatgacttgaactaatcaaggactgtcacgtgactattaacttgacaattaatggttagatacttacagaagttttaaaaatataatttaagtattattattgttaaaaattaaacttaagcatttttttataattaggagttaatttataccacaaattaatcattttgtaaataataaaagtataacaataaaataataaaataatattattacttaggagaaagtccaaatatcagcccacttggatggcccctgcgccaatgtttaagaagaaattacattgtaattcactttactttacatgttttaatttttatattctttaaaatatactcacttttataaatgatgtctttattataccacttagattaatgtaaattatgtgttagacttaagtggaaggtaagattaatgtaaattatgtgttagacttaagtggaaggtaagcatatattgggcaatcccctcacaaaagtgagtacattttaatgaaatataattaaagggtattttttattaatggaaataaaaaataggtattcctcaatttatcccaatatctaagacttgtgttgagcggagccctagggtgaatcaatcaatgaaacaatataataaattttcaaataatactcaagacttttttaacaaaagttatgtacaccctttcttttctaacttcagattggttaaaataactatcatattaaattattagattagtgatgatatttaaaatgaatgaattatttcaggttggtgactgatattcctggaagtacagggccatcgttcggacaagaagtgatgtgctacgagagccctcgaccaactgtggggattcatcgatatgtgtttgtgttgttccgacaattgggaaggcaaacagtgtatgggcctgggtggcgtcagaacttcaacaccaaggactttgctgagctttataaccttggtttgcctgttgctgccctttattacaactcccagagggagtctggctctggtggcagaaccaggactactactactcgatcataattataattatcaaaaccaaatctatctatctaatagaactaataattgataataagcagcttaattataaattaagcaatcaatgtgtaatgtttagtgcatttggaaatggaatattactatatgcactttgttttttatacataaataattaacattaaggataatatatattcttctaatttctgccggagtattcccttttgcagtatgccaaattttgtattttataattacaaacttattatttaattacttaattagttaaacgtggaataataaaattgatgtgaaacatacattttgtagccatagataaagattcagtaactacataccaacaaattacaaggaaccaaagcgcagaaaaataaaaacacacgaggtttttatacgtggtatcatcaatcttgcagattgcgattagtctatggagtcacacttagagataaaattcattaataaagttatcaaaactcaaaagtatttgacttatactaattactctctctattgcatgccgcaagcttgatgtattctaacttaaagaatgaaccttggtgaaaattcaagatcttgaactcactttgatatgttgaagagtacgtgctttcttctgatgcaagttgaaccagatcatttggataaaaattgagagagttatgcccattttattgaagggagacttgtgctgttttgctctagttgcaagcactgacacgaccaagtggcaactctcagccatgcatgttctcggacccctcggggtgtgttttgactttgttttttttttatgacaagtcatattttaaggatcccgagaccccaaaacctcatttcaacattcaaaaccctaactagagaccattgccaccaatcagggccagaaagtggcagtggtgtggtcggtcatggattatgggaagccttagattgtgtttattggttatttcagtcatatagatgctagaaaactacttttgtcacattagttcttggtcaattacttaagagagcactactataattttttccaaaaaagtggcagtagtcgcataagggggttatggacccttggtgacttttctcactggtatttgatatataaatgttggaaatacaatttggccaaagaaactttcccttctatgtgatggccgatcactgccaccatttgtgccaaaaatgtggcagtggtcggccaagtggttcctacaccacttggtggcttttctcacttggttttgacatgttattgatgaaaatgtacttttggcaaaaaatctcatctccattccttatggtcaaccactaccacaatttgtggcacaaagatggcaatggtcggctaggcttgtcttttggtgagaaatagtttctttcacttgtgttgcactccttggtggtgaggggacacattttgataagttcccttcggtactttataagtggcgaccactgccatctccttatgccagtgttctccaaaaactggagagcactgccatcttcatgtggcagtggtcgcatatgtcccattgcatgggactcttgtgcaatcttgactttatgctgaagtctaagcctttttattcctaaatgagttaagtccttattggtttctttgtcggattgaggtctttaggatgaaaacgctcacgagggccaataaaccctagtttgggcacacttgagtgtgtgagtcccaccatcaaatggttggttaatatttttgagttccgtagaggtgctatgaggccctcaagaaggatgtcttaactcatttgacatttataagtcttggtcaaagtcgcaaggtttttttaaatttttgaaaattgagtataatatatttgtttggttgcattttaaagtattggaatgttattccaataaaatattttttctattattttggtagaataactattctattttgaaatgaaaagaaatatcattctaatgcaagataaaaaaaaattaataatttttaggagaattatcccatgtactgtaagttacacttttttttttgaatttaggttgcgatttgagttgcttaatgtggattgcgttgtggattgtgaattgagttggattgcgatttgagttgtttcgtgggttgcgatgtggattgcgaattaagttgagttgcgatttgagttgcttcgtgagttgcgattagagtatttacagtaaaatatcatatatttgtaatttataccaatttta

SEQ ID NO: 309258 - DNA, 1249 bp, Cannabis indica
ctctagttgagttcataaggttcgcactttaaaattggttcgctaaccttctcgaaaaggcaagtaagtgcactacccctttggcaactaattttgaggaagatttgataaagcaacatgagggaagcgtcttacgtaatggttcacaattgtttaacgttggaagaggttctggcggttctgactatgagaaaggtggtgatgtgaacttagttgagagaacatgcacatacgacatgttccaactgttgaaaattccttgtccccatgaatgtcccgcgatgcttactcagaatgcagtttgtataccctgtcctccccctattacacaaaagagacgtggaagaatacttacaatgcaacaattaatcttgtcggcaaggaggatgaatgggtacttccagaacacatgcagaacatgagagtcggggtaccagtggagaagaaatttgtaggtcgtctaagaaagatcaatgcaggaagaatacagagtaaccgatatccatctaacagtcaaaaagtgaaagacctcgccattgatcaaactgtggcaccttgggacacaacaaagctacatgcaaggccagggtttgagcatcatttttgtattttaattgcatgcattattagtatagtttatgaaatctatattgtagttttgttgatatatatcgatgcctttatcgacataaaaacaacaagagtaataattttgtctctgtgtttgtttaacgacatttttcgatatatttcgatgattatcgacatagcaatatcaagaataaattttttttgtctgtgtatgttttaacgatattttttgatatatatcaatgactttatcgacatggcaacacaaagaataataattttgtttttgtgtatgtttaacgacattttctcgatatatatcgatgaccttatcgacatggcaacaacaacaataacaattttttagatttttataagggttatatttcacgacaatttgcgatatgtagcaacgtaaaatgcgacatagtggagcatgatgattctgaaaactattgatatattgcaacatttaacgattacagttacgaaattttgcgatttcagataacaaattaaacgtaagtaaagacaaaaaaaaaaaccattaaaattgaccactaaataatcataacataacaaattaaaattctttgccgtgtggatgagacttgcaatacttgcataaagatccagtcttcaccggtttaccattaaa

SEQ ID NO: 309259 - DNA, 1841 bp, Cannabis indica
gagaaaatgttctaatgatcttgaagatgatcaaaaagacacgcttaaagatgatcaccaagatgcgcttgaagatgatcaccaagacatgcctattgatggtagcgcagaaaagaaagacaatccagacgagtcagatactgtggtcataatggccaagaaattacaaatagctaaaaactaaattaactcggcaagaaaaattttctttgctaattcttgagaaaatgccaagaaatggaagttgtaatgacaacactgactgctggagacaaaaccaaacaaacgactccaaaggataacaccattagaaagactgatcccaaaaatcttggaacctatggtccttataaggacaaagtaggcgaaactttaaagaagtctccttaggctgaacaacaaaagaaatgtaaatatgttagccaacctcaatagaaaaagaaagtaaccatacctcagggtagggtgaccgaactgattctaaaggcaaagctacgcaaaaggaaaaatctaacaaaagccaagaaacctactgcccagaaagacacacattgctgcgatgataccattatttaaagtgatgatgtgttagaggagcatctgttattggaccacaatagtggaagtctctcaacaaatgatctttgaaaaagattaaatgcaaagaaagaaaaggcaagaacaaagaaggctaggcctcgctaagatgacttgagggatcatatcaatgatcaagctcgcagaagagaatctttagatgatagaactcaaggctttgaatgcaaagtcaaagagttaatgaagctcactgagaagatctcccaaaagaaaaatggaattatgtctgatttagaagaagaggacacagagccatgtgtgaagagtattataatgcaccgctgctagagcgctttagaatgcatcaaatgaaattgtatgaaggaagaacatcccagggatcatctatccaaatacaatcaaatgatgcaagttgctaaggctagtgatgatgtaaattgtctttacttttcactaactctaacaaaatctgcaaaagacgggtagtgacctgtaagcaatgtttaagaagcaattcataacagtgaaggacttcaacctggaatttagttccctgactaacatcaagcagtaatcaggagaaagtctcaaaaaatacatccaacgtatgtggatgttgctgcaaagacaaaagttactaatgatatgaatgtggtggctttgacatcacgtatatctaatggatccttattgtggggcaaacttcaaagaaagagggcagattcgctatctgaccttttattcagggcccaaggattcatcaacttggaagatgtttatgctagcttaagcatatggggtgcttccgacaccatcaaccaaagcatcattaactgagaatactgttctggccatagtgcctccgacacctacattcacaacacctacagtttacagactaggtacttctgtacatccaattggacatgcaagtttttctagctttggtgtggcacaaattggatatagcattcctccccaaaaaataaaccagaaaaaggaagcaccagaatcaaacataagaaatactcgaggcaaaataagttctaaggctccaagccgtatcgaatttgtaaagaaagtaagaattcaggaaccaacatactcgattgatactcagaagaatgtatacaaagaaacttgcaacatgatccactataaaaggcctttgccaatgtacgaagatggaaaacaaaaaatggacctaaataaaaaatgtgaatatgatgcatgtcgtttaccacaataaatttactaatttt

SEQ ID NO: 309260 - DNA, 2305 bp, Cannabis indica
gaactcaatgaagaacaatggcgcctaatatgtcagttcttcacatctgaggagtttacgtctcgttcaaagcaaaatgctctcaatcggcagaaaatgctattcccatcaacacaagggtccataactatagctgagacccttcatgaaaatgtaagttaatatatataccatttatattatgaagtttaatttcattgcaatttgcttacaatttttatttatcagcaaaacataagtcgcattgagaattggaaagcttgtcacacaaagaagggcacaggcgagtttgttagcgagcatgctaaagaaaaatgtgtaagattatgtaaactaattacttttgaatatatttaaataactataagtttgtttagtttctaacttattcttaaaataggtacggatgaagacaatatatgacggtcaatctactcatgctgagtgtggacaagatgttgagattgagatacttcgtgagactcttggagagaggcgtggccataagctaggagtgggccgcaaattgaaagggcaatcaggaaaacgacgctcacaatttgctgcaactactgaacaacctagcttaagccaaatcgtatctcatctgcaaagacatattcaggcgatgacacgagtattgacacctgaacaacgtgcccatgtggagacattgatgagtggcgttgctccaacacaaccaacgcaaccaatacaaccaacgcaaccaacacgtccacaaccgtctcacttttatatgtctggagatggatctggttcatcttctcagccaatgggttttcaacatcaacagtcgcagcgggctccactttcatttcagcagttgttacaacagccattacagcagcctcaacaactccctgaacaaatgtctcatcaatttcaacaattttagatgtttcagacattcatgcagatgatgtcacacagtcgccctcgccaaatagcccaccagtaatgatgcagatgatgacgcagtcacctcagacgtctcaagactcacagtctcggatgccacaagtgatgccgacgcaaaaaatgtcacagatgccgcagaattttcaaatgatgcatacactacaagggcaacaatatggacagcagacatcacatatgccgacaccacatgggcaacagactgctcatatgatgacaagttcgcagatgcctccatactatccacagatgccggatgtttctcaaccgcagattccgaggaatgctaatgatgatgatgacgacgacgacgcaacaacaaatttcttttagtatttaattttatcttagttatatgaactattgctttaatgtttatttatggtttatgaatattcactttagcaagtattatcttagttgaaggatattgttatatttgacatttgatatgtgatataaaaatatttagtttggtgttatgttttacttttaatttaatattttatatatttttttaattatcaatgacgaaaaagtcgccattgatatgttcatgaatttttttcagaaaaaaacttaatctttttgccaacgacaaagtcgttggtaataatatttatcaccgacgactttgaatttcgtcagtaataatgtctttcaccgacgaagtattatcaacgacatattactgacgacatgtcgccattgatttccaatactgacaaaatacaccctttttactgacgaaatgtgtcctcattaaaagccataattcttgtaagtatataagcagtttgagatttgaaatgaaaagtctaattttagtcgcatttagtacgtacaatttggtttgccttttgatgctcaaaacacatgaaaaggtaaaattataggcgaacttatatataaaagtgattttcatatagtaggaagcatatatagctatttatataattaacaaaatataaaggtaggatattatcataaaatattaaaaataaaaaaaatttaaatttaattatcatacatggttgtacataaatcctatcattcatcccagctctctctctctctctctctctctctctctctctatatatatatatatatttatgcatgactctgaagaattattttgaatgttaatccatcctctacagtcatgatttctttcatttttgtttagcttagttttgtttcccctgctactacatatttatgtaggtatatatgcatttacatgaatttccattacaagaaaatcataattaagaggtcctttataattacaaaaaaataaataaaaaatttataatatgttaatagatattcctatcaacaatta

SEQ ID NO: 309261 - DNA, 1512 bp, Cannabis indica
gcaatatatatttatagaaaattaaatttgagttgtaaattaatttaaattaattttgaaacaacttaaattgaataattttctaaatatttatggaaattattactaatcttagcgtaaaggttgtgatctcgtaatcgttgaagtactaatctaagatgtaactcatgttcttcctctaattcagaataaaccagaatatcatcaatgaatactatcacaaacttgtccaggtaatctttgaatacttggttcataagatccataaatgcaaccagggccttggtgagtccgaaagacatcaccagaaactcataatgtccataccgagtacggaacgtagtctttgggatatccacctctcgaattctcagttgatggtaacctgggcaaagatcgatctctgaaaagactgtcttacccttcaattgatcaaacaaatggtcaattcggggtagagtatatttattctttgtagtgagtttattcagttctcgatagtcgatacacatttgaagtgacccatctttctttttcaggaataacattgtagcacccaagggagaatcacttggtttggtaaatcccaagttaagtaacatctggagttaaatcttcaattattttaattctgctagagccattcgatactgtgcctttgatactggatcagctcccggaactaaatctattacgaactcaatttctcgggaaggtggtaatccatgtatgtcctctggaaatacatttggaaattcacacaatagtctcgtatttttagctccagatgacataggttggctagtatccactgtagttactaggaatcctagacaacctctgcgcatcagatctttagcttttaggattgtgattctaggtatgcgcgatccttgtaccttacccacaaacatcgctgaattggcagtgttaggttcaaacaccaccatcttcagcttgcagtcaattgttgccccatacttagacaagaaatccattcccatgattatataaaaattagacaattgttgctcaatctggttggcggttaattcataactgtcaatctaaaaagacagacctaatccactgattagatacaattaggtctccagaaggtggcagggtaccaaacattgaagcacacacatcacacgacttatgaaaactctttattactctacttgatacataagaatgagtagctcccgaatcaaatagtattgaataagaacaaccatttatggacaactaacctatcacaactgatggactagcatcagcgtaagcttaagtcatagtgaacaggcaccccagattctgattgttgttcttctttggttcttctttcttagccagcaagcagtctctcataaaatggcccaccatgccacactgaaaacatgttttagcgcgacactcaccctgatggtgcttcttgcatttaggacattctaggtaagatttgaatgtagacccgcgaccttgacgactgttgggttttgtgcccta

SEQ ID NO: 309262 - DNA, 2583 bp, Cannabis indica
agtagctgttccactcaggttgaccggcacacctaaattcagaatcaaggtaagattagtataatttcatgcatatgcttatacatgtttagcgtacatgttagttgtcatcagaataacatattagatatatgttaggcaaattttatttagccatcagattagcatatcagggaaccagtgaggtgtacatagagttgcatcgagatgccatcagatatatgctaggctatcagatagtatagattaactgctaccacatcaatgcgattagagtactgagtacatgctggattcgcggttaatcatactttgtcaagaacgttccagattcagttaggtgtatgggcgcctgattataacccagggtttagtatgtttattatgttatgcttttcttactgagtttgtcgactcacagtgctattgctatgtgtaggtacaggcaaggctaaagctgaggagccgtgagagcgagcaggtgaagattgtacatgtcgaggcagttaggcctggagcctacgatccttgggacatcagggcttctgttgtttagtcgcttggcgacaaatcttttgtaaatgaatagcaaacttttgtaattgtattttgtaaacgggatcccggaaaagtataagtataatatgttgtattttaattaaaaagcaaaattttaattattcatgtttttccaataacctcgttgattagcaacgaactgcactgtgtgttaaaaatcacgttaacacgcctttgctagttagggtgttacatcattgctcatattcccttaactaacaagatctataagcaataaccctatcatcttgcatttaaaagcacctaagaccttttctgggtgcatcacagcaaaccttgaactttccctaatttggtggtagtgctagcaccggggctgtgatcaatccctgcttcatttcttagaaacttgtttcacatttgtctaccccatataaactgttgattctccttagttaactctgttatggaagggcattgaaatcttagaaaactcttgaacaaatcggcagtagtaaccagctaaacctagaaaacttctaactttggtggtcttctttagtctcagccaatcaataacggattctatcttttatggatcaaccatgatcccatccttattgacagtgtgccctaaaagtgacccttgagacaacaaaaattcacttttcttaaacttagcctagagcttgtgttctcgtaatcgttgtaaaatcattcgtagatgttactcatgctctgcttgtgactaagagtacatgagaatgtaatcaataaatactataacacatatatagaagaaatccttgaatgccctattcatcacatacacgaaagtttttcaaaccattggttagtccaaaagacaaaactaagaattcataatgaccatacctcttaagaatggcagtcttaaaaaagactacctttccctgaagctaatcaaacaaattattgatccttggtagaaggtacttattcttgatagtcaacttgtttgattcctaatagtcaatacacatgcaaagggatccgtatatctttttaacaaataacactagaactctccagggtgacaaattgggtcaaggaaactctaagtcaagcatcctctaatgttgaatctttaattctttaagttctacaggagtcattcaataaggttccttagaaacaacatggtccactcaaggtgctaaatcaattaaaaagtctattactcgctgcggtggtaaacccagatgttcttaaagaaacacatctagaaattcttgaaccactttgatgtctttagttcaaacaaattcaggtcgaggggtatctaataccactgctaaaaaccctaggcaaccctcctacaataagtccttggctttcaataccaagatcactagaattcgagatccctgaactgatcccacgaacacaaatggtattttgcccacaggttggaagatcaccatcttttgcttacagtcaatattagcagcatacttggacaagaaatccattccaagtatgatatgaaaatccactaaaaccaattccactagatcagtgctcaactctctatcctcgatcctaattggcatagacataacctaccttttggagataactaattatttgccatccagtagggttccaaaccctttatcacaaatatcacatgccctacccaatttaccaattactctggccgctacataagaatgagttaccctagagtcaaacaaaatagaataataagagttgttgactgagagttgaccagtaacaactgaagggctagcttttgcatcatcttagtaagagcaaacacccttactaaagcgggatttgcctcaaacttctattctaccttctttaactgtgtgcaatctcttttatagtgtctagttacaccatactagaaacaacataaacctctacaattgcctagatgatgttcttgttgggttttatgccataaattaaactcatttcaatataatcagatttacttattaatatagatcagaaaaaacatttaatgttgcatgg

SEQ ID NO: 309263 - DNA, 593 bp, Cannabis indica
tggaatatgtgtatagtaaaaaaaaaaatgtataatcaataaaaagcctaaagcatgaagttattttaattgtagtagttatgattttaaaatttaaatatatacatatatcatatcggggcgggttcgggacgggtatctattcccgcgctcctgccccgtttccaactcgggtatgaatctttaaacccatacccgctcccgctcccgaaagtctacccccgtacccgccccattagggtcgggtacccgcaggtataattgccatccctaattcggccatattgtgttgaccagcccatgtaccttattatccattcacaacaaagtttgtctcttacaatttgtagttttctcacccacccacaaaatgagttgaaaatttggacggtagatagataaatatataaataaataacacgtgaatcatacaatacaattaaaggccttatttgctttgatgtaatacaagagaatagtaattagaaatttgagttaatttttacaaacatactaccacacggaaattttttcaaaaatactatgtttttataaaacaccagtaaaacacaaagctaaacaactcaaaacaa

SEQ ID NO: 309264 - DNA, 1185 bp, Cannabis indica
cccaagttgacattttgtcaacatgggccaattctaaggagttttttcgaaaagttttcgggcatattctctatttgtgtcaaagattaaaattcaagtattttttgggagcaaacggaactttcaaaaggcctgaaattggacctagcacctaggttgacaaattttcaacctgggctgtttccaattagttttctgaataaatgttccggtcatttttttccaacatcataaataatgaagatgcaactcggggagaaaataataattctaggggcatcaaaactgggtctggcgcccaagttgacaatcaacatggtgccttggtttcgatcactcaaatgtaaattctactctcagtattctctctgaaatggtcaaaaatgaggtagaaaacctcgtcctcaatttcgagaaccttgaaagtatcaaaacaacatcccggaagctcagtaaaaagaacctattgctaggttgacatatcgacctagtgccttgggttctacttatccaatcctgattccgtcttgaccacttgtctagtttctcatagtgactgagagctatgaagtcagaagagtaaacttcatttttttcactttttcagcaaagtgacttattcaaaaatcaggtagtttcgagtctcccattttcgcaaaacagcaacatcagcaacatctccaagaactggtgaacaacttcaccaaaacactgaaactagctaagtgatgtcaaaatatcacttaggcttcaaaaagtacatcaaagacactattttcccttagcctagcacccaggttgacatcacatttgaacttgggccctggatgtcaacctcggcgttgggactagaacaaccctcagtagaataaccataactcactcaatatttatttgattgacacgattcaacttgcgtttcaaagctatttcaattctatatcaagtcatgtctcacactccattctcaattatgaagttatcaactccaaattttgttctcaagagagttacaaatttaagttacaatttacccgaagtgggtctcgtggacgcgactcaagttttgacaaccgagcttcggagtcaatttcaccgttagatcatcattaacggtcaaaattagcctaaatgtattttttttcatattttttataataatttattattatttaataggacctc

SEQ ID NO: 309265 - DNA, 608 bp, Cannabis indica
agttcttctttttgttctttgtttttctccagccacaccaccacaccacccaacccaccattattatcaccaccaccacactaccaccactgtcacaccccaaccaccataccatcactattatcaccttcacaatataaccaaccacctctttagcaaatttggatcaatagaaagaaaaaattgggcaaagaaaaatcagattatagtttccattaatcaaaagaaaattcttagcatttttttttcattcccattatcgaattcctacaaaattaaggacccatttgaatccgtttgtatcccctaacctctttgaacccaatcaatgaacacaaaatgataaaaaaaatacttttaataaatcattataaatatattctgatatacaaactatgagctatttgatatagcaaaataacaaagtaaagtttacaaaaaaaaaaaaaaaaaagagatttcaaaagagatttgagaaaaaaaaaaggctaattagtaatttttcccccccgaactttgacatatactaaatcatgccccatgaacttttttggccgttaaaaattccacttgaactatagagattgttaaatttaaggacttttgtc

SEQ ID NO: 309266 - DNA, 1780 bp, Cannabis indica
aaactattataaatgatataaaatagagaagaaaaataaaagaagaaagtaatgatgagagaaagaggaagttaatgagaatttttagctcttttattttaaaaggctgaagtttcgctttcaaaaagatgaacatttatttataaaaaagatgagaaattaaattaatataaaaaaaaaaaaaaatacaataaatatttagaggatctccaataaaggcactactaatggttactaaaatacaaatatctattagttttaatgacaatagaagataaattaagaattataactctattataatataatataacgactaagagattgattatacaaatattacaacaccataaacactaaaaagattcaatgattatattaaatatgcaactaccatggttacatttatttttagctgttagattactattgaatgattgtaattaatttagaaattaaacaaaaataaataataaataacttataacttgttacgttatttccttataaatttaattaggattaattttattaaaaattaaattaattttaattactaattattattttttacaatttgttactaaataaggttttttaacaattaatttatttttgcacttaaactattaaaatattagtagcaaaactctcaataatttaaaattattacacacgtaaccctaattaaaaaaaatgtttagagatattttttacactcaacttttttttttggtttaaaatttaaaaattaaataaaagatagtttaaaattattagatatattttactaggatctaaatttactaacatgtatgttgtaatataattttataatttaacatcctaaatatgaatttcctaaaaataatgaattaaacacataaagttataaaaaaaaccttacataaatggcagcagaataatataactcttttcgttcagatctctaactcttgatcctttctcttgccaagtataatcaagatctgaacttggtttctcctttaggtgacaaaagactacacaatattccacactatcttgagtattgccttgaattgcgtgggcaattagtcattcactatagggttcaaatttttcaagaagaagaagaaagtgaattttaaaaatattaagagctctgtttattttctatttatctgacaaaaagagttaaattaggttatgaaaataatagctataatattctatttatatggggttaggttttgaattaaaaaaaataaataaaaaagataaaaatgactttatttaaacctccttaaccaatttcctcatgggcctaatgagtttcaattttgctattttattgaaatttatatttctttttacaaatgccatcttttaattataactctataaatgtcaattctctctatttaataattataattaattatcaaataaattttctttttaatttatttattaattagacatttcaaagtctcttaattataaacaaaccctaaattctcttttcttctcaaagaagcccttacttagtaaaactcataaatataatatagtcttatttagaattctaattgattaataaaatcaattaattgagtctacaagataatattatctcaaccagtgtggggaccatagacctatataatcaagctcccaataagtagcactgagtaaattctctatcttattaattcttcccgactctataatagatttgaaattgtactcctgattatatagagcgctttataccaagtacaaatacgctataaattat

SEQ ID NO: 309267 - DNA, 915 bp, Cannabis indica
atatatatgtatgtatgtatgtatatatataaaaatttatatatactagaagacccaattgtgtatggaatccacacatgtaattagctgtattaatttcttttgtagtgggggtatttgtcttccttttccaagtttttcccactttgattattaaaaaaaaaattgggaaaatgtatgcattctatgtactcgtttttttctttaatttgcaatttagtcaaaaaagcagattcctcatgtaaaacgcataatttgatgaattgcgtgccatatttcacttatttttactttatatatatatattatcaataataagacaattaaatctatacccttcgaaaaaaaagtattaaaaattgacaagaccttatacaaattattagtgagagagatatatacgattatatatatgtatagatcgatgtaactaaagttatttcgtaaagttttccatgcatgcgcctccatacgaggaatgcaatagtcaaaatatacattttagtttctacttgggcctcaatataatatataaaggcctttctaatctgggcttgttatccaaatgtaagcccagcccagtatatccaatctcttttaattttacaaactatattttgattgtcttcaaacaaaactaattagttaactttttaaaatataattttaatttttatattataacaattttcaaaaacttgaccaacataatagttagtaatgctatgttttatctaaagttatcatcttatcctaaaaaactaaaataaaattacatcatttggattatagaataggcttttataggttttttccttttctttttataagtcggtaacaaattagttgtgagtgtatggtaaggtgtatgaagttttttcacaaaactaagtgcacgtttggcatcataactaa

SEQ ID NO: 309268 - DNA, 988 bp, Cannabis indica
tttttttttctttttttatgtatatagtttgaacaagagagaaatcacgtactatctacagtggaatgttacatgaagcaatatgaggtttcagaggaagaagcaattaaagaacttaataaaagagtggccaattgttggaaagaaataaatgaagactttattagaccaactagtgtgccttttcctattttatttcgtattattaatttgaccaagacagctgattttatgtacagagaaggtggtgaccaatatacacatgttggaaaggtgttgaaagatagcattgctgctttacttatagatccaatcccatattaattaccattatggtaatagtacttaagttaattataataatctccctatacattgggacaacttgatagaatttgtattgtaatttatttcactaataataaacttatcttctatttatttttatttgtataatgggaaaggaaaattcgaacttggaatatcctcttttgagaaaaaatgtagaatcactaagttatgcttatgacgacacttatcttctatttattaataataatgaaatccttttgttagttaattattataatttgtttttaaattttttattgtggtgaaaatattaagttgatggtactaaaataaatttatgaaaattctacaatatatttgatgcatctttatcacttttggtatctgaaataattttttagtcaattttttccttatggtcgcgtacgttacaattgtttgagatatcctgtaaaattttcagaaattcgaaaaaaattaacacgttaaaaatatatttcaaacagtgtgttgtaagtgtgactattttattttatacgcttgtgaaaatatattatttgaacactactttctatatcgtaaattattctgaatttcttttgtatgatataataactataacatacatgaatatgaaaaaataattagactaaaaaattacttctggataccgaaa

SEQ ID NO: 309269 - DNA, 1009 bp, Cannabis indica
ttacctcctctttttttaaatattgtaccaattttacctctgtcacttcaagatactttccatgtgactctcttatgtcagagtattttaggtataatacatataaaaagagatatgtctcaaataaatataaaattagacgtaaatttaattaattgattaataaatggggtatttttcaacttaccccaaatcgaagtgggtttcattcacttcatccttccaaagtcacttgagccccaagtcatttcttcggttctctcaccaactcaccagcgttaccaccttactagtactactgatcggacttcgaagatcggaggtcggacagtaggaattccctttccgtcattggccggatacactattagttcaatcactacaggtactgtacttacggcttgaggctactaatgaggattaaatatgaagagacgattaaaactttgtgtgcttgtttgagtttgtgaggttgtttgagttttctcaagtgattatctctcttttatagagttctacattgccattctacagtgatatgagtactattatccaattctctcttctttgttttttcttttttatattagtcaggtttgtagcattagtttataatgtttagttctaagatttagaaattgtgtttgtgtatagtattaccatttgaaacgttataatatgaatatgtgttaataatcatatgagagtttgttctaatctggatggtccgaaatttgttctcaaatcgttttccatttgacacgtaagggctagggccaaagatactttcataattttctgattttggttctaacaaaagattcatgtttctttcatgcgaatcccattgtatgttatttgttccctacatatattttgtttcagtacagtgtttaagtttgagataattctatatcttggtgttaatgaaatgtttggtgacattgagaaacttctctccaaattaaatctaatttatggtgtttctaggcgaattgtaattatttta

SEQ ID NO: 309270 - DNA, 1009 bp, Cannabis indica
cccccttacggggtttaacgtcctcatcaactacacttccgattgggtcaaggctctgataccattttgtaatgttcctacttcaactgtgtaatcccatatctatacaatctaagaatcatcacacttgaccttccccagatgatgtgggattgcacaacttacccagtattttcttttacggatcatgggacaactgactgtcacatttttcttggcagatttcttctaattgaatacccactaagaaaaatctcattaatcatggtcttttgaatgatggtgtgtgcctagtatgtgatgatcaattagagactacacatcatatttttatggagttgttcttctcttgctcaatgtcgtaagatttgtgattttcaactcagtgacccacttgcttcttgtacaaacttttttggtttcattcacatctttattgactctcttctcaagcattaaattgaattgattttggttgtcttatggagagtatggtttcgaagaaataaatgtgtttataataataaacgcatcccttttgacctagtggtaacatgggcttatgatttcttggttgcctatcaaaggaaagtcgttgttttttcttgttgagaggagtcgattgttattgtttagcatctctcttcgtcgacgtggttggggagggctatctgttggacgcctcctccttctggcttcgtaaaagccaatgttgatgctgcattgaacttgactaatgggtgttgtgggttgagcatgattgttaggaatgatcacggagaggtattggcttcgacatcttggtttgtggatggagagttcttacctaaaattgctgaagctttggcccttagaaatgcagttgcacaatgttgtttatttagttttaataatgttatttttgagtgtgattgtcttaattcggtgtccaaatttaataatcatttattgttggagtcttctttaggacttattttgaacgattttagtttgtcttttaataatttta

SEQ ID NO: 309271 - DNA, 695 bp, Cannabis indica
gtagtatttttcatagaacaagattcagaatgtttcccaagtcatggtattcaagtcataaccttgggattcgatctcccatcagattcgggcatcctcccgcaacatgaattatatttcctgaattgttcttacaatgtctccaaccgattctccacatcctgtggcacaaacagaggtgccggaggaatagggacatgagcaggtcgagcttgctgctctcttagctctctaatatgataccttacttctgtatagtctcttgtattgcagcatacatttgttcttaattttgaggtggtggaggattttcatcttcaccgccaaccctgaacccagatagctcgtggttaagcctaccaaattgcctcgggtgcatcgcataatacgcttgtgatcacagacttttcacaatttagaactttcattcaatcaccaatgctaataagtatctccacattactcaaataccacatcgctacctacagttcctaccatgctaatgaagggaagtgttaaaagtcattttcaaatctagaattttttagaatgttttaaaactttctaagaaatttgtaagagaaatcaagaacactctataaaattctagagaaaacttagaatcacttgaactaagtttagatagttctagagttgtttagaaaatagtatgaagcaattaattagttagtaaa

SEQ ID NO: 309272 - DNA, 521 bp, Cannabis indica
tttttgaaaaaaattctgtcccacaataaagaagtaaaaaagttaaatatttcagtatgtggtgtaaaaaccgtattataaattaagttcgaaggaatgtcatcaacatccaaacaactatattgattgtgggtaaacattatgggcacaaaaattatactaaccgagttacattagagaaaatacaacccgcaaataaagaaaaagtgcttaaacagtaccgagggtaattctcaatttttcatctagactccatttcctttagagagttgatcaccaaaattatattattttgtttgcataactaaaaaaaataatcaaaatgctttaatttgacaaaattataattgctagaacatgtaattatttttttatttatagattttcaaaaggcatatttatttattttatttttaattaataaaataaaaataaaacaagttaggaaagagaaaattattccctaacattttttttatttttttcttaatttgtgtgtgctctactagtttctctttttc

SEQ ID NO: 309273 - DNA, 2570 bp, Cannabis indica
taataatattttttaaaaaaattccaccccacagtctaaaagaaaaaaaattaaaatttagtatgtggtatataaatctctttgttttttaaaaggtataaataccattttagaccatgtactttacaaaagttatcgattggactttctatcctgttaaatgataaatgaaccttgtattttccaaatagtaaaataagactctgaactcaatttttatttattttttaatataattgttgacctcaaaaaatgttcaactgacagcgggatcgtatagatttgatacttgtcaagtgttacacaaacagaatgaaaaagtataatacacacaattttattatagaggtttgcccccttgtaatagcgggtaatgacctactccccttttgcttgtattgatacctagagataatactgttcagatctctataggtgggatcttatataactctctataaggatacaaaacatgaatcaataggcagatctctaatgagagggtgatattgccttagaggtgtgtgagagagatgaagagaggaggccctattgggcgtgtagcaaagagagagagaaagagagattaggatttctgacttagagtgatttagaggcttagtgatttaggttagcgttaaggactttatataggaagcctaaaatcctaatttacaataaaaacccttagatatttacatattaaattgattaaatacaaaagactaaactaccccttgaaagtagatattttccatcagtttgttgggctattaaagagcccaattcgcaggtagcttgatgtccacattttgggttgtacatagagtcttgccagattaatcttggccacccatagatctgtaggggaggtctggccgcccaaggcctataggatgaggtttggctggccaaagcctgcaagttgaggtttggttggccatgctcttactaggacctcgtattaggacctggcaggtcatgtgtctactagaatcatgtaggtcactatagctttaccaagatgaggccagcctttggatgtggagtccagccttttgcaagttgaggagagctttatacaccatcttcttgtagatgtcaggttcccttatcgaacggaaattcccttggtctgaaagtcactttttggtcggcaagcttatgcacaattcctggctagcctataggctcaccctggtcggcctataggcttctcttggtcggccagggatgtaggtatagccccttgagagcttgctgggctttttttgattgctgcttgacagtttttccataccttgtatagagaccttgacttgctactggcaagattatattccaccgtactctatctttggcttatgtggacatgccatgtcaggttgaaaaaatttgggttaacattttcccccaagttcctgtttgaacatctggtcgaatagggactgcctagctcttgtcttacttgtagtagtctttgctgagcagccttgtctagctatgtgttagcttcctgcatggcatgattttagatctccaatcttctctctttatatatatatctcatcttctcttcttggatatctagtctttgttgaggctttcaatacatttgtttacttgaaaaaagttaattgagaatcaaactaagggcaaaattagaaagctaagaactgataatggttaggaatattgctcaaaggcatttgatgaatcctgtaaaatggccttgctgaaaggatgaatagaactcttattgagagagtaaggtgtatgttaaagtgtgctagtttagataggccctttcgcggtgaagttgttaagactgcctattacttagcgaacaggtgtccatctgtccctttgaagtttaagacaccacaagaagtttggacaggtcatgtacctaagttagatcacctaagggtgtttggttgctctacctatgctcattacaagcaaggcaaacttcaacctagagcttttaaatgtatgttcctaggctatccagatggtgtgaagcattacaatttatggtgcttggaactagggaagaaatgcatcattagtagggatgtggtctttaatgagaaaaaatggctatgaagaaagaggttgagcttgctgcaccagaaaccagtagcagcatggatcaaattaaggtggactcaagctcatctagatcaaccgatgttgataaagtcactactgaagatagctcaagagatgactcccaagctagcttaagaaattaccaactagctcgagatagggagagaagagccacaaaatcccttgataaatatgttggaattattttaccaggatctagatttactaccatgtatgtttttaacatcctaatatgaatttctaaaacaatgtaatttaaacacataaaagttatgagaaaccttacaatgggtgtagcggaattaaatgactccttttgttcaaatctctagcccttgattcctttttgtagcagagcattatcaagatctgaacctcgatctctttctctccttaattccttgaattcggattcttcacagtcttacatacta

SEQ ID NO: 309274 - DNA, 2118 bp, Cannabis indica
aaggaaaaggcaataatcaaagttttcctaaaaaatacaactttccataagagaattgcttctcttacaagaagtttccaaacaaaagaaagtcaagctgaaaagtgcaactttcctaacaaggaaaagagcaactaaaaatcgaaatcacaaggtaagaattcgggtaagtatgcaaaggaatcttaccataaatgaaaaaatattttgtcaactaacttgccaaaaaaaagactttacaagctggtttgggtccctgtgatgaggggcagcagtgtggaatggttgagaagacgattgtaaaaccttggattgagcatctttgtattcctatagataagagaccatagaatcctctatatctatataaaaattcttatttctgtaaaaagaaacttgttaggataattccaaatggcccaaatcattccaaaaaaaattgtaagatcctctttttgaaaactttcaaaatcttttagcaaaaaatctttaatgtcactaaatttattattgctgaagaaaatactaaaacgagtatgtttccattacttacttgctctggaacaattaactagggaatgagtgttggaatcaattttgttgggacacaaagagcagtaaggactatcaagaactttacgagagtggaggttgagattggagggagaagatggtggaaagccctccaaataaagtgtttaatcttgggggaacagtggaagaccaaaatgccttccaccagggtttgaaaaatgttaggagaggaggacgatgggtgaggagaggtggaattttctaagtgataagcagaattgacagtcaaaacaccgagatgatattgttgttttgctaatgagcaaagcacttgtagagaccacattattgaactataagtgtctaatttgtttggagggaaaatactgtgctacaattgtttagtatctttttttttcttctataattatatatttcattaattcaaaatatcttttggaattgttgtataaatgacagtttataggtagcttttactagagttagttagttggggtatgtggcagctatgttcaaaactcttagctgagttagttggtctttcatgttagagtcaatgtctataaaaggcatccactacttgtaccaattaacattcattcaattgtacaaatcattgtattcatcaataaaacgaggtttttgtagctagtttattgtgagacattatttgttcttgtgtaaccaagtgtgtaagatcaaatgtgagatcccataacaactagtattagagctcagagcttgaagtaaattcttagtcatagtttgaagaatttggtgaactgtcgattgggatagggaatactaagttcgatttagaaaagcttacaggcaagaatgattttgagttatggaggatgaaaatacgcatgctattgatgcaagaaggattacaatatgccttgcttggagagaagaacatgccaaaaactttgacaaagaaggagaagacataaaccttggaaaaggcacatagctcaattaatctcaatcttggctactaacttctgggagaagtctccaaagaagcaacaaccgcagacatatggctaaaattagagaaattaaacatgataaaatcccttgctaatagactagtcttaaagcaaaagctatattcttttaagatgatacatgttaagaacatttaggatcaccttcataatttcaataagatcattcttaatcttaagaatatttgaatcaaagtagagggtgaagatcaaaacatcatagttcagaattctcttccttcagagaactatgagcattttgtgaataacatgatgcatggtaagaagtatctaaccatagaggaaatacaaaataccctgatgtcaaaggaaatgaaaatatcatcataatagattgatgaaagcactagtaatgatttgatggctcgagaaaaggcttttaagaaagagaacaagtcttagaataaagaaattaagggagaatcattctcaaagttcgaaataaagtattttattcaatcctcatgtaaagaccgcttagtttaatttggaaattagtacctaatcatgtttaattatgaaaattatt

SEQ ID NO: 309275 - DNA, 2915 bp, Cannabis indica
cttcatataaaggtaatctcaaagacacacaatctcaccaaggaatagcagaacaattatcctttacaaaagaaacactctcttctaaaaatataggtaattaagaagtggaagagttcaaccttttgctgctggtttaagtcatatttgtagtgatatattacccctaaaaccgaactccaaaggtctgaatacaaagagaaagtattaattagtttccttacaaaaactcattaaatgatgaaattctgtctgaatagatatggaaagcgagcagataaaattctgatctgtctagtcagcattgtgaatctagactccgttaaagccaagttcatttccacgaaattttctttggacatcacataacctagctggagagattaatgagatcacatcagaaaaagaatttatagatatagatatagtatttattacataataagataccatatatagatatagtatttattacataataagatattttattttttccatataaacccacaacctgagtaacaatatattctcaatagatacacaacaggtcatgctttacaagaaaggaaacaatcaaacaataaatagaaaatattcccaaaaaggaaagtcagaatctgttcaaatagactgtcatccgttcaaacagattcattgtacctagacagatttttggcaaagtttcctaatataaataaggaaaaataaaatatacattaaaggcacaactctacatgttttcttgactagaaattcagataagaattagtgaaataaatattaagactttccttaaatatataaaatagatatcaaataatctaaataagaaaatcacatatttatttaccaacaaagccacaatttgatttgaaagacatttcacactaagaaaagagaaagtattttcaaaaaagattaaatgcaataaacaaataatttcaaaaataccaaaaataattaattttgtcatctttaccaaatatgccaactaaggactttacagttgccaatggtttgacttctgtcatttggtaaaataatcaacagccacgactgcgtattgtatttcacctttttctttgggcaattgtccgatcaggtatattccccatatagtaaagggccacgttctttgcacctcatcaattcgttgggcagtgcttgggggattttggtaaacctcttgtatttatcacattttttcacataggcatttaaatcttcaatcattgtctgctagaagtaatcctgcctcagtattttcttagataaactttgcccccaccatgactgccataaaagccttcatgaactttagacaagagtcgtgcagctttttcatttgtgacacgtctcagtaatgggatggagaagctttttttgtacattacaccgtccactattatatactgagcaacctttctcatcattttttgagcctcattcctatttcttggaagttcaccagtgtttagataggctgctatgggagtcattcaatttggtgtgttgcccaacatcccgatttcctttgtgaaggtgatgttaggctcttttagaaattggattgggattaagtttactttgtttgttactgtattactcaccaaccgtgctagtgcatcagctatttcattttcttctcttagaatctgcttaagggtgtacccattaaattgtgtgagcaggtcgtggatcttacttagatacgccatcattttttctccttgagccgcgtattcccttacgacatggtttaccaccaattacgagtcactacaaatttctagataatcagcacttacttctcgagcaagttttaaattgaaaatgagtgcttcatattcttcctcgttgttggatgctttgaacctgaacttgattaccctgtgtaggggtttcccctaggtgtgatgagagcaatcctagctctggacaactggttagtggttgatccgtccacgtgtaacttctagattggcttatcttcaatgcgttcttctggtgggggctctttttcttgctctctttttagcttggtattgtcgtttgagctgtctgcctcctttcctgtgtactcagtcaaaaattctacccaaacttgtcctttcactgctgtggggttgataggttatctcatactgccctaacttactagcgcacttgagcagccaaccagatggatctggacttagcaaaacttggcgttaaggctagtcggtgtaaacccgaacatgatgagcttgggagtaaggccttaaatttcttgtatttaggatcaaaccaaaagataatttttcaatcagggggtaccaactctcatcctcaactagtctttttttatatagtaaactggatgttaaacattattgtattctcttatctgtacgacacttacaacatgcttggtgactgcaaggtagattcttatctcttctccgtctagagattttaagaggataggaggttttgcaagttgctttttagctcttgaaaagtaatttcacatttctctacccatttaaatttctgattacatcaaagaatgttgaagaaaggagcacacttgtccattaattttgagatgagtctgcttagtgcggctatctgaccatttaggcttttcacttctctcacttttgttggtgacttaatatccaggagggcttggattttctctaggttagcttctattccttgagcattatacatgttttttgatttgttagttaagcctactttttggtcttaagagtattatacatgttctttgatttgttagtttagcctactttttggtcagggtgatacgtacattttgagaacatggtaatgcgattgagtgggagtgctaaacatagatatggaatctatagcttctatcagagcatagaagtgaaatgatgatt

SEQ ID NO: 309276 - DNA, 1816 bp, Cannabis indica
cttttcatcccctcactggtattgctgctgaagaaaatagaggtttttagcttattcacacattgcccaaaccaatagcaaaatttttccaggcagctccaatagcctttggcctcgtcaatagttgcccgacccacaagaataaggtcatccgcaaataaaagatgggacaacctgggtccattcctactcaatatgatacctttaatagtacccgtgtcaatggccctttccaagatgcgggaaagaatgttcgcagcccaaatgaataggtacggagacaggggtcgccttaccgtaacccgcattcaggagaaatactgctaacctttcccccattaagatgtatgttgaaggacgtagtagtaatgcactgggtaatccacttacgaaaagtgtccggagccttaaagccactgagaacgtgatcaataaagttccagctaagtttgtcataggcttttaccagatcattcttgatggcgaaaaaaccttctttccccttcttgcgcttgaacgagtgaataatctcctggaccagaacattattgtcattgatgcttcggcccggacaaaagctgcctgagtagggcaaatcagtctaggcagcaccggccgaattctattagcaatgattttagaaatgaccttatagaccacattacaaagagagataggcctaaactgagagactttcttagggttggccaccttagggatgagaattacattggtagcattaatgcctctgtgcatggacccggaccgaaagaaatcctccacagcatcacaaaatctcttcctaccgagttccaatagtgtttatagaacataacagacataccatccggacccggggctttcagactacccatggaaaaaaagggtttgtctaatttcctcggaattcagaatgctcaccaaatctgtctactcctggagggtgagatggtccagaatcaggtgatccaagctctccaatggtccatggaccgtttgtttaaagatgcttcctagaaactccaaaaattccttaccaatatcacttctattggtcaaccaaactctatctttgttcatgatagtcccgatctcgtttcttctattcttgattgtggcagaggtgaaaaagaacttggaacacttatccccctccttgatccaggagacccgagatcgttgttgccaatagagggccttttgtctaagagcctcgttgagtgacttcctcgtttccaattcctcagcccaaactctggacccagtcggaagatgaatacggttcagctgactctccaattgagcaatgcgggaatcaaatttcccaaattggtttctactccactggctaagagcaaggcgagtagcccccactttcttgaaaattctcgtcggggcccacgcatgagacaaagagccccaagcgttctccacaatcaaatcactacggggggtctctggtccaccaggcctcaaacctgaaaggcctagagggtttagcgtcccggcacaccgtgctgatacccaggggtcggtggtccgagttgcaagtgtggtaagactgtacaatcgtctttgggaaaagaccaagccaaaccctattgaccaatgctttgtcaagagccgacttgatatgagcttcgccgtcccgatggttgtcccatgtaaggcactcccctttaactggaaagtcaattaatctgattctattaatcaatcccgaaatgaacggcaagaattgatctctccccctcgaaccaatccgttcagagctattcaacacaaagttcacatcaccaagaatcaaccaaggccc

SEQ ID NO: 309277 - DNA, 723 bp, Cannabis indica
ttcctcagaacataacctgttacgaatttgatgaaacaaaggcaaggctgatcgtgtatttgccatcaccgtgcgaagttagcttcaaggattcatctgtaataaggtatgcaaaccgagtgaaagcgatactgctaaggggaaagctaacaggaattgagggaatgaaaacaaaggtgctagtttgggttaaggtcacttgtgtggcagttgaaagttccaaatccgataaggtatggttcactgctggagtcaagaaatctaggtccaaggatgcttatctagttgccagtaatggtgttaggatagaagatttctgactcttaagaaagataaaagatagtagtttttgttttaggtgctaactatttgttggtgtcatcaacttggctacatataataccaaaattatcaaatttgttttggtgtttgttttttttacttttgtttagcaattaatgtcaaaagcttcttgttatgggatttagtcattatcattggctaattaaggttagctttgatacttttatattctttgtcaatacatattttatgactctatccattaatttgaagcacaaatataaaaacataataatacttatgatccacatccacatttccaagaatatcttagtttctaaataatttaggccttgaaaatttaaaggtaaattgattagtaatagtaaatatgtcaaataattttgtattgcattataa

SEQ ID NO: 309278 - DNA, 752 bp, Cannabis indica
tttcatcatttaaatcaggtatggatactttcatgttgttcatttaaaattatcttcactgttcctatcttataataaaagaattcttgcttaactaggtttgaacaatttcaaaattttagagaaaattttggacttttgtttgattttaagaactaaagtctgcaaataaggatagcttgaagattttttgtattagtcttacaaatttaatgaagcatggtgagaaatctgatcttgacagtgaagacttataccaagagttacttatgatgcgtcaaagtttaccaaatgataccaaaacagctatagatgtcttgagctatataaaagaagtggatgggtgttatccaaatgcgtggattgcttatagaattttgctaactatatctgtcactgttgcccatgcagaaagaagcttttccaaattgaggttgatcaaatcatatctccgttcaacaatgtctcaagaaagattaagtaatttagctatgttgtccattgaaaatgatatggttgaaaaacttgattatgcaaatttaattagtacttttgcatctaagaatgcaaggcgtattatatttaaatgatataatgaaattaagttgataattatatgaagtagtacattttttttaaacgaatttattttattacatattattttaaggttacaataaaattgtgactttcaaataatatgtacgtatatatgtcaattattttttcttttaaaaaaagggccccaaaat

SEQ ID NO: 309279 - DNA, 842 bp, Cannabis indica
tactcttctttgcatataaaaatgagctgcctcgatactagtatatttataagtatgttgtgtgttgcattgtgattgattcaaagatttaaagtataatatcatctaggagttgatatcaatagtaccaaattaaaactatattacttataatgatattttttaggaaccaaaaaattataaattagttttgggtggaaaattaaaattggagaatttattcccaaaataattattttattttcttacttttgcatcacaaagaaaattggcaaaaggactataaataccaccacgtgttacactattatttgttttaatatccattcacatatattttcattttataactaacataaaaataattaataactaatggcatgatgtcactaatgatgttgaactatcactaatatctagtactagtacaggagaacttttatttaaaaatacatttagaactaattaagcaaataatattttaattaataggttataacttaataaaattatattaaaaaaaatcaaaatacaaaaaaatatcattataataacaataacattaaccaatccttaatactatatcataatagaattatttttaagtaaatataatatttatagaaatttttacatgaaaaatccattttacacaatttattacaaaaacacccctacacgcctatatcaacttttttacttaccatgtttgttatattacaaaaataccacttagtcatcatttcatgcacatacacgtgtgctatccccatcactcatcaatcaaattccactctcttccctcttttttttcattttctttcaatttcattttcgatttt

SEQ ID NO: 309280 - DNA, 1263 bp, Cannabis indica
gacgaccgacatatatatgatcattttttgtcaactcttttcattcaaaaatgagtacttaaattagagatattttatatttatcaaaagttgattatttctttctttttgtacaacttctttaattaattactcaattaatagtttcttcatacaaactcatttgcaaaatactctttccatattcacgtaaataattccttaaaaataattaaaaacaaaggacatgattacgttcaatcctcaacaaaatcctttttatccttactatcttgtaaataaaaactttacaaataaactagagcttaattaagtataattaattatttttattaaaaaaagcataattaatttaaattttgactattgtagcagcgaaactccttttttatatttataattgttacacttatgaccttaattaaaaaaatgactgtaaaaataatttatcttacgattttgttgcagttagtactattttttggttattaaatttaattcaaaaatatgtagtgacatattattagactatgtattaaataagttaaagaaatatgtagcgtcatatatttttgagctaacattaacggctttaattgacatttaataacaaaaaataaatacgatcgcaaatcataaaataaataaaatactttcacttttttatttttattaaaatcatattttcacagcaaatattccatatatatatataatttgttaaccaccaagaaaaaaaccacgtcctatatatactgttaacacatgcacactttatagtacatcatatattttgtaggtacattatatataaaaaaaccatatgacaaaaaaccacgtactatattagtattaaggataaacacatattttgattctgcacaagtaccccacaatagaaaataaaaataaaaattacttctctttaataagtacaaattataaattaattcttattttatcgatctttatatatttttctagacgactaaggatgtatattatacagtgataaataataatttttttttgagataggacaaatttttaaaatacactctttgagatagtatcaatcttctaattgaataaaaaatttattttctcaatccatatattacaatagctatacgactacatatttataagccttcacaccctttacaatttattaataaattacactatgaaatagtagtgtaatatacaattttggaccctgagttttgcaaaagttaccgattggaccctctgttttgttaa

SEQ ID NO: 309281 - DNA, 912 bp, Cannabis indica
agtctacacatggaagaaatatatatttcatgagaaacctctaaaccaaattaattacccatgaatcaatttgtgagtagtgttcaaaaattttattgtatttaataaggtgcggtctctcacttttttaacaagttaattttttttttttttttttttctgaagtggagatattttcaaaaaacatattttgcttcactctttaattttaaaatttagaatcaaaattttaattttttttttaaagaagtcactctcgaaatttattgaaatagttcttttaattataatttattgtattgtctatcattaatattttagattagaatccgacacctaaacaacttggaccacgactcgaattttagactcggattaagacttgcatggacccgaccagccattttttcacaactcaattttgtattactcacttagaataaaaaaaattaaaaaccaaaaatagttattaaaaatacacttttgttttttattttaaaaaattaaatttaaaaaataagaattctacttttattttacgatttaaaaattaaaaaattaaaaaaataaaaatgttgccaaaactactatacatcattcgatttagttttcaagttgatatattattaactttaaaattttaagaatgtgatgtaggtgaagaagaagattaaatatagtgctgaatttttattttttttacaaaaatatagtactaatattatcaaaaacgtgcatttgaactctcaaatgcttcctaaatattataactacagtgcactttatttaccaaaaaaatatggacgattatacaatgcaatcctttaaaagggatgtactgatagaccatctacttatttcggcaattaaaatttattttttagttttaattttttttatattcatgtacgt

SEQ ID NO: 309282 - DNA, 1578 bp, Cannabis indica
gtctctctctttgagtgttttgtccgttctctcttgttgagagtctgttagtttgtatgttttttgtcctatactgcttgattgttttgtttttgctgtctcacttggtacgtgctctgttatggcatcaaccagtaatcatgtggaagatcttgaagagcgttggaaagagattcaacttgaagaagaggaggcagaggagacattctatgaggataatgaagcagatgatgattcgaacattgacaccagatggtgtttggttggtcgtctactcacagggaagatatctgactttcgcatttttcaaaacatcatggctgatctcgggaaacccggcagaggaatgtacgcaaagcagctagatcaaaaccgatttttgttccagttttaccatgagtacgacatcgaacgtgttatctcgggcagcccatggacctatgaccgtaaaacattaatcattaaccggctgaatgaaggtgacaacccccgaaccatcagtctcaattctcttgatttgtgggttcaaattcatgatttgcaaaatggcttcatgactaagaaagtggctacggatgctggaaattatgtggggacttttatcgaatcagatccgaacaacttcactgaagtttggcgggaatatcttcgggtgcgtgttaagctttctcttgattctccactaaaacgtaagatgaagttccggaaacgtgacggtgcctctttctatgccacatttcgttatgaaaatgttccaacattctgcttcatctgtggtttgatgggacacgcagagagactttgtcctaggaatttcgacacaccagcccatcttcttgttaaaccttacggtatgggtatgaaagctcttcctctgcgacatcaaaattttgcagctccgtaccttcggtcaggcaaggttcctgcaaattcaccacctggtgtgtacacggatgctgctggagctaattttgggcaatcaacagatcctattttcatgggaatatcttctcctgatatttctcattctaaatccaagaataaagggattatgctttatgatagtcaacaagctgatgtggaattgactcaagctgaacttaaaaggaaacgatttgctgcagaacaaaacaatgggcctactgatgtttcggctcatgcagaattgggctcaaaaaacttaaatatggtgggtgctggtatccaggcccaccaatcgtcatgagtacgttaagttggaattgtcgtgggcttgggaacccatgggcccgacaattccttgagaacactgttgttcaaaagaaacccacttttgtctttttatgtgaaactttgtgcaaaagtgatattattgaaagacttagagtccggttgggctttgaaggagcccattgtgttgatgtccaaggtcataagggtgggtttgctctgttgtggagatgcagtagtgatgtgcgacttcttgatttttcaaataaccatatcgacattgagataaactctcccaactcccctgtttggcgattaaccggcctctatggagaaccaaatcgcagtcttcgattcaagacttggcag

SEQ ID NO: 309283 - DNA, 1378 bp, Cannabis indica
atatactataggcgactaggccacgatttttaaccgtcaacaattctctttaaaaaaaattacaattttaaagcacgtttaaaaattatcgagaatacatcatgagtgtttaaaattgtcggaagtacccaatgttttccgataattttaaacacttacttaattttttagcaacggtctttaaaaaaaagtatttttagaatcgttggaaataattatttttatagtagtgttatttctctagtaaataattctgtttaatttataataagagatttttttctcaagaaaaatggccacatatgtggaaaaagtgatgaaaattatattacataaactattataattatgagcacgtttttcttccctgtaaagttatacttttgttatggtataatatcttcccaccaaaaaaaaaagatataaaggtaagtacagttggctcgctatgatcttgatcagttagttaattttattaagggaccagctagattttcatatttatctattaatttattttcttaggacactcatcaaattcccaaaaataaaacttgtttgttggtctgtttgttttcattttcgtttagcaaaaagaaaaaaaaactttaaatacaaaaaaacaaacaaaataaaaataaagcatattccttttcgaagtaatggaggggggtaatttattctcagaatatataacaacattaacgatcgataaggtctttcaagaaatattaatatataatcattatttcaaagactcaaaacaaactactttatattagtgaaacctgaaatgataatcacaccccacaaaataggatgataaaacactattattacaacaaattaaaaaacaaaacacaacaaaacttatggagtcgagttagaaagggaattaacacataatatcacaggtttacgattaaatcattatatgaaaaatgaattctaaagtttctttttgataatcactacaataaatacatatctattcatcatctttattatcatatgtactaaatctaaatatgataaattatacgtatatattattatataaataatacatataactctaagcataaaagtataactcttaaataattctattgcaaattaatataatgtatgttactatataatcaaatatataacatatataatattaattatatacaaaactatatatgttacatatcttacacatacttaaatatacttaaatataattatgtattatatacacataatattatgttgtgtgttggccaaatatcaaatcttttccctaaactactctaaatatcaaatctttttcctaaactactcttgaatataatcgaattaatcaactgcaagagagagagagatagagaga

SEQ ID NO: 309284 - DNA, 1061 bp, Cannabis indica
tttttattcaaaacaagttgataccaaggctcaagccattgaaatcatattccgaagagtataaataacttgttgaacttaaaatctaaaggtttaggccttcagaaccagaacctctcgaggctggaagcattaaacttagcagaccctatagattaaagtgcagatgtctaaagagtaaatcaaatagtactacaaacatggaaaccccacggtcagggtataaaacattatctctgcacacatataaagggggatccttgtcccccagaagacaaaaaaaatagtaaatataaagttgtttaaaaagacaagaatggataggtgtggctaaggttgggctggatcctttggcagttgggcatctatagtttgaacatcaaacgagaccttcgagattgccgagttggtcaagaaaggaacatcaaaatccaaaagagtagagtcctgtaagttatcacctacaggaatggtagttctaggatcgaccgcttccgtattttgagtttcttccttagccttgtctgcttcctctagtgccaggatctgaagcattagtacatccttatccttagcatataagaagtctatcacgaattttttatgttgccagatagtgtacactgagtagacaaagtcttgttcaagcgctttggttgtctaggcttcctgctcttgtttctctaggattacctgttgaagttgtcgcttaaggcatgtgttatctccctctagtttggtaacattcttctaggactattcattggatttctcgaataaatccaatttagtctcagcctcttcagccctttggatagcctttttctcagcttctttctccttctactataactccaaataatgcttcacctttctctctcgagtagtttcactaatgatcttgtcatttatgattccaacttgtttgtcatatctcgagataggatggtaagcttttggtctttctcttcaatgtcaagcttttcctgcttcaagtcagcttctaggtctttgattttagtgagagtagtggaatgaagatcctgttggaaattatttta

SEQ ID NO: 309285 - DNA, 1876 bp, Cannabis indica
ggggtagaaggaccataatatccattaaaatccctacaaaccgtaatcttgaatacatcaaagggatcaactggttctaaattccaactcgtatctaggtgacttgccctattcatcatggtaccatattactcggttgtaccatagtacgacttattatagctgatttggacataaaatttatggtaccagatgtcaaacctatctgttatgcgatctacgaggagagggttccaaatataaaaattaaagcggctatctcgaaatgtaactagagtggtacgctcagccctaagcagtgtggttgaccaaccacattgattacctctggatgctcctcacttgcttcctgggggcagtattttgaagatactgtgcccgagccacgcgatatcgggctttttccttgtttgggataggaacctactgccaagaagaatactttgaatatttgtaatcacaagtaaactccttgtcagttaggagatccacagacctcagattgacctcgtttagaaggaaatcgtatgacctaaggccgtaaggaagagtcaacaggagcctataccgctcggccatctcaggagtgggggtaggtctttttgagatagctatcgaaaacaaaacaaaattttaatcaggtaacctaaattaaaagtcatggattaatttaaccaagtctaatgtaaacaatcacttacgaattatacggaaagtggttgtgccgattggggagaggtcggtcatccaaaagaaatcgtccttgaaggagttttgtttggcaaatccacaatgattttatgctcgccagagtgagtgtcaagatagtaaaagcctcctgcgacattcttcctcgctgggacagctttaacagagtagagatactctatttccagaggagtggggcactgatcccaatttagaatgtgtacaaaacccttgacttgtgaggattctataggagacatgattcaattgaaacagggcaagctcgaggtggttgtaaagtccttgaaataatcatgaggggttatttcccctgccctgatgtgcacgaggctcccagcgcctatagcagtcgagccaattgtactgttctcgacattggcaccctcaaaagtctcacttctaagatgcacagggggtaacaactaaattcaccgactcgcactgatctcacctggcggtctagcctatatttaattccgcaagtccttagtgaatcgcctacgtagcctgagatagtttgcaccctcgactctattaactatacctcgaaggtgacattaggatcctggggagtctttgatttacgtggcttgggagacattatttataaatccaagtgacttggttcaaaagaaattgtgactttaggtaagaacagaggtttatccaaaggagtagaagacacactaggacgttcaggccaagcggcatctcgcaagaaacgacatttgcctttagtgacttcttacaagaagcgtctgtggcgactagcattgtcttcctgatgaattctcactaagtgctccctaattcttttatcatttacctctaatttggatgtaggttttgaaattttgggtttgtaacggagggcaatttcagtaggatactcaatttctaaatctcctggacaataaacctctgaaccaaattgggacattgttgcaaggaaaaagcaatcccaattcctagaaagagatttatcaaaccagaagttggtgaattggagattctagaaaacctacgtactgtctaaaccctaacctttacccagacacgatttagccctaaaaaattactaaatccaaatgagatgataacgatacggacgaataaggcagcaattaaacccagaaatacaacataa

SEQ ID NO: 309286 - DNA, 590 bp, Cannabis indica
taaaatagtatttacttttaaaattcgtggtgttagacactaatgatgcctcgtactcatctcgagtatggttatttcattgtagttggcagcttcacttttgggagtggaatctgggcaggatgcagtgataagaacattgttgtatgagagaggcaaagaagaggtgtatccatatggtataacagtggaaaagtttacaaactatatatcaactcttaggaacgagctagccatgtgtggcataaaagacgaaggactaagggtacctaagaagcttggcgcggagaataggactaccagcaacattctatcagccgatgcttattcactatcttatgcgcgaacaccgccggagatattgaggacagtttatggaaccggtaatgagtctcgtcccggcggattctaccctcatggtgccaatggaaacatagctaggagcttccttttcccagataaatattaggagaagaagataactgtatggaggtctattattatgaaaccatatcactaataaatgataataattaataatacaatatttttctacgtgaattaaatataaaaatattaaattatatata

SEQ ID NO: 309287 - DNA, 972 bp, Cannabis indica
ggcataaaacccaacacttgtattagtaatactattaaaaaagatgttaaacatacgatcatgggctagtttaggtgctgttttttttaggctgtttagttgtacttgtttgaggttgctttgagtaattatcgtattattgttatctataacattggtattttctttcgctttcctttaattgagctacaattttgggtgaagctgaaagaaaactttatctaatggcttccaattcatctaatggtagttgtggttcagttaactactaattgtccccgtactcttgttatctataatattggtattttttttataacattgattactcaacattacaacagttgtctagtatcatggagcttatttgtcaatgagggaatggatatctaataaagaatataacaataaaaggccctaatgtgagtcgtccttattacaaatgctctggttcagataaggttaaatttttgaatgatgtttgtatgcctctttttttaatgttaaatgttaatgagggttttgtgacagggaaaaaatatccaagattgtaatttctactcatttgaggaagaactcaagcactgtccctgtggacgtggcttttgccgtatcgcctttgtaaggggagaaaaattttagtattgctgtgttacgatggacatttttaagtgctaatacttataagtatgttgttttagagatatatcatgttcgtgcatttttaatggctatacgaagcttcgaactggtttgtttcggcttgttttttttttggtcagttttagagtgaaacatagggctcaaatctacttcgaactggtttgtgttggctgttcttttgttcttccacttgttttcaagctctgaatgcggttcctcaagtttcaagttctcatcgtgagcatttatttatatttaagttaggatttttgagtcgtagcctctgtttctttaaatttgagctcatca

SEQ ID NO: 309288 - DNA, 1348 bp, Cannabis indica
aataagcggggatggggattaaaatccttaatggggatggggacgggagagcactccccgctaattcctagcccgtgtgcatccctagcactaagcaaagcttgtccttatgatataaagggtcggggtaccccaataaaggtctgcaaagctcgccaacaacattacctacattgcttgtaactatcgcaccttgaccactagtattgactgagtattcatagctgcatcaatattttatttaaaagttccattgttgagacactgtctaatagcaccattacaagatgaaacaagaacataaccatcaagtcttctaatccatgcttgtttgtagtcctgcaaagactcccatgatccaattaaacaacctgttatgatgtattattgcgttgccaaaaagaacaacattcctatcattccaaacagcctacaataatctgatgcaatcctcaaacgaatatgtattgaaagtttgaaaagcttgaaacaaaaagtcagcaacttatacatatttatttcgtttataaaaagtattaaaaatgaaaaaaatttcaaacctttcaatgcaagacagcatgtgacactgtctccctatcagccctataagaaacaatgcaagaaagcataaatattgactttttctatataaatattttatttatttttcaaaaatgaacatattgtaatttattattattattatcttttaacaattttcatatcatttgtttttttttttttaatttttgtgtattagagaataaaattaagctttataatttactagagtattaaatatgagtgaacttctaataggtattattagaaaaatttgaatttcaatacttaattttgttatcaaattaaaataaattctttattaatttttacattatatagttgagattgttctatcaggtaaagagagaaataaagaataaagttgagtttgagtaagagagaaggggattgttatccatgtttctggatagaagacaagtgtaattttaagatagtttagttcagttacaaaaggccagaccataggcttaatcaagataatggactagatccattagtgaagtcaagccatccaaatgacagatagatgacttgtacaagcgagataaatattcagcatagccagtctccaaatagcatcaaatagtgctttcaaaagagcagttaatgagcctccaaatataaagcttgggatctcactcatttgttatgaaatctcacaatattaggactttattacaggatcattttgacaattaaatattctaaacgaggaaatgaagtagttattaatcaagcatttatgtgtctttattatccacaa

SEQ ID NO: 309289 - DNA, 3029 bp, Cannabis indica
caaaaggtggagtcattatttccactatgtatttgtaagtaaactaaatccacattttggttttacggaatctttaactatgtatatatgtattatgctttctattatatgtttatatatattgtattaggaatcatgcaaatagattataatagccactagtataaaaggagatattattgacaaccaaaccaataccttctttccaaccaaaaaaaaaaaagaaaccaataccttttacttctgccagagccttaggggcctccctttgttgtgaaagccatgtattctgaactgaaataatagcagcactgttttcacattcagaatatgcctttagaagttccctgcatgttgagccatggaaatgtgcaaaaacaagtgtcatttacggttacattgaaaatagtaatagatcatacgctgaacaatgaagttaacgaacacaaaattttgaatgtccataccggtttagggacaggaaagcatgaccccatttaaattttccaagaagcaaatttgccgtttcttcttccccactgcaaaaccaaatagtagttgaaactatgaccaatgattcccatagtggtctctgaaatagaatctatgaaaaatttagaccaagcagaaaagtaaattgaaaaagcagtagagggagcatccatccaaagtcatattccattcaccaagcaaactggctaatgtcattaagcaatttaaaaggaaacctgatgaattcttgagcaattggtaagtcgctcatcttttcttgcttatgctagtttggggcaattcttcttgatgtgacctgattacctgcactggaaacacacccctgactttgatctacattccctgcgatgtttcctttggcaggtggggcaggtcgcaacttcagtgtaagacttctttcctccatcattgtttgtcaccactcgccggtttccatttcttatcccaatcattactatggttgccctcatgttatcctggccgcttcacttattcttctttgcctcacaccgagcagcaccctctttccttgtgtcattttccagtcgctcagcctccaaacctcattctagtatgtcagaataaacacatttcttcctggcacaagcttcactctgattgtagcattcagaatctgattcacccttaatgcttccgccagtataacctctatcgctaactttgccaagcggtctattgcgtagcatattctgtgaccgtcaggttacactttcttcagtagacttgcagcacatgatacacattctctgtcgttcaggtccatatattccaatatggattgtacattccttaaccatttctctgcctccaatgggtaagaacctccctcaaattttatcagtgttcaaccagaaaaaatacagtgaataaacagagtatgatctgggtagatttttttagtgttcaacaagaaatactacagcgacgctatcctctctgccaatcagaagagatgtgaagattgtgccaggaagaaatgtggtttatgctgacatactggaacaagctctggaggctgagctgctggaaaatgacaaggaaagagggagttgctctttaggaggcaaagaagaatagtagaggtgaccaagattacatggaagcaaccatagtaacgacccgggataagaaatggaaacttgcaacaaacaataatggaggcaagaagccttacactgagttatcaacctgccccagctgccaaaggaaacatcgtggtgaatgtagatcaaagtcaaggttgtgttttagtgcgggcaatcgggccatatcaagaagaattgtcccaagctagcagaattaaggaaagatgacacagctgctctagtaaaatgcacatttttcctcacggagatgggacctacccctaatagggtggggatttaccgtctaaatagggaattgggatgacacaccctgccctgataaggacctgtttagtattttattcattgttttaaaagtattttatattttatttatgtatctttttagtatattggtaactttttttataaaattttaagttgtattttggataaatatagtatattgaataataaatagtgttttatataatattatgaaatttacatttttatataaattttatttttacataaatgggtctctacgagaattccccgctctatcccgatgggaaaaatgcagggatggggacggagtggggattagaattcttaactgggagggagacgagaggagccctccccgcctattcctcgccttgtgcgcatcactagttacgcccattaactacaccctaccatataaagcttttccaaacctgaaagaggtttgtaacagtttccatatagattaggaaagatggaccaaatgagagctaaggcaatgctttacgacctatattcaatgattaattgattagctagatactattactaaagcatgcatctgcaccatgtaaaatatagtgagtctaaatttcacatgtagcaaccaaagatacacttatcaatcagcaggacaacaaaaacatatatgtattgataccatatgattaaagctgctgataatgcctccacacaagacagctgacatggtcgcccataatttataggatttgctgctactagccatggcactgcaatagattgagatcttgcatatcaaagaactggctaagagataataatttgataatacattacaacattcaatacccatcatctacaattggtgaaaaaaaagatcatggcatagatgcaacagtgagcagtgacaattttcaaggcaggtaagaataagtatgtaaagcagacgtgtacttgggtgtttcaaatagcattattggtcaatacttttttagttaaaaaaagaaaatataaatatattcaccactttttgagatagaaaatataaaatactaactgccgacattattagcatgcacaatatactttacaataacaataagtatagcaaagcagtttttttttcatttcacaacatta

SEQ ID NO: 309290 - DNA, 892 bp, Cannabis indica
agatcaatagatcaaccaaatcatacaattatgacgagacaacatgtatttataaagttagagaggagatttctcatcaaaggattcatttaactagaaaaacctataattctgcttcaaatagacttcatacagatgttaaacccgttaactatagatccctaactatatgagctaaaaccacaaaaaaagtccaaaataaaagtcttatattgttttcttgttttattataggttgggaaattcattcagttagtagcaacattctttggaggctttgttataggattcatcaaagggtggtttctaacccttgtcatgctatcttcaataccggctcttgtgatctccggtgcagtcatgagcatcactatagctaaagtggcgcgccgtggacaaacagcttattctctagctgcaactgtggtcgagcaaacaatcggttcgattagaactgtatgtgtacttagcattgccaaaaatttccttaacattccctccagacttgatagctactaagtgtaatataaacctgatgacaagtacgttctctcaggtttcgtctttcactggggagaagttagcaatagagaggtacaacaagtccttaacaaaggcttataaatctggggttcatgaaggcttggcaaatggaatgggaatgggagttgttctattgattgtgtttagtagttatggtttggctgtttggttaggtggaaagatgattattgagagaggttatactggtggagatgtcattaatatcatctttgctgttcttactggttcactgtaagtaccacgtacaaatctcttgtgtcaagtgatttaattttctgcaatatttttatattctgtttgttctggtttgtctttgcaaaactgattt

SEQ ID NO: 309291 - DNA, 986 bp, Cannabis indica
gagttgaccaagttgattgagttgaccgggtcaatccgccaacccgctaaacccgaccaaccgaaacccgccaacccatgacccgccaacccgccaacccatgccctattcgggtccggttcggtttcaattttttgaacccgaaacctgtgaacccgaaactcgccaacccgaaacccggtaaacccgcccgattttcagccctaatcactgatatagtaaaattgaatgaaattaaacaaaagtccttaaatctaacaatcttaatagttcaggggattttttaacggccagaaaagtttaaagaacatgatttggtaaatgttaaagtttgaggagtaaaaatcttaattaacctataagtaatttttgtatctagtagaactgtctattcttcaaatatcattaaaaaaatgtaaaaaaaaaagtgatctttttacatcctatacagttgagctcttttatatataaataatgagcagaagagtatgcaagaattaatgactggcaaaacttatggtaaaataaaaaagtgaaaaagaaatttttttagttaaagcacagaactttcaaaaccagagagtgtggttctttaattctgtctaaattaataggatataatttctgtatgagaactgggaagttacaggtgtcatgtatatagccataacagtagctctcataagcctagaaaaggatctaattagaggtatcttaacttgtaaccactagaagatgaagagccactagtctatattatagctcctattatagtttttcttcttcttcttcttcttcttctttaaattcttgcatcttcacacaccttacaacaacttggctttttaatttgatccatgaaagcaaagtaagaaaaggctatataactttttaatttttacccacagaaaaacctatttcttttcacctataaagttctttccttttggggttcccataccccttttcatatactaacctcagca

SEQ ID NO: 309292 - DNA, 875 bp, Cannabis indica
acttaaatctcccttggcaaattatgatcaacgaaaaaccacattaagacaaacaaatgtttagacaaaccacaaacaaaaagacacacaagcacacccaaaatattaacactgtgtacaaattttatccaaaagacaaaacaactccccctcgatgatcataatcattcactgctggaataagagaccagaggagcactggaaccaagtatcctggagtcaccaccatcaggagcagacgactgagccacaatggaaatctccccctgaacagcagccacattggtagtcttcccctggacaccagcaacatttgaagtctccccctggataccaacctcagtagacacaccctgctcaattaatgaattaatctccccttcgagaccggctgatggagatacgtcctgtgcaccttgtatatcagtagataagggcacttgtaagtctgcaatagtctgtggaagaccttggtcagcaaaaccagatggatctagagttgcatgtgatggagagaggacaggagatgccttattcattgcagacccatcatcagaggagctagatacaatcccttgggaatgaacaactggagaagcttcagattccttgaggattgtggccatggcagtgagaacatcaataaataatttttcaaaacgacgttgcatgagttgatcacgagcataggatgtggccagatcagtgactgaggtgagcaactgagttttccaggaattcgagttgaccccatctcgggaagttgaaggagcagtcagagcagtaggtaaatttgccattagagatgccccagcagcagatatatgttgggttttatgccctaaataaaactctttacaatctgattagttatc

SEQ ID NO: 309293 - DNA, 1846 bp, Cannabis indica
aacattgaaacaactaaaaaacaatcttagaataacagtaaaaacttaacacagtacacattatgaaacttacatagtatgtttgaaaaaaattccaccacacagtacaaaagtaaaaaaaattagagattttagtatgtggtgtaaataaacctaaattaatacccactaagaaaattaataagtacgataagataaacataattatctcaaacatagtaaaaaaaactactactacaagtattgtgtaatcatcatcattgtcatagccatcgttctttcccacttttgcctagctagattcaccatcatcaaactatagaggtgacaggtctatttgaatcccgcctacacaagtactcaaattttgtaccaatactcgcatcagagtgccataattaacttaattttgcttaggagtttgatttttccttatactggcctccacattaatagaagacctagacatagaggatggagatgatgtccatattgaaaatattttattaagattttgtttataacacatattttaactaacttaattattaaactacctagaataaattccttccaaaacccaaaataaacctattaaatttaggattacttacatttgtaatgcaacaaaataatgactctacccatttagcactctaactctcaaatcctttatgtagaagagtatttagcttgtttttaaccaacgaaagtgagtcaaaataaagcaattagataaaataaataatagaaagcaaaaacagtaaacaaaaagaacaaaaactatgctcatgtcgtcccaaaatctgaacactccaactctgactatttagatatgtacaattttcattgagctctagactcactattgtttagtctttgcttttcctttatttacacatgaaaaatatatttgtgagttaacagactcagttaaaaagtataaaatataaacatataatcgacttgtaattgacattttttgatatgttgtattttgtatgtttgtgaaaaaatagattctacatactcaaaattgtaaatttttagtattaattatgtttatttagtgaagtttataaatattttaaaagttttatttaaacataatgttacactaaactttttggttagtaaatgttagcatagtaactaagaaaacgtagtaacgtccctaagctagtagggtgttacacttgtgttggaggctgatcaatgtataagtattgctacattaattgtttgagcgtgcataaaactaatggtaaactgtacgtcacctattcagcaacaaaaaatatatgcattacatggccagatcaatgatgcgagatgaatagaaatttatttcattgtcgccattgaatttgaataatttaaataattaaaattttgaaaacataacgttaatgcaacaattaaaatttagagattgtagtcataagtattttctgtatgatacctgatttggattgaccgagaaactcgagatcaatatcatacaagtctacatcttaagaatatgtaaattgtattcatgataattagttttccagaattagaattaattttcagggatgagttttatgtttcaaactcattttacaaaatttttatcaatcggtttggttgattttccatttgggattctatttttctcagtcatattggccgaaattaatgatgattcttggtcatcgaagttgtttcattattgttgaaccccgatcatcatgagatgggttcatttttctggtgtgaacttggtgcggctaggattatagaagaatagatatttttgtagcaataatatcaatgataattattgttgggttttattccctaa

SEQ ID NO: 309294 - DNA, 510 bp, Cannabis indica
cattttttttgcggtgcgggcggtttgagcggtttgagcggtttgatgtacacccctagtagttctgtatggatgactactactagtactaggtatttggtgattttctccacaaggctttcttttttgtgtcggttgcctggatatttggaatgatggcggagtcaggttcaaagctatagcagtagggacatttgtattttggttgtttcttacatcatcattgtcttcaaaataccattcagggtctaaagcatcaccaaaatcaccatgaaatgatatttgtgctacaatgtcagctgtcggtatcatagtatttaattcaagtaacacatcggctgccaacacctctgaatttgtttttgaaatgaaactcccaccttgctacgagtatcctcaatagtacttggcgtgggactaagatcgatacatatatattttcttcaccaaagtcacaaataagggagtaaattcatctagcttcttcgcaagcatagacaaaaataacct

SEQ ID NO: 309295 - DNA, 588 bp, Cannabis indica
ttttatagcaacttttatgttaccttcgaatatactgagctacaataagttacaaaaaattaccatatagctcataagcaaaatatgtataaatttttgtaatatatataaattttttttatgatatataagatatcatttgctttttttatataattttttttttagaaatttattgaaataaaacttatataaaatacatgtcatatggtaacttttagatatgaaataacaaatatttttagtaacctaaaaaaatagttgacatattgaatattgaattttattagttacttttttcttagttaataaaatttaaaatagacggtaaagttacttttgattctaaatatttattcggtaatagtgaaaatatctctcttttcacatatcaaaatgatcaactcgaaaaatagatcatattggtactaatcttgagctcaaacgactagcggtgtagctagaattatttttaaattatttcttggtaagttattttagaataaatacaatttagttacttttatttattgaataacaaaatattttttattaatccatgaaatgtggttggtatatttaattttt

SEQ ID NO: 309296 - DNA, 652 bp, Cannabis indica
ttttggctgttaaaaatttcccttgaagtattgagagtgttagatgtaaagacttttgtctaatatcattcaattttactgtttcagtgattgtttatatactaaaccatggtccccaaactttgatatctaccaaatcatgtccctcaaactttgatatgtattaaatcatgccccctgaactttgatatatattgttgcataaatcaacgaaattgtgacattgattgaaatattagctgatgttagaaagtgtatttataatactagtcgcttggatctttgattaaatatttttaaataactatcaaactcgtattatgtaaacaagtagattttttctgcttaattagagagcatattatcattagtcaccaataatgttcattgttctaacaccaccaagaggtagagctagagtccgttctaaactaagacagataccatctctaaaaaattgcattgtatactcacttattttggtggcgtttggtaacacttttgttttttaattttaaaaacagaaaaatgaaagtagaattttttgtttttaaaaattttgtttttgtaaaaacaaaaatgtgttctataaccactttggttttcaaattataaaaacaaaaaataaaaaaatataggttctctaaccact

SEQ ID NO: 309297 - DNA, 1937 bp, Cannabis indica
aaaatttatattagtttatgtatatgtatattatatatttgttattataaggatacacacttcaagagactacttatattttgaatgtagtaccctcaaagagaatctgcaagaccccaatagaattacggaacagaagaaaacccaatttgaaacaattctatattttgggttgtcctactcttgttataaaactgaggattgggaaacttgctcccagataaaagtttgtatgtttgtgggttattcagaggaaactcaaggtatgtacttctatagttatgaagaatataaagtgtttgtatcggcaaatgctaggaacatgactatatgaaaggtcaaaaaccacagagtcaagtggttatcaaggaaataaaaaacgagcagatttctaaaccatcgattttagtaccatcagttgaatgactaataatttttgccattgttcctgaaaaggaaaccgatgtacatcgtcatagtgggaggattgtgacacaacctgtctactatgaacatgaggcacattttcttatctatggcacaaacaagaacgattcattgacttaaaagcaataaatggaagacccggaatcaaataagtagaacaatgccatggatcaagaaatagattttatgctcaccaacaaagtcttaggctatgaaatcctacctaaaggtgtggcaccaatacgatgcaaatggatttataagaagaagagaaatgatgaagggaaggtaaagacttttaaagctaggcttgtagccaaagactaaaaagttgagttttgaataatgggtccaaagcgttcaagggtaattgaagagggtgcctcatcatccaactctccacgagcttcgggaagggcaaccttggaaaggactaggtttgtaagccttgaagcccaagatcattatcttgaattgaaaaatagggtgctcattgaagataagggtattgagtatagtaattctcctatgcctaatcacccattgtttggaactattaggctctaaattcaaagaagagattgggcgcaatttgttgatattaaggaaaagacgaatcaaactttaggccttgattttttttctaattggcccgaaaggaagaatgaagtggtgaaagtaagggaaacaaatgttccagtcacaacgcgagcaattcatgcattgtatttgcttcccaccttcccacgtgaggaacaacgtgtgagaattattgaggaggataaggaaattgactatgttgatgtggctgagacaattgggtaccatagcctaaggtttcttgagtgtgatggagaaccttatcaattgtatcgatgtgagctgaactaggtagctcgtgcctagttatactttgtgagtggcaggttggtgccaagtaaacacttttctgatgatcaaatggataggttgatatatgtgtatgctattataaagggttacaatttaaatgtgtgtgacattattcagagaagttttgatacaatggtggaagaagctttcgatggaggacttgggttagctaacgtcgttactgatttgtgtgaggcctataaagtttgttagttttcatatgattcgaaggtccctccacaatgccaaattgatgcggggacgatgtctagatagaaagctccacatccatatggacaacctcttcctggtcaaaacccagtaccaccacaacaagaagcccccaatgaatcctcctaagcatgaagaagtgcacgatgaagagtttccacaatgcattacttgtgacagtcagtagtcccgtgatccgtaaagggaaataccgggtaagctgtgaaatcccacatcgcctgggaaaggtcaagtgggatgattatgagactgtttatgtatgggactacacagtcgaagatagcttagatggattgattggtaatacctatatcaacaaagtgcat

SEQ ID NO: 309298 - DNA, 1062 bp, Cannabis indica
gtagcgtgccttagcattagggcgttacattagatttttcattttcctttactggggagtttacagtaaagaatattcatgggctttctcatgaggcccagcccatagagaagaggatctactgactaggcagatcggattgggatttgttatacccgaaatttggctaccatttcaatggaggacacgtgtcaagataaagggaatatggattgataaaatcacttttaatggaataactcattaattgcgtaagtaatatagtatacttgcaactcgctgactataaggtcttatgcaaggaaaagatatacaaactgttgtttagtgtattaacgagaaaccatacatcattggattggatttgagccattgtgcggattggattggatccaaaaaatgaaatccgcacttagtgcggatcggatgaactatgaacaaaatagtgtggattggattggatgaacacccctatgtgtgcctgataggcctatttaaataagaaatacaatgaaatggatagctcagtgtagtttcttatgatgtgcacagccgaaccatctcaaacaatcattagttaagttttcatgtaattaagttcaaaagccattgtgcttatgaagatacggatcgactagcacactccattatgaaataatatatcataaaagccttgtcattgtcatgagtcaccggaaaactagtaagtagtaactacttaccttgctttactaataagttgagagaatgtaagggattttctcttacatttatctatttactttataaaaattaacaaagaaaaaactttgttaaatatggaataaaaaaaacactattttttaagaaatatcattaaaaagtaataatttttatttatttaatatacaatgacaattttatcttttaaaagtaataattaccataaatagtttaactataaaaaataatttaatcaatttatttattctaattacgtttctttaataaagtaaagaagataaattattaatattttatttccaaataatttaataaacaacatattataaatattgattc

SEQ ID NO: 309299 - DNA, 1436 bp, Cannabis indica
acaacactccaaatcctgcttacattcaatggcgcaagaaagaccaactcctcttgtcttggcttcgttcctcgatgtccgaatctattcttgcatcagttgcaaactatacaacctctcactctgtctggcgtgcgcttgaacagaagtttgcttctcaaacaaaggctcgacgcctccagctaaaaggtcagttctcccatgtccagaaaggcagcctttccatctctgagttcattgaaaaagttcaaaatcttgccgattctcttgccatagctggttcacccgtggatgatcaagatcttgttttacaagttcttaatggcctcggtccagaatttgatccagttgtttctggcatcacatcaagaagcgatgctctaaccattgaagaagttcaagcacttctcctctctcatgaaagtcgcatcgagcatcatgtagcaatgagtgatctttcatctaaaatgcaggccaacttaacatttggaaatggtcgttctggaggtgttcgaccatttgccagtacaaattctggcaatccaaatccccattcttctttcactggtcgtggccgtggtcctcctaagttctccaatcaaagaattgtctgtcaagtgtgcatgcggattggccatacagctgctgtgtgccattaccgttttgataagaactggactccccaaaccaggtacatctgtaaatcgtgcctttttaactgatgttgaatttgactgtgatcctcaggcgtacaacaccactatgatccaagattttggtgaagatagttcatggtatgtcgactctggggccaccactcatgtcacttttgatagtgcaaatcttgactcatctaccccttttaatggcgctgaatccttagctattggagatggtaagagactttgcatttcccatattggatctgtgtctgttccttctttcaatccttgttgccctttacaaatgcattcagttttaaatgttccaagaattaaaaagaatctagttagtgtttcaaaactcactaacgataatgacattttctttgaatttcataaaaactgctgctttgtcaaggacaagacaacaggaactgttcttctcaagggaagacttaaagatggcctatacctccttggtgatacatctcatttgcctaaatctgatctgcccagtcaaacagccactcatgatagatctcatagcatatacaattgtactactaaatgtaataatgtgtctgaatgttcctattcagacaacaattgtaataccaatttcataaataaaaatgactcttactcttttctgtctccccagtgtgtttttcatgtttccacacctattgacatcaacttatggcactgcaaattaggccatcctgcacaatctacattgcaacagttattaccttctcttccacatacaggttc

SEQ ID NO: 309300 - DNA, 1628 bp, Cannabis indica
aaaatatgatagggaatttctcctacccaacaaaagtcttggtccaactctaaagcatgttttgctaaaccatgggcgacatgattagcatttctcatcacatgagaaatagtagcttcagggaaaaaggacaaaagacaacaaacatctatgattaaatctaaaaaacatgataaatctatagatgtatgaattaaagcattaaagactcttagtgaatccgtctcaatatgtgtgatttgtagctgctgttggagtcccaattgagactatgaaaagtgctttagcttccatttcatcagaatggaagcacccttgagcaggctttgagatggcagcaacaacaaggccattatgatcccgtacaatggcacctactcccaaagtttgcgaggtagcattgacggctgcatcaacattgagcttcaagcctgctgcagtagggggctgccacgaaatgtccttgcttgcttgttttttactggtgtgtgcaccagtaggtgaaacactagttacagcaggggctgtatgggtttgccttgtagaagcatgatactttcctaggtaatcttgagcaaaacttgttgtaatcttcccttctttaagcactcccccatgtaacactttattccgatgcgaccatatcgcccacattgtgcaaacattaagctcgaaatctggttgtgagtgaacattggagaggtgaaaaataaaatcaccatcatgcatagcttgtgcttttctgaaatccattgtgaaatccgagtgtttccatgtcgatttggcatgtgggcaagtgaatagagcatggcctatagattcccaagcattagagcacgtggaacatgcaaccgagtcaataactttcctgcgatgtaaagcggcagcaattgggatggcactgtatatgaccttccaagcaaaaattttgatcttagacggaagtttcaagtgccaaaaagatttccaccatttgctattcaaatctgaagcagaggcttcttgttgttcatctaaggtagcagctaagtggaagcctgacttgactgcatatatacgcgaggttgtgtgatgccatatcaatctgtctgaattaggaaagaaactcagcgggattgagacgattttatccacatctaactgaccaaaataatttcccagcagccttatatccactccctttcttctgttatgaaattagcaaccaacatagagggaggtcctatgtaagtgatgggtttaaactcagtaaaaccaggtatccatttgtcttgtccacactgaatattaaagccatttccaactttgaatctcagcccttagaggagaagttcacgaccccaatggatgctttgccatgtaagtgaaggagaatggcctaggttggctcccagaatagaattgttagagtaatatctacattttagaagctggcttaacaatgatgtaggcatttcgaaaattctccatgcttgcttggccaagagtgcctggttataatgaacgaaagatcgaaaacccattccaccttcaaatttcgacttacaaagcaatttctatcttttccaatgaattttggagccatctttgtttgaaccccaccaaaaattagccatcatgctttccaa

SEQ ID NO: 309301 - DNA, 1721 bp, Cannabis indica
tcaataaatgtgagaaaatacctggctccacctcttgaacatgttctagatggtccccataaatctgagtgtagatagtccaaaattgatttggatttatgtttccctactccaaatttcaccttgattgctttgctaagaacacaatgctcacaaagccttatagggttgacatgaatttgtccaagaacacctttcttgcctagtatcttcaaaccaccataactaacatggccaagccttctgtgccatactaaggtctgatcctctccatcaattgcaacaacattagcttgacttttctttgtggtcccttgtaagacatagttaccattaacaatcttgcctttcatgataattacaaaacctttcatacccttcaaagtgccatttttaatcttgacattgaaaccatcttggtctaacatggacatagaaattaaatttctcttaatatttggtacatgcctgaactgtttcaactcaacaaattttccatcttccagttccaacttcccaataccagcaattacacaagctctattgtctcccaatttgacagttctactttgaacatttttgtagggcagatgtgagatgaacatccagaatctatgatccattccacttctgacttgttctttgagatggctaacacactggtaatgtcatatccatcaatgtcttctgcatctgaaacaatgtctgcatttccatctttcatgaatttgtaatccttcaagatttgacgatcattcttcaggtgagatggtttattgcagatgaaccatctcctttgaaactggatttcgatttacctttccctatgttgttttggtcgttgttctccttcttggagcctttttctcaaattagtaatccatctccagtaccttcatcttgtttctctacttttctcttcaattcctttgacattaatgcatttggacttcatctaatgtcaatgaatccttaccatacatcatggtatccacaaagtgttcataattctctgtgagaagagaatttagcacaatgatggcccaatcctcatccttaacttttattctaatgttctccaagttgaggatcaccttattgaaatcatcaagatgatcttcaatttcttttcctggcatcatcttaaaagagtacagtttttgcttaagaaacaatctatttgccaacgattttttcatgtaaagactttccagtttcaatcatatttctgcagctgagtcttccatcgacacttaccttagaactttgtcaccaagactcagaattatagcattatgtgctttctcgagaatctctgttttctctttctgggtgagacctttagacatacccttctcttccggcaaagttgattgcagaccttgttgaactatcaaagttctcatttttacacgccctaaaccaaaatcatttttccttgtaaactttcaagatcgaacttcgaattttctattttcttgcttgatcaccaaaatcttgaactttcgagccaaaacaagattcctcatcgatctcttatgatctgataccacctgttaaaatttgagctcaatcccacatgtgaggaatggctccaagaacaattcgagaacactcacaactcaaagaacataagcacagacacacaaacacaaggcaaaacctttctgatgaaattatatgtttattgtgctgagtatttgttggaattaattttacca

SEQ ID NO: 309302 - DNA, 2581 bp, Cannabis indica
tgtccataccaacccgacaaaaaatataactgaataacttaactaaaaattcaaaccacctaataaatataataaacgagttaaatattattttaatctgatcaaataactcgaataaactcatttatacatttttactaaaattatgtataatataatatataaattacgtttaatagttaaagtatattttacatttaaagttttgtattttatagtgtttaatttgaaatttggattttatagtgtttaattttgattgtatttgaatattgaagttaaaatttagaatttacacataaatatgcttttttcttaatttttttaaagaatattgttgaatactttaatgtttattcaatttatttgaaaaccaaaaactactattaaaaactactaaaaataaaaaaataaataaaaaataaagatcagtttggacgggttaaactctttttatatttttattcgacgggttacaattagatatttgtaactcaatatttatattgggttggtaaaatacaatataatctgaccaaatcgaccgacatacacctttataaattagagaaaataactctcgttgttgggattgggtgagatttatttggaatctcatttagtatgggatgaatgaaaaagtaatttttttgtatgcgtctattattgtggatattatttggagagtcaagaatgataagatccacaataacgtttcacctactattccccatcgtcagaagggagtcaatgataattgttgcgatagctagaaaccaaacttacaaaacttttgtggattgaagccaaaaagctccattcttagaagcccattgtgggggaagcaactgcatgtgggatgaagatggagcaggtaataggcggggagtgctccacccattctcgtttattattttaatacccatccccacctcaattcttgttaattattttaatacctatccttaacccactttgcatattttccatcgaaattcgggcgaggaatctccattaaggtgggttatccccttttaagtaggaaattctctctccattagaggtgggtacctgcaagccctgtacccaagggtaagattttcatccacaactgcatgttgtctcgctatcaaaaatgtgaaacttatgttattgtggaagtgattcacaatcaattcatgatgctcttatagacattgaacctaggtggtgtattgctaattatatttatactaatgattgtaagagactttcttctgtaggagtgtaaatggatcggatcggatctaatccaactatgatttaacctgatccagattatgtaaggatccaccatgtcttgccttcctagatcagatacttagattagatcggatcagatctgacctgacttatttaaatcatctaatttgatatgttctgacccgacctttttttttaagaattttaattttatatctaaactttcatttttatattcattttaatttttattagtattatttaatacaatactatgtttggtattaacttgtattaataaattgagtccaagactgggtctcgggtctaagtccagatcccagttttgagcctggggccaagtctcaagtcccgagtctgagtctggtctcaggtctaggtctgatctcgggtctaggttcgggtcttgtcctaggtcagggtcctgagtttgggtctgggtctaggtccgtgtgtccaggtctaggtgcgggtctggtcccgggttcacgtttaggtctcgaaacccaattatgggtccggtcttgggtttgcgtcagggttcgagcttgggtcccgggcttgggtctcgggttcgggtcttgggtctcagggggtctgggttcgggtctagagtcagagtcttgcattaagttctttttttaaaatattgaaatcggatcggatcatattcgatccgaaaaaaaaattaggtgaggaggagcaaatctgatctgaaattcaataagtatctgaatgtttcgaatcaaaagtgacccgttggatcaaagctccacccgctctaactaaatggatccttttgacatgcttacttttgggatgtaatttctcttgaatttctagagatcattaattaactttattgccaataatgttgtcaaatgggcattggcattcaacaattctaaaactattgagggctccttagttaatgaccttatggtcttttatcttttagttataactaatttttcctaaaaaaaaaaaagttagtccttaaatttttaacttattcgtgtggggaaggatggagccaactgcaagtaaaaggcaacttcaatttaatcttaatgaaatcaaagctgaatgagaattagtccattattatttgttataacataaataataaattttatttgtagcaaaattaagaaattaatttttgagatttaaatccacacgtgtgaggcttagccctatatgtgtaggtgtcatataaaagcctttaatttttatttgattattttttataatatatattaaattaaaaagtaataattatcttttattatttggattaaatatattataggataat

SEQ ID NO: 309303 - DNA, 1405 bp, Cannabis indica
aaatcacgtaatacgcctaattagttagggtgttacaatcatccactgtcttagaagagcagtcacctttacctgtgactcagagaactcctcattctcatgatcattctagtgaaagtgaatcttctatgttgatgtctagtctaggcctactgagtagcaaaaagagttatgttgctattgtgcatcgtgaattttgcagacaaaataaagagtatggtggaaatacaaggaatgaagttgagcaatacttcttagacccaattgaaccaatggtgcaaggggtctgtttgattttttaaaatggtggttcgtaaattcatcacaatatccaatcctgtcaagcattgcttgtgatattttagcgattcctgtcaccactgtagcttctaagacaactttctccatggggtcagattttagatccttttaggacttcattgagttcgtgacagttgaagttctaatattcttgaaaaattggtggagtagatcacatcaatccatcattgtgaaagagtgctatgatgatctagatctagatgaggccgagctacagccagaagatatttttgaaaacaatattttattacactttagtttagttttctaataataattcaatttacaatcacttttatactaatgtttaactttaattgactagttgtagagaagatcgataatagaggtggtgcagcagctgctggtactactactagctcacaaggctcagcttctatctccaccacgcactttagtactactttgacatctttatcctattctacaacaagactttaatttttgactttgttagacaatttagtttgatttgtttatgtgtttcttgcttagttttagtttggactttgatcatatcaaactttgatagtttgatattttgatttgattatatgtttgttgtttattttgtttagactttgtttggactatggattttattttttggactatggattttggtttgttttggagtatggactttgtttttttgaattatattaacttcttagaaattttaataagtttagaagtagttaataataagcagtaatgattttttataatatagaagttacaaatattgtattgtaaaatgccaaaataacagtttttttaaaaaaaaaattgaaaggttgctgaaatttgagtacttttatgaagaaaaaaaatgtatatttttcaaaaagagtcccaacccgaaacccggtcccaacccactcggacccggaccaaccagcacctaacccacccgaatgcgaaacttgaaaacccagtcacacaaactgtcagatttaggtggcgtttggtaacacttttttaatcaattttttgtttttaaaattgaaaaagtgaaaatattttttaaaaacatgttcta

SEQ ID NO: 309304 - DNA, 793 bp, Cannabis indica
aacccgctgttcataggagtattctgagtttttgcattctgcatttcggctttggtgagtaagtcttggagatattttgtttgtgtgaggtgaaggccctgctttgtttttgttacttggatgcctaagaaataatccacttgcccgaggtctttaagagtgaatgttgcatttagactagaaatggtggaggtaaccacattgtcattgctggccattattaatatatcatttacatacaccagtatgtagatggagtatgttgttgtggctttgatgaatagagagtgatcggctttggatgagtgaaaccccatggagattaaggcagtggagagtttctcaaaccaagctcgaggagcttgtttaaggccataaatggccttgttgagcttacaaacatagtcgggatgctcttcactaacaaaaccaggtggttgttgcatgtagatttcttcttgaagctctccattcaagaaggcattgttgacatccaattgccttattgaccaacctcgggtgacagctatggttaagacaactcgaattgtgattggtttgacaacagggctaaatgtttcatcaaaatcaaacccagcttgttggtgaaacccctttgctactaaccttgctttgaatctttcaatggagccatctttgttgtatttgactcttagaacccatttgcatccaatgggctttcggttgggaggaggtttgactaaaatccaagtgttgttattagtgagagccttgaattcttgagtcattgcaccattccatttgggcattt

SEQ ID NO: 309305 - DNA, 1157 bp, Cannabis indica
acatacttattagtaaatctagcaccacatggtaaaatataatccaacacttctatccttatctctctatggctactaatacttcttttaatgaaattgcttataatatttatactaacatgaacaaaaaggatgtggaaatttttctttgtatctcttggtttatctggcacaacgagaataaggagattaaacttaaaagaacggaccagcctcatgctattcccaccatggtaaaaaactacttggcagagtacaaaataagaacaaccactcacaacatagcagatccagaacttccagaggttcctccatccaattggtcctcccccccccccccaccaggtcttctcaagctcaacgctgatgcaacatgctcgcaatcaaatcatacttcaagttttggtggtgtaattcgtaatagcgaaggtggagttgtagtagcaatcgcttttccctacaaaagaggtggagaagctgcaaccctcgaagcaaagtccatcctcaaagcactcatttggtgtattgaagaatctttccctatctctcaaatagaaactgaatgcaaaaggatcactgacgccttagcaaccaacaaagaagacatctccccctttgaagatattatcacgcaaattaacacgactttatctcacttccctaatggcgcagtctctcatgttaaacgtacgacaaacacctttgcccataagctcacaaagttagctttagggctagatgaatctacaatatagattggcgatgacccctgcaatcttgagtctctcctcttcccataagggcatcccttctctaaaaaaaatatatattcaatgatatttttatttattatttattttaagctaattagtaatttttcccctgaactttgacatgtactaaatcgtgccccctgaacttttttggccgttaaaaatttcccccaaactattgagattgttaaatttaaggactttgtctaattttagtaaaaaattctaacatggatgaaagttcaaggagcatgttttagtacatatcaaagtttaaggggcatgatttggtagatatcaaagtctcgggagtatggtttagtacataaacaatcacggaaacagtaaaattgaatgaaattagacaaaagtccttaaatttaa

SEQ ID NO: 309306 - DNA, 581 bp, Cannabis indica
acccagaccaagacccgaactcgaactcgggaccctaacctggacgcgaaccctagacctagactccgaactgtacccgaatccaaacctggactcgggacccgatcccgagacccaagactcagactcagacccagtcccgagccccagcccgaacccgggcccgcactcaagacacgagacccggactcagacccgtagttggtgttagggtcgagcgtattgaaaatatattataaatttacacaatctattaatacaagtcaatactaagtatactaagtatagtattgtattaaatagtactaatacaatacaatataatacgccatatcaaacgagccctaaaatatcacacctaataaaaatattttgcttcacatattatcaccaaaaaattaatggtggtaccgtagattctaaacataatactattagggtgcgtttggaaagccacaatgtaattggatttgtgtgtaattggaggtaattacacaatttggcatgtttgtctgaccatgtaattacactgtaactgtgtaattggaagtaattgaggggttccaattacactctccaat

SEQ ID NO: 309307 - DNA, 2560 bp, Cannabis indica
tcatcccgatgggaaaagtaaggattctcgtcaccctgtgtcctaacaccctgcaaaacaccttcaaatattgcacctttgtcgcagtggactgccccactgcctacaatgacatcctcggtcggccgaccctagtcgattttagagcaatttcctccattcgacattatgccttaagttccctacttgggagtccggagtaggaacagtgagggggaaccaaggagaagcgagacaatgttataacgctgcagtacgtctgtcaattctaatggtacgaaaggatgaagagcctatggcagcagaacaagacgagttggatccccgtgttggatccgagataactttagaacctatggaggatgtcgaggaagtgagggtgtgcgacctcatctcgaccaaaattatccgccttggaaaaaatctagaaccggaggagcggagtaagattatagacgcgttaaagatagctacaaatgtctttacatggtgccaaggggacatgaccggagtaatcccccatgtaatcacccatgtcttgaatgtcaacccagatatgcctccggtacaacaaaaaagacgtccccttgaccccgtgaaggccgatgccttggaaaaagaggtggataagttactatccaatggtcttatccgggacgtgtattactcagagtggctggctaatcaggtgttggtacctaaaccaaataggacttggtgagtctgcatagacttcactgatcttaacaaagcttgtccgaaggactgcttcccgttgccctggattgaccagatggtagacgccacctcgggtttcaagttgctatcctttatggatgcccacttcgggtacaatcaaattaaaatgcatgtcgtaaatcaagaatgtactagcttgaggaccgacaaggggatatactgctacctggtcatgcccttcggattaaagaacgccgaagcaacctacccacgcatggttaaccaaatgtttaaaggcctcttgggaaggaacatggaggtatacgtagacgacatgctggtcaaatctagaactttcatgggccatgcagatgacctcactaagttttttgaagtagttcagggatatgggatgaaacgtaatccgaaaaaatgcacttttggcatcaaatcaggaaaatttctaggattcatcgtaagtcagcgtgggatagaggcgaaccctgaaaatatacaggccttgttgaacatgccttccccaaaaaaacacaaggatgtacaaagtttgaccgggaaggttgcttccctaagtcgattcatctcccgctcgactgacaaatgcatcccattctttaatattttgaagaaatgtcaaaaattcgaatggactggagaatgcgaggaggcattaagaaaattgaaagaacacatggccaaaccaccagtattgtcaaaactggttcacggagaagacttgttcgtgtatttagtcgtctccgagaatggcgtcagtgtggcactagttccgaaggaagaaaaagttcaacactcggtatactatgttagcaaacacatgataggggccgaagctcggtatcccttgatcgaaaaattagctttctgccttctgattgctttaagaaaactaaggccctacttacatgcccattccatcaaagtacttacgaaccacccactccggcaggtcctgcaaaaacttgaagatttaggaagactccttaagtgggccatggagttaagccagttcgacaacactatgttctgcgtatctctataaagggtcaagaactggcagacttcatcgtagagtgtaacgaaacggaggcccatgcagtacactagcccagaagatgccggcatggaaagtatacgtcaagggggagtctaatgaaagtggatctagtgtcaaaatagcaatgatatcaccgaatgggttatggatataggccactctatggttcacattcacagcttccaacaatgaagtcgaatatgaagccctaattgtagggttaagactggccaaggctgtaggagccaaaagagtagaagttttcagtgattccttgctagtggttaaccaagtgtcgggagaataccaaactcggggagaaaaatttgctgcttatgtggtagttgtcagggaattgctccatgaatttaaagaatacaaagtggagagaatcccatgagagaagaatgctcaggcaaactgcttagctaagttagtttcagacaacaagatagaaaggttgggggtggtacctgtcaagcaccttatggaaccaagtatcaaaaccaaagagacagtggctactaatgagtaagagtcgaactggatggaccccatcgttaggtacataacaaaaggagagttaccctaagagagggttgtatccagaaagttacaatatcaggctgatcaatacatgatgatggacaatgtcctttatcgaagagggctcagcatgcggtacttaaggtgtgtgtcggaccctgaagctagacggatcatgcaggaggtccatgaggggttttgtggagaccacaccggaggtcc

SEQ ID NO: 309308 - DNA, 596 bp, Cannabis indica
gtaaaaaaaaaatgtaacattttagttatttttgggtatttctaaaataatccctttaaaatttatgtattgatttttttttttaatgtgcatggattgataatgaatttaggaactaagtatatatataatgtatattacattaactaccattttaattagtagtatagggttgttcaaaaaaaaattagtagtataaggtgctttttttttttaatggaggatagagtgcttttcaaaaatgaactacaaatagattggggtgtatctatacaggggagagtcttcatgttagaatcagatactagaaaataattattgttaataaagagctgaagttggtaaagcatacattaataaataacaaaattataacattaaggtttgaatcaaaagaaaatgacttttaactaatctctccttggtaagaccatctctaactgttgtattactttaggtgtgataactgataggttagtctaagtatatttataaagtgtttagaggtgtatttcaattgattatattcattttgtgcaaaattatatttttttttttttttttacttatttcaggattaaatggtaaaattcata

SEQ ID NO: 309309 - DNA, 1672 bp, Cannabis indica
caaccccggcggagtagctttcgatgcggtgacttgagctcggccacccccgacgaagacccagaaaccctgacctactctctcttgcatccctcttcaccttctccttagatctgtctttttatccctcgctgctctcgagtccatgctaatgagcacctccagtgatgctcaactaaaatagagaccactacgggcctccttgactatttaaaccccaagactcttaggtccccctttatccattgctgtttagagagtctctagaactggagcttcttagctatagttcgacgacgcaaagtgttagcaaactaaatgattttcaaaaattggttcctctcgtaatgatcttctaaatccagaacctgtgctcggtcgtggcgatggttcatgggagatgaattggttgttgtgatgggatgaaatcagactcaaataagaagaagaagagggttctactgagaagggtagtggcatctatggaggtttcatatgggagaagaaagaggtaccaaaggagtttgatgaaaagggataattaggaattttgtttaaacaaaaattggagtcattgttttgattttagaaaaaataaaataaaacggggttttaaatttgtggtgatcattaatatgatgagataattctgatttgcttttcttatattattttatttttaaatatttatttacacgggccaatattataatatcatgtgtacattgtgtccatatagacaataccatatgtacacatgaagagataacctgacagttaactgccaaaaataaatgacaataccatatgtttaagacgaccctgatggaacctaatctaaaactcagcaaagacaaaggaatactactattagatccaacagcttatagaagctagattggaaaactcatatacttgaccattacaagaccagatatctcatatgttgtcaatcatctcaaccaattcttagcatgccctcgggtatcacactttcaagcaacacatcgtattcattgcaatacctcaaaagaactcctagacaagtcctgttcttcccctcaaacttgtccccaaatctgtcatcatatgtagaaacaagcctatctccatcaaatgttcaactttcattctttcctgatgcagattgggagagtttccaagatataagatgttcaatcttcagttattgtgtgctccttggtcagtcccttatttcttggaaatctaaaaaacaacaagtcgtttctcaatcttcagttgatggtgagtaccgagccatggcaaatgcaatctctaaagtcacttgggtacttactctcctcaaagactttgccatctctcataacaaacctgcttatctaaattgtgacaacactgcagaaatccacatcagtgagaactctgtctaccatgagcgcaccaaacacattgagatagattgtcacttcattaaggagaaggtttagcatggcaccctcaaacttattctccatttcagtcctagcataacttagttgatatatgttatcccattttttgcactatgacgtggcaacgcgtacgagtgacacgtgtccaacattctttgcacctgggcggagatgaatatcccgaacagacttcaagtaatacatctgcatgcacaatgtctatgtaaagaccgcttagt

SEQ ID NO: 309310 - DNA, 831 bp, Cannabis indica
ccatggtgaattaccagcctgtgaaccttaacttaccacctcaacacctctctgcccattccattactttcccgtcctttctgaatcttaatgctaacttcactggcccatttgttcccccacaatccacttttgtcatcatgatgcctacaccaatgaatcctaacaccacaaatattgccccctctttcactagacccaactttgatatctccatgagatcctctgcttttacctcatattctaccgattctcttattgtggctgatatctctgctagccaaatggacactctgtcctctgcccttactcttcttgtggctggttctggtagttccccctgttgatgactctactgtgagaactaacccttctcaggctcagcctgattctattgtccatgggaaaggattggcttctgcctctggtgtcaatcggccttctttccaaccttaacaagttgtggttgaacgttctgtgaggtctcaactcaaacgtgctcgctctggtgaaagggaagatgagtcttcccttgaagcagctgatttggaataggcgggtgatgctttgcacacccgcccagaaaaatgagtattttgagttggaatgcacgtgggttggggagtacacgtgcatttaggaggctctcccttttggttaaagagcactgcccaaatgtaattttttcgatgcaaacccttttgccaatgaaggttgttgataaggtcagagttgctttgggttatgataatggtgtagaagtccctagaaagtattttggtgggggactttttcttttgtggaaagcaactgtttatgtaaatattttat

SEQ ID NO: 309311 - DNA, 2159 bp, Cannabis indica
atgacaaatgtatagctataagttgttattaattatgttaccgaccatctaaaattataagaataatctcttaatagaagtttttttttaaaggaaacacatcttaattaccatgaggatgatactaattaatttagatgagctttgagaaaattaggataattttacaattaccattgaactcattaatttttgtggattgacctgtctacatactttctttgtgaaggattaagccaattatacttcagaatatgatatatattgcaggttttgaatagaagaattttgttatgacaattttcaacaagtcattgtaatttaagaattcggaaaaattcttagttgaatgatcttttgagatattttgagatttgtattttataccattttgttgtaacacttagcattagcaactaataagttgcctacctatcattttaaaagaatcaagttgaaccaaattttaaatcatctttgtaatgttttaataattaagaggtgaatgatctcttttataagataccaatgtgtgcacttttgaatttttaggtaaaataataatttttgagattttataaggtaatgatctctttaaaatttttgaatgatattctatcatttatattgattttagagatctcattgcaagtttatactattttatggttttaaaattttattactttttggtaacaaattaagtttaaaaattactttatttattattattagggtaaatgctattttggaccctgtgttttacaaaaattatcaaatggaccctctgttttgttaaatgacaaaatagaccctatattttcaaaaatagtaaaaataggactctgagcttaattttcaataattttatattttaatataaccaactttaagacaatttgtaacgcgaacagatacaaaaaatgtaactagttttgtcataacatctctagattagattattacaaagttttattttgacaaaatatcgattcatggtcttatttgtacaaatttagaaaatacaggatccattttatcatttagcaaaacagaaggtccaattagtaacttttacaaaacacaaggtctaaaatagtatttacccttattattatcattatatataaaacgattatttctatttttaataattacttcctaggaaataataattatttatcatatattaaataatatcttagatttaaatttaactttgagatttgaaacttaatatattattgcagtacgagatatttaaattatcaaatatctttatcatttaataattcaaatataattatatttgaatgacatataattgagatattaaatgataattatatatacaatgctcatttattggagtcccaaataagaatacttcaggtaactaatatatagtaatagctacgttttcgccaattgtcaacatatatttttgttgtagggttttctttaagattgtatacacatgcacataattcattaaacccaatacctcattatttttctcatacatagtaagtcctttttttttattcgtttatatatagatacatatatataatgtatatctctattatattaaatataactatgtaacagaaattgttctcatttttaaatattgtgattcaaatttgaacgacacatatttaaaaatattatttttattatttattttgaacttatatgtattattattatattaaatatggctatgtaataagaaaatattatttcttttcttaaacattgttattcaaattttaatatattgtacatttctaaaatatcttattactattactttttatacttatgtggctatgcaggagaaagttattttttttttaaaaaaaaaatattacgattcaaatttaaatatattgcgcatagcttaaaatatcttatgagtgaaaatagagttggagagaaatgcttagaaaatactttactattttgaatagtatctcataattacaatataaatgaggaaggtaatatatataggtagaaagttgagttagttagaaaaataactaactcgactgctacaacagaaaaataacggaaccaaagatggttcaagatgatgctgatcaggggtagtatcgtaatagccccctcaagctgtagtgtagatgttcgaa

SEQ ID NO: 309312 - DNA, 1084 bp, Cannabis indica
tgagtgagttatggtcgttttattgaaggcagttcaggtcccagcgcctatgttgacatctgacatcaacctagacgctgtatgagtgtaaaaacgtcgaaggggtgtcctttgagatgcctaagtgatagtttgacaccacttagttcatttataggttctggcaaagctggtcactagttctcagagatgtttctattttgtggaaatggaagactcaacatttttgatttttgagtgagtcaaaatttgccaaaaaattaaatttgtgagtttgattgttctaacttcatagatcattgtacttgtgaaaaactagataaacagtcgaaacacatcagatttggataagcaaaacccaacaaattaggccatttgtttacctgggcaatagaccctttaaatcgagcttttgggattctgttgttggtactttcaaggcttctgaacttgaggacgaggtctcccccctcagtttatgaccattatggattcaatggtcatattggatttgacatttgagcaattgaaggcagcgtcccaggttgattgtaaacctgggcgctgacggcctatttctaaggacttgtgtttgtagttttcttcccgagtttacttaaattttcgttattttttatgatgatagaagtgcttagagcactttttgctgaactgaattagaaacagcccaggttgacaaaatgttaacttgggcacttggcccagccctaggtgtcaacctaggcactcggtcccaattttaccactaataaagattaatagtaattttaattgttcttcgactcccaaataaaagaagtttataatagaatgtttctatatttatgaattaaatggatgaatttattcacggtttcttttctatccaccagtcactataaaaaatcttacttttagtcacaataaaattagtgactaaaagtaaaaaagttgtgactaattataaattattatttctatgttgtgactaaaaggtttgtgaccaaaagtattagtcacaaaaattacaatttgttatgactaaatgtatttttagtcacaatacttgttgtgactaaaacta

SEQ ID NO: 309313 - DNA, 1019 bp, Cannabis indica
gggccctaggcacgggcctagtccgcctaggcccagggccgaccctgactgatatggaggcttattttctctctttttagctaaattttaaagttaaagttattttaaatcagctgttgagagtgctctaaaattatgccccttttttcttttgaaataagcaacttcatgaaaaaagattacgccccttaatttttcttattattttaaaaataaaaattagaaaaaaatcctcaaaactttgaatataattaaaaatttacctatttggtggtgtttatcaaaaaattagtcctgataacatgtacatcgttttcgacacgtgacaagaatgaaaacattctatgagacctgcatccctgtcataacagtcgacctgaagttaggtccctaccccagcgcccaagttgatattctgtgccttaatatgcattagttttagtctcgaggtccttatttgtgtgctaacccctcaacctttccacttagacatatgaaagacatgtcgcaagtaagctacaagccacaaaaccaacattgtaacacttctagtttggagcaccaaggcacccagtgctcaagttgacattctcagtcaacctaggcgacacgacagctagggttagctttccgagaacttttttgcaccctgattcctcaaattcaataaggaacgatgctaggacttgaggctttacaaattgtgtcgagggggatcaaaccctaagatcaaggcccaggttgacatggtgtgtcaccagggcgctaggtcaccaacccaagttctccgagtaacaaccatgcaaatttgacgaaactgaatttctgtgagtactttccaccattaagaagatcaagctccaaaaagacagattctgtgtatcttcaacctggactcagcgcccaggttgacggttgacatgccccatgttggagtatattttaccaggattcagatttactattaagtatattgattaacatcctaaatatgaatctctaaaacaatagaattaaac

SEQ ID NO: 309314 - DNA, 1357 bp, Cannabis indica
aaataatttccaacacttagttcagttttgggttcaggtgccaagtccctattcgcgtttggattcagatttgggatgcaatcctagggtagatctatgtctgagtccgggtgctggtcctgttacagttttgggtttcggtctgggtccaggtcctggtcttattcctgggacccgatcaacttctagtttcagttctagtttcaagtcacctggtctgggatcgggttgagtttgggtccgagtttcggttcgggtgtttaatttcggtccaaggcgaggattaggtccgagtttcagtctttgttagggttcgaggttgggtcaagttccaggttcaagtctgggtcttgatctcggtcccgttctaatatcccagtccagttccagttcaagtttcggtttcggttcccgagtgtgggtctgggtctagatatgtgttcgggtccttgtttgagttcgagtttgggttcgggttcttgtctaagtcgaagatccaaacaccgactacaggtcagctccaagcatcgagtccccgatcccaagttctgaggtgggtcctaggtccaagtttgggtctagggtcgggtcccggatcccgatccaagttccgaggcccaagttctggtccctatttgggggcctaattccaaggtttgggtcccacatttatgttcaagtcttaggtcccgttctgggttgaagttcgtgtttctgttcgggtttgggtctcgagtcctggtctgagtccacatccctgtttgggttcaggtccgagttggggtccctatcctaaggtgggtccgagtttcgggtcccaggcctgtgtctggttcttagatccttgttccagcctcagttttcgggtttgggtttgggtcttattactgtcccaggtttgtgttctagtcccagacatggtccgatcatgtctggatctcggttttggatcctgtctggatctcggtctgggttcgagtctaggtcttggtacagattcgtgtaagggtcctagactcaaacactaactacggggctggtcgaagcctcaggtccaaattcagatctcggtcttggatcttggtcttgttctagttcaggtcccgtgtcctgggctgggtcctaagtttaggtttgggtacgggttcggggttgtgtctcggtagttaggtcttgggttccgggtctagggtcaggtctcgtgtctcgagtctagtagggttttaggtcttggtcctgattctgaggccaagtttcgagtttaagtcccccatctaggtccggatccttggtccaggtctgggtccaagtttgggtttggggcacaggtcccccatctaggtttggatcctaggtc

SEQ ID NO: 309315 - DNA, 1792 bp, Cannabis indica
tggttagaattggaaaaatgacatttttgagaaaataaggaaagattgttgtaaaataaaaaaattccaagtggggcccaaacatcctatggccgcccactagggaaaggaatttccatttaattttttattatttttaggatgttaaataacatatatggtagtaaatctagatcatggtaaaacatattccaacatatacttgttgaaaaataagaatcaagccctggataccttcatcgagtggagaaagcttctagaaaaccaaactggtaacaagctcaaagtactcaggacagacaatggcctggaaaactgctcaggagaattcaaggtgttttgtgcacaagagggaattttcaagcaaaaatagtggtgaacacaccacaacaaaatggcactgcagaaagaatgaataggacattgttaaagagagttagatgcatgcttgtaggtgctggtttggaaagaccattttggggagaagcccttaagattgcatgttatctaataaatagattcccttctatgccaaacaattttaagacacctcaagaggcgtggacaggaaagccacctaattttgagcacttaagagtgtttgattgcacaacctatgtgcatatcaaacaagataagttgaagccaagggctctaacgtgtctgtttttgggatatctagaggaagtcaagggctaaaaattatggtgccttgaaccaggacacacgaaatgcttgataagcagagatgttgtgtataaggaagaggaaattgctatgaagactaaggtcattcttgaaattgttcaaacaacactacaagaaggaaggcagattgaggtggaccaatcacatgacaactcttcacatttagaagatacaattgaggatgagagttgtcaaggtgatctaagtagctaccaactagcaagagatagagaaagaagagaaagtagaccattaaacaagtttggttatgctgactttattgcccatgcattgactgtagtagaggaaatggatagctctgaactaaccagctatcaagaagcaattaatgggaaagatggaacgacttggttacaagctatagatgaagagaagttatctctagtgaagaacaagacgtggataatggtcagaatactagagggatgcaaattggtaggctttaagtggattttcaagcacaaaaaaggaattcttggtgttgaacccaccagattcaaagcaaggttggttgcaaaggggtctacacataaagaatgtgtagatttcaatgagatattctcaccagtggtcaaacgagtctcaatcagggtaataatggccaaagctgctaaattcagcttagaagttgactaaatggatgtaagaactgctgtcttacatggaaaacttgaggagaaagtctacatgatggttccagaaggatttgacaaagaatattcagatcaagtttgcttactcaataaatcaccctatgggctcacaagctccaagacagtggaatctcatatttgactcctatatgatcaagataacattcatcaaaagtaagtatgatccttgtgtctattttaatgatcacatttacttattattatatgttgatgatatcctaataattggaaaggagagatcaaagttaaattgtaacgccctaatactaaggcacgctacagtgctttttttttttttttttttttttttcaattattgtgcaatctttgctaatcaaagaaatttctcgaaaaacgtgtcaaattaaaacttttgctttaaatattaa

SEQ ID NO: 309316 - DNA, 1520 bp, Cannabis indica
ttcatcaaatgatcaatgcgagaagaatgttcaaacatgtgtctcacatatgtcgtctcatcaccgtacaatgcgaggcatgactaaatacaggataaatgtgccctaataacaaatgagaagatatgtgaagacgagacgagtcattacaaagagcaagtatactacgagtcagagtgagacaaatctgcatagaagtttatctaagtgatttgcgagcagcactttacaagtgggtatctcgataaaataacctcgtataggatatggccaaataaacggttaatttagaaattatacatattatcaacatgttgtaattgtatgaaatgtggggattgtctatgtttcatgagcagttatttaaattcaaaagaaatagccgcaaatcccaaaaatcttgtaaacatggacaaaacctatggtgtaagggggaatcgggagagtacaaagatccttacgatcaatacttgtatgatattcgtactctgtataaacaaaaaaacctagaaataagatggacacgtggactatgaagatttaacttcaaaactacgtaaaacttctttgtctattatttacagtcattcttcagtattatttaattgtcaattaaggctcatttatttattaaaaaaaattgagttaacagtttggtacctttgagaattaaactcttaaaaaatgcatctccctccattaacgaaactttcatcatctcatgatcatggaaaatactccaaacgatgatcctgtagtaaacaagggggcaacatgccatcctcgatcggaaagagcctcaagtggaagcacccaagaagaccgaaatgcaggaagaggtcccactgaatgggatttcgaacgagattttaatgaagatgaaattccaaaaaaaggaatcacggtgcttacggtcaaagccactatgagccattggtggagttagaaaatcgtcaactttgtgaaagattggtcgagtactggagaaatgcaaaattagaaagcgaatcagctgtagtgagaacagcatagggaggcgcacctcctactcaaactggccagtccgcgagctgcccttgaggaaggcctcatgttgcgaaggctaggaaggcatcaggagcccctgtcagtgatgataattaaagtaacccaactgattcccaagaacgataactgtgacagtcagtagtttcaaggtctgttgggtacgaaggagtcttttcataatcatgttctagttgatgtgatgcaagagggttcaatggttactgagaatcaagctagtttcttgcagcagtgttacactaaagatgaagtcaaggctgtcctcttttcaattccggataataaggcccttggtcgagatagttatggtagtgctttctttaagcacactttggatataacaagcaaggactttgttaatgctattatgaaagagatcaatacaactatagtgacccttatgttggaatttattttaccaggatcttagatctactcacaagtatgttgtttaa

SEQ ID NO: 309317 - DNA, 772 bp, Cannabis indica
tttttatacatgtgtaaaatagagtgaagcccatataaatatttggctcttattataggcctagtctgatgtcccaccttcttggattggatttaatggtaatgttagaattggcgttgagttttgaaactccaacgggggctgggctgccacttaacaggagctgaaaaattcatcttagtgaggttagattctttgttgcaacaagtagaattagctgctgagaacttttccaaataatccataccccaatcaagagtcatcacaacagaaaaaaccttagatccatggactccagtattcaacctataccaaatttgccaaaggagcaccaaccatttttccaaatctgaaagctttacaacatggaaaactataaaaagggagtattagttggatattaataagtacaccaatctgaaatcttgtttatttttgtgaacatctcattgtcaattaggtaacaatagagaactaactaaaaaaaaaactaatgctgacaattcctaatagttattctgtttactgttattttccgtttattcctcttgttagttgggttagttaatgtcggtttatagttttttggtccttgtatatataggttctcttcatatactcttgtcattatttagatgaaatctatcacattcaaataaacaatttcactttctctgtttcgtgttactcaccatagcatcatcaacaagagttgtgagagaaagaacaaagcacattatgttagatttttatttgggcttacattaaattt

SEQ ID NO: 309318 - DNA, 2101 bp, Cannabis indica
aacaggaactacagtattgcatgcctactagaaagctccaaagagagagagaaagcttaattttcaattatctgtaaatatggttattaaatgtcaactaaaactgttactgtgtacacatgacataattttagtggcccaaattattttaataattttaatattataaaataatttagaaataataaataaataaaatatttattttcttttcttttaatcattagatttttatttttgaattaataaataaataaataatcaaaactgtaattctaaatcacaaatcattcatctttctcttctgctcttcactttctctctgaacagaacggttgacggcgccctcccatgactggtaatgaacccgatgtcgtccacccaagagctcgatcttcctcactctctctccatcatgtcgcccttaatcccccatcttccttactttctcttcatctttccacgaaaacacatacctgcataacacctgaagctaggctgcatgatccctaaagcacaaaaaacctagatgcaaaagagattcacgagtgagaaaaagagattcggaggttttcagaatttgaggattttgggtttctgaggttctttttttgagatttagatttgaatttttttgttctttattcagatctgaaattgtggtgtggtgtggtggtagtggtgatttttttttttattttatttgggtttttttttatgttatggcggtggcaatagtggtgtagtattgggataattgttgcgtgcggtggtagtagtaacggtggtgataatggtgtcggttatggtggtagttaggagtttacatcggtcagtttgtcgggttatagtgtatttttaccaacccaatatgaaggtggggttgtaaatttctaactataacttttccaatgaaaaaaatagaaaaagtgtaacccgaccaataatttttgtcagtttggtcgaattaactcatttaaaccgatctttattttttttatttttttcattattgttagtttttgatgttgaaataattaatttgaaaaaataaatatatagtatacgtatttcaagattaaaaggattataatttaaattaatattaaaaaataaatataaattgaataaatattaaagtattaaacaatatttttcaaaaaatagaataaaaaatatatactcatatgtaaattctaaatttcaaattcaatatttaaatacaattaaaattatcaaatataaattctaaatttcaaattaaacactataaaatataaactttaaaagtaaaatagtttaactattaaacgtaatttatatattatattatagataattttagcaaaaaatatgtaaatctatttattcggtttactcaggttatttaggcacgttagaataatattcaatctgctcaatatatttattgagcagtttaaatttttcgaaaagttattcgggttgtgtattttcggtttattcaatttggtttggacgatttctggttgggtggtttgtaatttttttaaacagctctagtggcagtggtggtggagtagtcatggtagtgattatggtcgatgatgatggaggtagtagtgctactgctagtgatagttagtgatggtgggagaagaaggaggaggggaggacgagaagggaaaaaattgagaattttttttttaaaaaaaaaaaaagaaaaataaataaagttattaacgttttattttttttaataaattattaaatgtactttatagtttgccacatgaatattaaatttgtcatgtaaaataattaggtaaataggactaatcacatttaaagaatggacagaataataaatttacaaataaaatgacactgaaaggagttttgtcactaaaaaataattgcaaaattttaagaaatttgaaaaagtttaacacgccgcaaaactatgttcaaacagtgtattgcacgcgtgactattttattttatatgcgtgtaaaatcaactgtttgaacattgttctctatattgtaaattattccgaatttctcaaaattgtatagcatatcttaaatagctataacatacatgaataatgaaaaaaaa

SEQ ID NO: 309319 - DNA, 800 bp, Cannabis indica
tttacggaattctatatagaaactcctattgcaactaatggatcaacttaaatcgcaatcaaaaatcgtatagcaacccacataaaaactaccagagaaactattttagaaactcaaaccgtaaattaaaaaaattgtatataagataattttgtgtttagggtttaggtaggaacacgtaagccaacccaatatgtaacatgtctatgactattgagatataaatgatgttaattttggtggtatatatggaactcagctcaccaaacaatactaatttattatgttgttgaacaagtagtgaatgcttaatataattcagtatgatcatataaagtaatgataattaaattaatttgtgtacttacgttatagatggacagaaatggaagagggcaaggtccacacacagatgaaatcactactatcttccctttgcttcttttcaagtgtggaattgcaaagtgaatgctgttaattgtaccccataaattaacatcctataccataaataaacttaaaataattattcctctacgttttgaagaaaaccattatgtgacaatataaataaaattattaccataatagatttgtaattacaaatgtcatcaatatcttcaaactttctcagtattattatcccagcattgttcaccagatgatccactgcttgtatcataatccaaacacattaaaattcaattgaaaccttaaggattgcaaagaataaagaaaaaagttaattaagattttttttcttaaagtttgaacttttaaggtcgttaaaaatactacct

SEQ ID NO: 309320 - DNA, 859 bp, Cannabis indica
aacattaagtacttatgccgctaaaaataaacattaggtttatgtcacttacaaacataaaactttaggtacttataccgctatttaccttaattatttttgtttttttattcaaaaactattttttactaagtcttgaggttgttttctttttctctattttcaaagtttgaagctttagttattattactattcattttgtttattttacttatgatttaactagtataaacagaatgtttatcgcatgcggttatttataataattttaaattttatatataaatttaattgaataataaaattattttaaataattttaaatttatttttatataatttttcaataaatctctaaagaaatttaaaaaaaaaaatcatcatagaagaaagtacatacaaaaatatatttaaatatacgttatagtgataaaaaattacaagttgagcaattctcacacaaattagacatctataacaaaaagatgagaataaatttatagaatactcaccatataattttaaaacaactgttatcaccgtgaaatctctggtatttttatgtacagatttttgaattcaaagttttaatatggggattagatgaaagtcatttgataggattactctatacttttatgtgtgaagctagtataatgttcaagtagaaaacatatttatttacaactgaatatttgaatatatctgtttcatttctaaattgattaacttttagttatgtatgagttgtgaatatgagagccttaaatagtgataagttcttttacttaaggatggtgtaaagaccgcttagtttaatttagaaattagcagttaatcatgtttaattatgaaaat

SEQ ID NO: 309321 - DNA, 1404 bp, Cannabis indica
gatatcttatatctaatatttatatgctttaatcacaattaattttttattgtgaataaagattacatttaatcattaaaaatttatgttgtgactaaaatgttcataaaaaacaacaactttgggtgtccttttttttttgtgttaggagataataactttgttgataaatgcagttttgtaaactaatcattgaagatattatagagaaatactaaaaggcactagtgtttagcatcctcttatgtgttaatattgctattgtttaaataagtatcgggtcctatatagtttaatataataatttttaaagagtatcgttagtcaatcacaaggcgacatatatatctagaggtgcaaggcagcactggtgctctatattataaggtgttcattgaaatttaaatcttataatatatgttgtatatccgagaaggcatgcctaattaagagtaattaattagaaggcgatcgatcacacaagatgaatgaacaccaaaatcattaatggttgtttttcttttattatgattcagggagaaagtaaagtccaccaatatgggcgcacttttggagaagcgaggaaaagagtttttgggagtcaagtataaggatcccatttcaagcttttctcatttccaagaattttctgtaagaaaccctgaggtaataataataactatttattattttatttgagggtggtttttatgttaattatttgtaattaatggttaatattatataatgttaggtgtattggagaacattactaatggatgagatgaagataagtttttcaaaggatccagaatgtatattgcgtagagatgatattaataatccagggggtagtgaatggcttccaggaggttatcttaactcagcaaagaattgtttgaatgtaaatagttacaagaaattgaatgatacaatgattgtatggcgtgatgaaggaaatgatgatttgcctctaaacaaattgacacttgaccaattgcgtaaacgtgtttggtatatatatacattgaatttactttaaatctttctgtttttacatataacaagaattcatatagttaatttggatattgaaactatgtatggtaattaatttgaaggttagttggttatgcacttgaagaaatgggtttggagaagggttgtgcaattgcaattgatatgccaatgcatgtggatgctgtggttatctatctagctattgttcttgcgggatatgtagttgtttctattgctgatagtttttctgctcctgaaatatcaacaagacttcgactatcaaaagcaaaagccatttttacacaggtatatacatataaatatatggagaacgttttaatagttacattaaatatatcatggttacatttatttttagtcgtt

SEQ ID NO: 309322 - DNA, 637 bp, Cannabis indica
atttttttttttttttttagaaccctaatttcgaatttcgaattttgaatcacaatgctctgataccatgtagaaaatagtgattcgaattgtatgtatatttcatagaatagtacatatttatatacaaagctaggagactaggaaataggaaactaccaacaaaataggaaactactaaatacaagttaccctaattcttttacacctaatatacagctaattcttgactgtcgccatcttttgcatatgatattattattcatgactgtcgccatcttttggcttctcttagatatgtgtctatttgttatgtaaaacggtctgctaacgtagtcgctcattggcttgcaagagcgtcttgttatctccttgaccgtattattagagaggacaattgtccctcttatttgttgtcgttattggttggtgattgtctcttttaataaaagtttcactcttccttccaaaaaaaaaaaatctaaaacaattagttcaatgtttaaaatcattaagtaagatgatcttcaaactgcataaattagataatctcttgaatcaaactaaattattgaatttattctgcagaacttacggtgtttataaaattaccgatccaattcaatttgcacaatcc

SEQ ID NO: 309323 - DNA, 2822 bp, Cannabis indica
aaacctagttcttgtcccaaaaccaaacagcacctggaaaacttgtatcaattttttcagacttgaataaggcatgtcaaaaatatcgtttcccactacctagtatcaaccagttagtggatgcaacagcaggacatgagctaatgacatttatgaatgcatattttggatataaccagatcaaaatgcatatccctgatcaagaacatacaagttttgtaacgaatatgggactttattgttataaagtcatgccatttggtttaaagaatgctagagcgacgtatcaacgactaatgaatggtatgttcgggaatgagatcagatgaaatatggaagtctatgtcgatgatatgatggtgaagttgataaaaagtgaagatcacactaaggacctcgcagatgctttaagatactcagaaagtttaatatgaagcttaatttaaagaaatgctcttttggggctttcttgggaaaatttcttggtttcatagtaaatgcgagaagaattgaagctaacctagaaaaaattaaggccctagtcgagatgccctcaccaataaagcctaaagaagcttaagctttgacagaaagaatggcggcatcaaatagattcatctcgaaatcaacagataaatgccttccattctttaatgttttacgaggcaataagaaatttgaatggtatgcaacgaagcttttaaaggcataaagaagcatctatcaacacctctaaagaaactttatacctttattttactgtcttggagcatgcaatcagtgcagccttagtgcgagaagagggaaaacaccagtaacttgtttactatgttagtaaaaggttattgggggacagaattaagatatccccctcttaaaaaactttcattatgcctgattcatgcatcttgcaaattacggccatatttctaggtacatctaatcaaagtcctgataggtcaactactaaaaccagtttaatcaaaacttgatgcttcagaaagattgataaaatgttcgatcaagttgggacaatttgatataacctaccaccagagagcatcaatcaaaggtcaagctttggtcaagtttctaattgaagggataatctcagaagaagacccagttgttaagcacgatgcataaacttggaaattatatgtagatggggcatcaaatgagaatggctaggggcagggttcataatgatgttgcctgaaaactcaaaattccactatgcattgagatttcaacttgatacttcaaacaacgaggcagaatatgacgccttgttggctggattgagaatagctgagacattgaaggttaaaaaccttctatgctttggtgactcacaaataattataaatcaagtcttgggagaatcctaagcaaaattcttgaaaatgacaaaatatttagagaaggttcaaaaacttggaaaagtttaattattttaaaattgaacaaatcccaagagaacaaaactctaatttcgatgcactagcaaaattggcatcgcaatccaaactcgacaagttgaatttggtaccagctgaattcttaagcgacccaagtgtgaaaaggaagaagttgagatagtagatacttcaccaacatggatgacacctatagtcaagtacctgctccacagagaacaacttgcggacaaagctgaggacgcaaactcttgtactcaatacgtgactatacaatagccaaagctaaattgtacagaagaggttattctatgcctctcttacgatgtgtgttaccagcagaaggcaacgaaataatcaaggaaattcatgagggcttttgtggataccatgcaaggttgcaaagtttgtcaaagaaaattatctctcaaggatactattagccaacaattaacaaagacacagatgaatttgttaaaaagatgcgataaatgtcaaagattttcacatatacatcgcataccaccagcaaagttgagaatgatgacctcgcaatataaggcattgacctgattggggaattacccacagggcaaggaggggaaaaatacgcagtggtagctaacttcttcacaaaatggacagaggataaacctctagtttccataatttgcaaaagagttctcgattttgttatcaagaacatcttttgtagatttgaaataccaatcaaaatagtgtctcataacggaactcagtttgatggcgagttattcattgaattctgttaaaggaataagattattaaaagcttctcatcagtatcgagacctcaagaaaacgaacaagtagaagttgttaataaaatcttaaaatatactattaagaagaaactggatgctgctaaaggaagatgggtagacagactaccacaagtgtgttgggcccacaaaacaacagagaaaatagcaacatgatacactccattctctttagcattcaacttggaagcaatgttaccagtagaagttaacattgcgacccacaaatgtgaattctataatcaagaataaaaccaagaactgttgaatctttccttggatgtaacgccctaaataattagacacgcttcccaataaacttatgaaaccctaatcccctaattgggattactagaaaaataaccccggaaattaaactttattaataaacggaatgaaaataacttgtaataatttaaaccttataatttaaaagttacaaaagttgggatcccaaaagtatttacaaaacactattacaagttcttttcctttggccgacctaagcggcaaaataaagtctcaaaatacatcactggtagaccctgttggaaattatttt

SEQ ID NO: 309324 - DNA, 1223 bp, Cannabis indica
aaataatttcataattaatcaccattaactgataatttccaaattaactaagcgggctttacaaaaatgacatatgatttaggaccttaatgatctgagaagagttagggttgatttgataatctgttatcatcaaaaaggagataataataattaacattaacaagtagagaaactaaatgaacaaaattcttattcctaaacattcatccataattaattacactttttattgctatttttcgtgcttttaactttttcagttatttaattcttcaatcttctattcgattttaccaaatagaaacacaaatctaatttagtggtacttaataacaatttcttgtggttcgacctcacctgcgtgagtttaaaattacaatagattatgtatacttgcgtaactgctcataatttgtttgacaagtttttggcgtcattgccggggaattgattagatattgatattataaaaattagatcaaattctactttagttaattctttctacttattgctaatctgcttcttttcaatttttcttactctatttcagccactgggagtgcatgcaacgtttgggacaaagtttcatattgcccattgactgtgaaattgagcaaacttgtagaaaaaatagaagaaacaaaaggcaagaaaggagttcagctagggctgaagcagaagtagtcagggctaacaatgttaatggcggtaacaacggtaacaatggaggtgtcgtagaagaccaggcaaacggtcataatccacctgaccgtagcctgagggactatattcttccaactttgatgggggtttagtcttctataagaccacccgccgtagaagccaataattttgagataaaaccagccatactccaaagtgtgtagtcctcagtttagtttggttgactaccctctgaagacccaaatctacatttatctaactttgtggagttatctcagacattcaaagtaaatggagttagtgacgatgccatccgcctgagactatttccattctcgctgagggagcgagccaagagcttgttggtgtccttgcctcccaactccattgttacatggaccaacttggcaacgaaattcttgtcaaagttttttcctctaactaaagctgccaagctgcgaggagatattaataattttttcaactggacaatgaatctctctatgaagcttgggagagtttcaaggatctca

SEQ ID NO: 309325 - DNA, 740 bp, Cannabis indica
tatattaggtaagatatatttatggagggatgatggagattattattattattattattattattattattattattataagaatgggttttttattacacatatttatattttaaagtaattctatatatagtactcgtttaaagagttgtttcaatattcaagtaacgattctttgtaaatttttttaaaaaattaagataatttataatatcgaaaataatatttaaatattttgttgcatgtgtaactgttatacacgtacggtaaattattaattttttttttaaaaatttacgtgtggtacaaaataaatacaacatatgccatcataaaaataaaaattagattataatttttttaaaataaaatgttatataaatttgttatatattttataatatattatacatacataatataatgaaagctacaggggtggcgccagtgggctcgtaatgtaataatagtgctcagtgatgttgtcaacacgcatgcagtcctcctctcccatatgtatatatatggtgtggaatataatggaagtgaaaactaatttgaaattatcgtcttgtttacatttgaccatgtatatatatttatatatatatatatatatattatagtaagaaaaatttaaaggacaataaactaaatcatcacttggatagacttctcatcaacatggatatatatatatatatatatatatttataagtaaatagttaaaaggtaacgt

SEQ ID NO: 309326 - DNA, 948 bp, Cannabis indica
gatcaacatcgtacggttgtctttcacgcgagaaggagaaggatcagttggtgtagtgtattattaatttgtgaataaattaattaatcattttataaagtcaatttatttattattattattattattattattattattattattattattattattatatttattttgtgaatctctggagacgtcattctccgcgttttagagtatactctggtgttgagtacagcaagaagtatttttaaattaatcatctaattttaaattaaacttatatgataatattatatactctaattaatatatataattatattaatttcaaagaatattcaatatactatgacagttagtcacacgagtgcatgcagttttatattaattatatatattattgtattataatatataaaactatatgtatatattaattatatacattattgtattttagtatattttaaatctatatattttttcatgccgattttgttagctgatcaggggatgtattttgtttaattactccacaataatcagattaatatttagtgatatcaaattatttattaatcattagaaatataaatacatcaaataaagtctaaaatacattacatgtaatatatagataaaacaattgcagttatatatatatgtaatatataataaggagattatgatcaatatatatataatttttcctacaaaaaagttaaaatataaaattgattatctatatataaaaataaagatattcatttgagcacaaaatatattacaaaaaaactgttacattggtgacaattttttaataacaacataattttttttgtgacttttattagtcacacactactacaagaaacggccttttatcccggtttttaaggctttttatcccagttttcgctaaaatgaaaaccgggatgtatgccagtgggataa

SEQ ID NO: 309327 - DNA, 2673 bp, Cannabis indica
caagaagtttgatacacaatgccatctagagcaagtgaatcgacaaatttggttgaagtatactcaccaccttgattatatctaaaacatttaataacaacactatgttgagttcttatataagctcgaaaacgatcataaatactataaaagtcaaaacgatatttcataagaaaaatttaataaaaacaagtatgatcatcaataaaagaaacatagtattgagaaccccatttgtaacaaccggagaggtccccacaaatcaaagtgtactaaatcaacagtgcaactgaacaagatgcaattctattgaaaggcaaagcagaaaattttgcaagtttatattcactacaattagaaatatcatgaggttgccaatttctgaaggttctgttagaagttaaaatctttaaacgagactttgaaacatgaccaaggcgagagtgccatatataaaaactaaaagacagatcaacactaggagctgcaaatactggtaatcttagttcatccaaaacatgtaaatccccccgcttgcagtcgatcccaatcagcttctgagattgtggattctgcacatgacaagaagtagaagaaaaagatacaaagtaactagaatcacacaattgaccaacaaagattcaatgaaagatttggaatatgataaacattaagaagcgacaaatatgaattgacaacaaaaccaatgccagctaatgttatgggagtaccatcagcattcaggcacagatgatgtaggactcaaagaaataaaggatgcataatgtagagacatatggtgtgaagcaccagggtccaaaatccatgtagaaggtgacataccggacgtgttagtgggtggttggcctaccaaagaagagacatatatgacattatattgagtcgcaaggagcttttgaaattgttctaacaaagcaaaaaaattgtaagagccagatggaggaacagttgtagcagtactaaattgtggaggtcgaatttgattgttaaactgtggttggttatccatacgaggagttttggactggtatctctattgttgtagagcacgatttgtaagcttaggacattgagctttccaatgacctttttgtttgtaaaagctacactctctaataccaacctttgtgtgaggtttgttctcttgtgaaggaaacgatgtagtaggagggactgccaaaacagaagaattgagggttgaaagaatgcctttcactgactaagtcttgagacgtatattatctgctaacagttcactgactactaaatcaaccgaaggaagcagagagcgatgcaatatagaatcacgaagtctctcaaaatcactaggaagagccattaaaaattgtactaatcgttgttcctctctacgagcaatatacggtgtaaaagcacgtagcttttctgattcggtgagtgccaattgatccaaaagatctgtcattgcagaatagaaatcttgaatgcttatatctttctgttagataactctaatatcagtttccaactgaaactactttgcaaaattagaccgtgtatacagtctcgcaaaatggttcctaacttcttttgctgtctcgtactttgctaacttggtaccaagagattgtgatagagttatctatctaggtgagattttcgaattgtctacttcccaattttctaacagatttgcattaacatttgctggtttcctctttgttccagaaatataaccccacatcttttttcctttcaaaaattttttataacataatttcagtacgaataattctttccatccaatctcacactgattgcttgaagggaatcatctttattggtagccattgcagaaataaacaaattgcaaaaatttccaaatagagaactgatgaaaattcaaaattgtactgcgaaaatcaatacccaaaactgttatgcgaatcaagaaaaaactcaaagaaatcaataccgaaaactagactgtcgaactgtacagatgctgtacaaacactgattgtacgcctaggaaaacttaagaaattctctcaataattattttaaaagaataattaataaaaaataaagagatgtagaaaaattagggttttattcaattgcaaagtcaaaagtaaaagaatcaactaataagaaagccttatgtaggcaactaacataaaaatttaaaataactctaaataattatttaacataaacttcactcactaccatagttttaaaatcggtcgaggcgtacgcctcaactgctgtcattggggcatacacctcacactgatgaggcagactcgaggcacatgctctgaggtgatgcgtattgaggcgtacgcctcaacaatgggcccttttttttgtgtgtgtgtgtgtgagggctgttcttttgtgggctgatttgggctattttttaaagcttttcaaacagctactctcatacttttacatgactctattgaactttagtctgggtcttttcttattaggtttttattagaaaagatttgaaaatatacccctgaaaaccctaaccctctgatattgatctatcatctctctccttctcagccaaatccctccctccttagtcctcatcactccatacatttagaactttcactatttttcaattgaattttgaaccttttatgaatttag

SEQ ID NO: 309328 - DNA, 1493 bp, Cannabis indica
gtgatacactctcttttcttattgatttttctttctttcttcataatttattttccttgtttatgtttctctatctacattattttgttgtttggaaaatttaattttgtttgtcagaataactctagggctaggaaaatttttagtttatatgattcgttgattttcttgggttgagcttgcgttcttttttttttagaaactaggattttattagttacaaatatgtctcaatttgttccaaaatcacaatctcaaaattcttaaaattattttgtccttaaatttctgccgtcaaattcaaacttgaaacacatataccccaaaccattcttaaaataaatgatgtaaaaattagagatcatctcgttagaaccagcccagatgaaacctctagccattataggcgattcttacaagagataattgagggtagataccactttttgcaagaagcttcttggcttgagcctgtaaatttaattgatattcccttagcgaccaatatttttacctctagtcactgttgctttttcaccaggtgacttagatttttaatttatagcccaaaaagctcgcaaattaaagacccctcaagaccctacggtcaccttcgaggctgaactgatctagtataaagttagatccataggatcttatgttggggaagtattaaaatcatgcagcattagatatgagcaagaattccgagttagatctgtcaccgagggggagttcagttgctatgaacgtgtatctagagaagaaggttgtagtactagcgagccatctaagataggcgcttggaacctcaaacatataagagttggagcagtactccttcttaaagattatttcaaggaattttgcaactacctcggcattgctccattctaactgttactaaattcttacagaatattagccagtttaaaatctatataccatattctgaagtgcgagtgcccaaccccactagaaattctttacttttactctgtgaatgcttgtcccgcaaggaagtgaggagcaggttgtttttactaccttggaacccataccaatgatcataggatcattgtatggctaccaaataaaaaagagttcaaggatgaattcttttggacttcaggtctctctcctatcaacaaaatcaaattccaaatcatacgtaagtattgtcttttctcaaaaacttggttttgagttttaatccaataaatatagactttatcttactatttttgtttatgtgttgtattgacatcgatcactaggaggcctatccaactcctgaaattgaaaaaaggcacaggattcttcttatccttccttttgggttgcgagcagctgatttcttattgcacgagaacaacttgatgttgcaagttattttaccaggaacttagatctactcacaagtatgttgatttaacaacctagatatgaacttctaaaacgatggaaaattaaacacataaaagtatcagaaa

SEQ ID NO: 309329 - DNA, 1502 bp, Cannabis indica
ttaatcactagtatgtcagcaccttttataggtggcactttacgattagttaataatatttcctacaaaattgtaatatatcaatatgacaacaaagaggataatgcagaaaattgctacttttagtgataacattttagtcacaacataatttttttgtgactaaatgtgacttttagtcacaataaaagtaacttgtgactaaaacataatatttagttacaaattgtcactaatttagttttagtcacaacaaatattgtgactaaaaacatatttagccataataaattgtaatttttgtaactaatacttttagctacggaccttttagtcacaacacaataataataatttataattagttacaacttttttatctttagtcacaaattttattgtaactaaaagtaagattttttatagtatgcaccactaatacattttaccaaatattaatgttctgtataataacatatctatagttaggttaaacttttaattaataggtaaagaactgactacttcctatttcactgttatatatcatataaatgcataattactaacttagacattaaattgtgtaaaaattattaactagatttctattttgttaaatgatattttctaaaatatagtatgaactaattttttatcaaaataaaatttaataataacccgatgtaaagatgttatgataaaactgatcagtaggatatatacagtaattatttctattttcatatatatttaagaatagaccaaatattatacaatatgaaacttattttcattttttgtcgaaccaaacaagtattatggtttttgaaaaattcaaaaccaaaacagaccaaacatattgaggtcttgtcttttgacatggtgggtttgtctctttgaatttgtttggttttgttgagtttttgtctggtttttacggtgaacgtgagggctgtttgaggtgcgtttctgatggcagcagattttggtaatgaggatcttgatggtagtttgtcgatcatccaactcgaggaggaggaggagtcagcggttcaatacgatcagcctttggtcgaagatacggaggtcgatactcggtggagtatagtaggtcgatttcttacagacaacccgatcgacttcatggcgatgcaaaacttgatggcgatgctttggaagccaggtatgggtatgtatgtgaaagatttcggaggaaatagatttatttttcaattctatcatgagatagatattcagagggtcattgataggagtccatggacgttcaaaaacactccgttaatctttgagaggttgaaaatcggggatgttccgagggctttgcggttgcatcatctcgaaatatgggttcaattgcatgatattagggcgggttttaagacggaaagggtggttttggacgctgcgaactatatcagaagctttgttaaaaccgatgagaacaacttcaatggtgtttggagggaatatctcagggt

SEQ ID NO: 309330 - DNA, 803 bp, Cannabis indica
tttgaaaaaagtggcatatttttggggttttgaaaaagtggcatattttgggggttctcgctgctcttctttttccatcggctacgactatgaagggttgacggtggcaatggatctgaggtgaggctctacgatgtggaaagaggatgagggttggagacggctagggttttggagaaagagaccttcctatttgagaaggaagaagaagaaaataagaaaagggaaccaaaaaaaaagtagaaggggaaaaaagaaaaaaggtaaaagaatatttgatttttatttttcaattttttttttcatatttcaaaatgatttatattatttaaataattaatattgtgtgaactattaaaagtatatcacgtgtacactttagcaatctacttgacatttaatagaattttttaaatagaaaagtaaagaccataacaaatatgaaattcgaagggttttaccactacaattttgatttggaaggttaagtgttagaaaatatgcagtttgaatattttagccgccagtattcaatattcttataaaaatgagcattattatgggccaccaacgtgcctaataccattataaggtgatatcatataattagttaataattttttacaatcttattaaagtaaaataagtgagatctaatattgtattgcatccataacaatattataattacaactcataatagtataacacaccatgataccatttccaatgggagatgtaaaaattgtgctatatttagcacaaaaagtagttttgtggtaaattttagctttgtgctctaa

SEQ ID NO: 309331 - DNA, 1881 bp, Cannabis indica
agtgcaatatattttgaaataaattaagcttagaaaaattacaaagttgaattctaaccttaagagcaactttaatctaactactaataaatcttgagctgcaacaaataccttcaaatatatgttacaccacaacaggtaacaaggctgaaacaagacaaatatacaaggttagttggccactcctaatggccaaaccaacaagaaacatcatttataactttttgagagaagatacaataaaagaagaggtggttatgagactcgacaaataacacacacagggcagtacagagtcaatcgaaaggaagtgacttaaaacatctctggtcaaaagatgttcattgagagcttaccaaaacacaaatctatgttttgggacacacaaccgatgccacaacaatctataatactctatttttcaacaacaataagagagagataaaaaaaaattctcatcttgaatcttctagtcaaccccgcctcaaacaaagcctgtttgtcaatgacattcctcagtttagttagttttttaaaataccagctagcatccgaaaaaggagagaaacactagaaatcaatcccttttaaatagataaaattcactgactttaaccaaagactatcttgctttgttgaaatggcccaaacaaacttagccatcaaagccatattctactttttaccttctctaaagccaataccaccataagttttcagcaagcaaactttttcccaagaagagagatgaactttgcaacggttacctttgataccccaaagaaacatcctgcagaatttatcaatttcaacagtgacattttatggtaaaataaaaatactcatccattaattacgaatgctcaagagaaccgaatgaatcatttggctctaccagcataggagagatgtctactagaccagtgatgaagatttttacggaccttttcaataatgcaatcacaatcagacgccttccatttagtaggcctaagattaaacccaagatattttaagggaaaagaacctttagccatatgggagatgtcacacaattgttgtttcaaaacagaattaattcttccaaaatgaatctaagattttgaaaaattagcagcaagcccagttgcatcaaagtcttctaaatgatactcagggaaacaatatttctcttacaaaaaataaccaaatcatctgcaaaacacatattcacaagattcagagttttgcacattgggtgaaaactgaaacccttggagtgagaggcttgaatcatcaatctactgaggtactccatgattaacacaaaacgaagaggagggatagggtccccttgatgcaacccctttttcacccctaaacaagctataaaatctaccattaatcatcaaaatgtaagacgaacctctcaaacacgtcataatccacactatgaatttagcaagaaaacaaaatccttttagaatttcttcgacaaaaaccaaatctattgtatcgtagactttacttaaatccactttcaataaacatctagctcagatattgtttctagtatatcccttagaaagtcttgaagaattaaaatatcatgtgccagcaatctctttttaataaaagctccttgattgctgtggatgagactaggcaacacaatattcaaacgggaacataaaatcttagaaataaacttatataaagagttttgtttttgttggagtaaccgataaaggttaagatatcaaatgtaacaaaagttatacaataggtgggggatttctgtaacgccccgatattttgccttattttacaaaaatactattttcatgtataatttgaaaagataaaaaaaaataaatttaaatacaacagtggatttttaaa

SEQ ID NO: 309332 - DNA, 2187 bp, Cannabis indica
aaagtattttgccactttcttttggtacactgcaatgcgtatttgacattcctcccagagctcgtctactagatccaacacctcttgaagcaagccttggttctttgctggatcataagtggctcttttgtgggatggaattatagcctctactaggaccatggctttgcatccgtacaccattgagaatggagagtgtccggttgtggttcttgcagtggttcggtaggcccataacacgtgtggcagttccttaggctaattatttttgcaggccaagagtctttttttcagggtgaccttgagtatctcattgacagcttctacttgaccatttgtttgtggcctcacgaccgcagagaaacttttgattactccgtgttgattgcaaaagtctaagaattcatcacagtcgaatttctttccattgtctgagactatcttgtgaggcaacccatatcgacatacgatattctttatgacataggccaaggatttcttggcaattatggtcttcatggatttggcctccgtccactttttgtaataatctactgccactatggcatattttatcccaccttttccagtggatagggaaccaatgagatttatcccctacaccgcaaagggtcaggggctagtcatcaaagtaatttcattgggtggggcccttgggatatttgcaaacctctggcatggatcacacttcaggacatagtctatataatctttcttcattgtgggccagaaatacccttgccttaatattttatttgagaggcttggtcctccggtgtggtctccacaaaatccgtcatggactcctgcatgatctgtctagcttcaggatttgacacacacctcaaatatggcatgctgagcctccttcgatagagaatatcatcgatcattaagtaccgatgagcctggtaactttctagatgtggtcctttcttgaggcagttctcctgttgttatgtatttaatgatagggtccatccaacctgacccttgctcattggtagccactatttctttggcccgaatgctaggtttcgcaaggtgttcaacaagtaccacccccagcttctctatctcactatctgaggctagcttagccaggcagtctacatgggcattcttttcttgtgggattcgctccactttgtattccttaaatttttgcaacgattccctgacgaatgatacgtaaccagccatcttttctccccgagtttgatatttttatgactcctggttgaccactagttgtgaatcactgtgcacttctactctactagcccctatagccttagccaatctcaaccctgctattaaggcttcatactcgacctcgttgttggaggtcgagaacgtgaactgtagggcagactaaagtcgtaacccgtcaggtgagatcattgctattctggccccagacctattttcattaaacgatctgtcaacatatactttccatgtgggcttatcctgagttggcatactggcgctggcctccgtctcgttgcattctacgataaagtctactaatgccttaatcaagatgcgtgggatgtactgtatgtcgaattggcttaactccatggcccacttgaggagcctcccccgaggcctcgggcttctgtaaaacttgtcaaagcgggtgatttgtaaataccttgatggagtgagcctagaagtaaggtctgagcttcctggatgcaatcaagagacagaaagctagttttttgatcaggggataccgaatttcagttcctatcatgcatttgatgacgtaatatactgggtgttaaactttttcttcctcccagaccagagctgcactgacggcgttctcaaaaacggcaaaatataaatttaagtattcttcgtgaactagttttaacagtattggtggcttagccatgtgttctttcgattttttgaatgcttcttcgcattctttagtccattaaaactttttgacatttcttcaagatgttaaagaacgggatgcacttgtcggctgagtaggagatgaaacgactcaaggtaggaaccttcccggttaggctttgtacgtccttgtgtttctttggggaaggcatatttaataaaacttgtatttttttcagggtttgcctctatcccgtgttgacttactatgaatccctgaaattttcc

SEQ ID NO: 309333 - DNA, 6127 bp, Cannabis indica
gacacgtcctcttatgggtattctcaaacgtttgcccatggcacattaaatgcaaagtgactgttcaactctagctttactggcccggagaagctcgttcgcgcttcagctcccggagaagaagatgggcatatttgctcatgtctgaaagctggccactgaactgtacttattgattcttgaggagatttgggtgtcttcaactcatcttcgagtgatgtgcctatacctgccacatgttatatacaacagtcgccacatatattgggaataagcggggcaatatttaccccccaagtcttatttagtcgtaggtaaatgagacttgtaaaccgtctcctttatcaataaatgcaatgacacgtgcctcgggtgtgggtaatatttacgatcgccatcattggcctttatttcttttgcaggcaatgattcatttcccgcctactgacagacccttccatcaatgtcggtgtcaaagaggtactcaaacgtttcaatcgcccttttccttcatcatgctctttcatcttatctgttggatcaagggattcgcgaacccccactgtacgatggtgttcactcgacattgcctcgcaccccaaatggtctataaaagccaacacttcccctaactaggtgatttctactgcccttcaatttccagattttcaaacccattcgacaaaattctagacgcccttaattttctctttctcttcccttgccgttgtcaagcaaagtattaccatcacacaatgccttcgccctcaccttgcctttattgtgtaagttctttctgcatatgtatatattccttttcatctgctagggcaagtaatgataacaatgtgtaggtatatttgctttgtttattttcttcgaaaggatggccatggtcgtcgttagtgtaacgcctcctttggtgggcgttcgattgacgcgtgtctttctttatgactacagtatgtgtccattattttcattatgcacgtattgcttctcttctttattttttgaaaatatggtcgaaatcagagggtttttcgtatgcccctttctggcagttcaaagttgctcttgcacacctatattttttctttgatttccttgtgttgcttggatattttgcacccgatgtctgtctttgtgaatcttttgattcctttcgatagtcatccggtgggggcctctttccagcagttacgggacccccattcccatttttaactgggtttaatgtgggggctaactgcaggatttcttattttcttttcagatgagcgaagtccttcgcgatcttcacaaacatggtgtccttgggttcgaccaagaaatccttaatctccacaaagcttactctatgtccctccccgtagctaccggaggaaaatcttgcaagaaggggccaaagaagctagccaccttggaggaggttatgaaaggcctgatcatttataagaagttcgcgtgccgttctaatggttgggaggctgacgaactctattcaacattgatttgtgcccatcaattggagaaaattgtcactgtagttgggactaagccttctagctctggagtataccaccgtcttccgaggacaaggagacgccaaaccacaactacaacagcttcagagcctggagccagactcatcttatgtctagggccatgctacccctccaagattacttcattgacttccttatttttgttagattttcaccctaccagctgattccacaagcgtactgtctgttattaggcctttttattttttatgttgccaggggctaggctgcacccagctctactgaaattttgtatttttatgaactattttcggtccctaaaaagggggacaagtttaaggatggcttttacaaactttaggcccatccggtcaacgagactccggtaccctttaattttcagagtaatgtaaaggagtatcgccaaaggtttttcttatcttccgcgttcaaagacttcgagcgatctgatctattaatagactgggtcacggatcccccccatgcatcgtactgcccccacccaactcttcctaaatcacgcacaggtttttgccaattacaagaaggaagacttgaatgtgggtgatctggtaacgatggtcaactggaggagggccatgttgattctagagagttagtttgtcgatgatgacttcaacttgtccaaggtccttttgccccaatgcctagataaggtgttccaggcggacattatttcatccgcagaagataaatataacaagtatagatataagagggagcaggattctcgcgtatgcttgcctgtaggttgcctccgggagggtctcccgggaggaggcagggaaggaaaaaactctagttcggcctaaatttctgttcctagtctcaaattcggagcccttgggtcaagtacctctggggcctgtaagtctcctttgaatattcactttgctctttctatccaggactacgctaacttaaggctagtggaattcgataaaagattgtataaattttagatgccccattctcggtggggtgataatgccaacaacttttatttctctaacttaagtcatttcttaagtcggtcgcggatgggctctggtcttcctgtgccaatccttttggaccattcctcctacctaaacacaaggttatttcttccttcagatagctttttagaagatgacgacaccagctttttaatttatgaattttctagggcaaactcacagccccgagctagacatgccgaagcaccctcgagtaagtatgactgttgggggacctaccgttcaagctatcaggaactaggaggtggttttgattgatgaagaggaagaagaggtggttcctccacttgaccaaaagcgtaaaagcattgcttctgagccagactcttcaaagaagctgaagagggttgccacgccgggccatagtgtcgattcagggattccctctgagattgacgagtatcccgcccctccaggcatccttctgaccccttcccatcccgacgaggaaagggtccaacttcgcatcgccaaacataattacacagtcgaggaactgtccaaaggtgacgctgaagcagaggccctgaagaaatggctgggggaagcttaagatgggccttttcgaggcgagtatactggagatgtatgggatctgaacatagatcccatgatagaatggtttaagctctttgtgggccctaatctggcaccatttgcctcggagatggtaagtcacttcactgctgatttaacccaactccccaagaaaaggtatgcagcctgtgcttcctccaatcccatctatcaaatctaggacatgactgttgccttaactgcggtaagtatcagttctccacacctcttttttttatactttattttcaaagttccaaccttattcttctttgttgctagatttctgcggaggcagtcgacttccaaagagtttgatcgactaagggttcaacgtgtcagaattcggtggcatggacggggttatgaggaggctcagggagtcgaaggactggctcgggaagagaaagctctcatggagcagaatcatcaagcggcattgaaggccaaggacgatatccttgcctcgggaaggaaggacttctgggatacaaaagaggaaaactaggaactcgtcgtgaagctcaggtctctagaagagctacaccaaactgactttgagacaacaaccaatatgactgtttaactcaaggagcttcgtgaattccgggatcaaactcaaaaagaggttgccaaggctgtgagggaggctttactggctccagttacttacaagcactgtgagaagcgctttgaagatgaggtgttcatgtgctggaaatcgaacaagtttcgaacctcgtctccacttctttcctgatcctgaggccgttgtggcttggttttgggagaagaatcagaaactggaagctatcctagccgagcccaggggtccctgtttacctccacgagtcgattaattaaacccctcttcttttcttttcttttatatttcacttacttccccccctttaagactaatatttttatgtttgtatttattatctttattttttgttaggggaaacactattatggcccgaccccaagccttttgctatttatattgtagacaacttatattataagtttatatctatttttcttttcttatgtctggcatgtctctgcgcatatcttatgccttagtaccctctaactgacataaaaagggactttttaggttacttaacttaaatttatgtgggataatacatatactttatctgccacaggttaacttacaaaataaagatgaatttaaatactaaactcctaactattgatagtatttacggagatggtcaacattctaggctctaggtactatggatccatccattctctttagcttataggtcctggagcctattttatcttccatttcgtatggaccttcccaatttggcccaagtaccccactcttggctcctgcgagactgaaaaaatccttctaaggactagatcaccaacaacaaactttctatttttgactttggaaataaagtattttgccactttcttttgataagctgccatgcgtatttgagattcctcccggagctcatctactaaatccaacgcttcttgcagcaaggcttgatttgttgctggatcgtaagtggctctcctgtgagatgggattatagcttccactagtaccatggcttcgcatccgtacaccactaagaatggggagtgtccgtttgtggttcttgcagtggtctggtaggcccataacacgcgtggcagtttttcaggccaattattttttgaagacaagagttttttctttagggtgaccttgagtaccttattgacagctttcgcttgtccatttgtttatggtcttgcgactgcagagaaacttttgataacttcgtgttggtcccagaagtccgtgaattcatcatagtcaaattgttttccgttgtctgagactattttgtgaggcaacccatatcgacatacgatgttccttatgacaaagtccaaggctttcttgacattaatggtcttcataggttcagcctctgtccactttgtataataatccactgccactatggcatatttcaccccaccttttcgcgcgggtagggacccaatgagatctattccccagaccgcaaagggccatgggctagtgattaaagtaatttcattgggtggggctcttaggatatttgcaaacctctggcattgatcacacttaaggacatagtctatacatcctttcttcattgtgagccataaatacccttgtcttattattttctttaagaggcttggtcgtccggtgtggtctccgcagaatccctcatggacctcatgcatgatccgtctagcttcaggatctgacacacaccttaaatatggcatgctaagccccttttgatagagaatgctattgaccattagatatcggtgagcttggtactgtatctttctagacatagtcctttcttgaggcagttctcctatcgttatgtacctaatgatagggtccatccagcccgacccttgttcattagtacccaccgcttctttggtcctaatgctaggttccataaggtgttcgacaggtaccacccctagcttctctatctcactatcggaggcaagcttggccaggcagtctacatgggcttttctttctcgtggaattcgttccactttgtactccttaaaatcttacagattttccctaacaactactatgtaagcgaccatctattctccccgggtttaatattcccctgatacctagttgaccaccagttgcaagtcactgtacatttctaccctgttggcccctatagccttagccaattttaatactgttatcagggcttcaactcagcctcgttattagaagcagaatgtgaaccttagggtagcatggagtcttagcccgtcaggagagatcattgctattctggccccaatctgttttcatttgatgccccatcaacatataccttccatataggcactgttggaatttattttacgaggatc

SEQ ID NO: 309334 - DNA, 2681 bp, Cannabis indica
atttgtggaaaatccttgtttctattcaggttttaaagaagtgttctagagtaaatacttatcaatttcacattgtgacatagtgccttcgttcagtgcatgaatttccattcaggttgatcgacacacttgaaccaggaaacgagataagaatagcatagaacatattatatatgtgattatgtgtatgtgtgagatatgcatgcttattgtgatttgtacactaccaacactagtacggtagcggtactgagtgcattggtatagtgtacgatgtttagagagtacagtacggtgttaccaacaatagtacgtgcaggtacggagtatatgtggtataacacttagtagtactcgaggtatgggataaaccctaccaacacttgtacagtggtggtacgtagttcatgtggtacagtggtcgtatcttagtaaggaacgttcttacttatctaataagtcttgtggataggtgtatgggagcctagatacaagtcagtaatatattttatgttatatatttttcttactgagtttgttgactcacagatactactttggtgtgtaggtaaagggaaggcgaaggctgaacaggtgtgagttctgagctcgaatgatgattgtacatgtcgagatggcgcgaccaggagtgttcggtctcgaggacatcttgggctgtattttgtagtcgctgtgcgacaagtttaaaaaagtattttgatatagattgtaaaagtttaaacatgggatcccaatttatgtaaataaacatatatatatatatatatgtttataaagtttaatagttttaaatcaaaaatttaatttagcacgatttctgagaaaaactctttgattaacaaaagtggcacattaattaaaaaatcattatagcgtgcctaagtatcagggcgttacattatgagatattcaatctcccttttcaaattttgacactcattggtgtcatggccgaagtcgttgtagaaccgacagaacttcgacatgtccctcttgctcagttctcttttgatgagaaagggctctttttaggggactgttcccttagtggccatgaagatggtctcaggtttctccgtgatgagggtgaagcatgtatacttatcctctttgtccttctggttttgtggcaagtgagaagtgttaaacttctcatttttgcctttgtttctcctagagatgttgttgcgcttgttgttagtgttcttgccactagaggtttgggcagacttgttggtatctgcctatgcgcttggcaagtcatgagactgcaggatgtcttgtgactgcctattgcttatatgtcttgtctgggcctgtcgtatagcttcttcgagttagataaagccataagctctatcaaggaactcctttatgttgttggttgagatcctcgggatatctttccagaactcactcaatgggagtatgcccccagtatggttgtatatcagccctcctctgtaaggcttttgaccttcgtggcctcggccatgaacctctggatgtaatccttcaaaggttctccttgtcgttgtttaactttgacaaggtctctagctgtgatggtacgagtatggaggacaagaattgtgtgtaaaattcttgagagaaacaagacaacaaccccgggaaagtttgaagtagcattgttgagatgtttctgataaagtggatgggaatatgtgacatcacacatcactagtaattttctggagatcgagctgcatctaaaagtacttgatgtgcgctaatgggtcttctcgtcaggtatacaccttccataccagcatcttaaattttggcaagggcaaggcatttatatatgtcgagaatagtgatccccttgaccgatttagttcaagatctgaaggttttggaccacctatgccctgaatcatgtcccttaactggtctaactgtacttgcataaaatgatctgtttttgtaggggtttgactagctagccctgcttagagggattatagattctgatgtgatagggtttggctgaccataatccgagaaagtgtatggtagaagtcggccagacttatgttgtattgtagactttggccagacactcctaggtaggggtattggctctggtcgaccaagcctacattaggcagctgtctatggccggccaaacctgcagcaggcagtgtctggccacctacaactccccgattggctaatattgttggtgtattgatagaatgtagatcacaccagttgttggagtttggtggatctaagtacctgaagtgattaatttcacttctcaaattgtcgctttgggtgtttccatccattcccgatccatgtcgatcaaaaattgacctttgagcggcttgctcccctcggggagggagtgctcccctctggccgaccaaggggacttctagaggtggcatgccagccaaggggactcctgcatgtggccggccggccaagggcttgatgacgggggctattgctgagcctgagatccttggctaactccccatgccgctagttgccaaaatctggctgttctcgtcgttagacctttatagcaaggtttgtcctccctttggcaagggaagatctgtcctactccctgaagaatcgggtcggtcatcttatcgatagaccctccctgatctatcaaccagtct

SEQ ID NO: 309335 - DNA, 956 bp, Cannabis indica
gaaaaacaagctttctgcccaaaatccatagttgcgaccatggaaaatggtggtcgtgagtactgaagccaattgacagcttcagcatcttttagtaaaatatgcataactttcacgtacaaactctagatgagttgattcaagatacgttggaaagatgaaaaaaagatctaaagattctattatatgactttttccaaaatctgatcataacatagtcaaatttaggcttaaaattttagttttattttcttgtaaaattttctctattctatagattgttgtttttcgaaatttgatcaatctatatattccaagtgtgaaacctaaaaccaaagaaaacaagcataattatattccaaaaagaataacataaaagaaaaataactataaaaattgacctaaaatgcagtcccccaaactagattcttacttgccctcgagtaagactaaaaactaagactcaaaatctcatactaacacacaattaactaagccttcaaaaatcaagctactgctgccacctctgaaacttcatataattaaataaactagaatttcaatttcagaaaaactctataacaattacttcatgtgcttactttgaaaaataatgtacaaatgtaaattaacttcaatatcgaaacaatgtcacaaccgttttactcattctaaccattcctcactccaatggctaatatgcttgcatgcttacctctctcaactaatgttgacaacgttttgcggaatcaaaaggacttttaggttagaaactaatggcattaatactcgatagatgaagaacattttggctaaaaataccatgagtgcacttgaacctgcaactttttaccaattaaattctcttgaagtgttcccacaactaacaataatcaagactttttaataattttcggatatcacttatttttttttttcacttttagcttttgatc

SEQ ID NO: 309336 - DNA, 507 bp, Cannabis indica
ggcgaggtttgggtcgaggggaagaggtagatggcggaaggcggcgattggtcgaggagcggtgagttgccacggcggagacggcggccgacgagggctgttgtgttggttaagcatttggtgaggattggtgtggtggagagcttgtgttgggcctcgtgtgggtggtggaggattatgatttgggttgttatttcaatgggctgggctggaagtttgtggcagatgcaaactggattgggccttgtgcagttctcgcatatgggccttcggcccggttgtggagcggcggaggaggaggtagtggagagtgagacttgaaagaggtcttgctcttgctccattttgttggagtggagagagtgaacgtgtgaagtggtggaagttgtctcttataagtaggaactttttgaggcttaaagtcttataaaagtcgtttattttagtttatatgatttagcccacaatcctaattttggatttcacatgtcccatacactaaaattc

SEQ ID NO: 309337 - DNA, 1355 bp, Cannabis indica
gcacgaagtgcggctttgttcactagttaaaaatataatgaagaacttatcagtaatatttatcgttgaaagcatgtaatcgttgctttgatattcatcactactgccactatttattccaactttgtaaacatgacatcgttgatagcttagatagaaaagtggttgttcttaattttaacactatcccatttgagggtctgatcatcatcaccaacctcctcgcctatctcatcatcatcgccacctttgcacaaactacgccgtaccgtaatatagttctctctctctatctctcttcccattgtcactatctctctcttgctggcactagaagttctctccggcgttaatggcgggccacagatgactaccacattagttcgaaagatagtcaccgtggacagatctaggctccctcacagtctctcttcgtttcacctttgcatgcagttcctcttcgtcgttaatggcgggtcgccgtctagaccggtggttcagatatttctcatacactccataggcatagagatctctctgcgtgaaactcggcttgatcgatctccgtcatctccaattgtctccgactgcaagtatgttcatccggcaaacgctttcgactgggttagttggttagttgattattgatccaagcgagagcaggaaagaatggggtcaagagagcaaatcgcgattgcaattgattgatttttcataatcagatggagatagaaagaaagaaacaagaaatttgttttgatgatatgttgttttaacagaaaattgcattagtctcttctttgattatttgaatatcgtaatcaaatattaatggaatttgttttatttttattttattattttattatatataaataatatattttattattttattatatataaataaaaagtcactcataaatttcttataaactaaaaattcagttatataggcacactttatatagaatagatatatatacattgatgggttgtttatagttaaaattatcatgatggaaagtcttacatttttcattattaatacatatattgatagttgtataataataaaataacacatgtattaataaaataatattcaaatttaaagttattgctctttgtcaaagaaaaatatgtataataattagatgaaaaattttgcactagaaaaaatctgaataatctcgattaccgttgatctcatctaaatttgatctcaacctaagggcgagttcgtctggtcggtgggagacaactacttgatagagaaacttgttggatgcttatattgaatgatggtatatgctttatgagtatatatgtaatgaccgctctagtaatgtgga

SEQ ID NO: 309338 - DNA, 1137 bp, Cannabis indica
aaaaaaaaaatttaattttaattttttttttctgtgtatattataactatttatacgttaatattaaaataatttaatttaaatagtttatacgttaaaaataaagtaaagacaattatttaataagaaaataatcacacatataaaagaatatttaaattttaatttgtcaagcaaaaatttatattaaaaaactctcgtcaatactaaaatataaaggttctttaaaaaaaaaaaaaaataactaaaatataaggataccataacacctttagaatatttcataataaaactcattttaaatttaatatttattttaaatattaaaaatgtttttaagttttggcatcatttttaatgtttttaagggctcaactaattgtttcactagacacattatgcactccttatcatcaataattaatgtattatttccccattattttcttatatccttgggtaaactttttattttattttctttaaaaaaaaaaagaaagaaataagaaatgtatatatattatattatattatgatattgagttttgaaaatatatatataattcttaaatatttttttttgtttatgggtctgatatctaaacaaatagaatattaaacctatgcactattgaatcaatcctcaaactcaaagtattgtaattttcttggcatccattaattctttgaattttattaaaatatataaaatcctcaaaactacaaatgaataagaattttttttacataattgatgtctagtacttatcaacaccactccttgactgttgttaacttttgttaattaaaaaacatttgcagacataataattaaatttacttttgagaaaataaataaattatttatttataagtaaactaaaactacatataatttgttgtgaaaaaaatcagattattataagtatttataaacttattttgtttatacataacaccaaatgaaataatgtgaaatatgattacattccacatatatatcaacaccaatcttctcaattcttaaaaaatttgaatagttttaacataaagattagtgaatttaagtgtcaaaaacataaaaagtttgggactcaaatgttattatgtaaaaagtgtggaaaggaataagaaagt

SEQ ID NO: 309339 - DNA, 878 bp, Cannabis indica
gtttattacaaaaaaaaaccgaccgttcaatggcgatttcaaccgttagcagttttttgggttttcattccgtcggtttcggctccaacggtgttcaataggtcggtttgaacgattttttggattttcaatttcttataggtagaatgtttgtttattttaaagccattatcttatttttcatttttgttttacattattttttttattattgttttaattttaatgagtaccgagtaggtcctcatgcctaatagggattcctctacctcgaacccatcgaggattaagcgaggcaggggcagggatgggagcatagatggcaaacagggacaggttgggaggtgcattacccgtttattacccaccaaatttccatccctaattggagattctctaatgtagcatatttgccatgtaaaagtcacaaaaagcttaaattcttctttattaatatcaggcccaaaacaaaagggtgaaaattgcattgtataccctttttactttattcgttttgatttttatcttcattatcatattttttaagatatactcacttttacagatgatgttcctattataccccttatattaatgtaaatgatgtgctacacttaagtggaagataaggatatattagacaagtcactcataaaagtgagtagattttaatgaaatataatgtaagggtatttttaattaatgcatagaaaaaagaagtattactcaacttatccggtataccaagcccaattatgatagcaggccaaaacagaaggatatttatataagcccaagaccaagcccaagacccaaaactaaaaagtaaagggataagttgaaaactatcattttttattacacattaactaaatata

SEQ ID NO: 309340 - DNA, 640 bp, Cannabis indica
acaaaaacttaaagaaatctggtcaaaaacataaacaaatacgaacatggtttccaacataatcagataaacaaaggatggcacaacttgtaagaaaacaggagaaaagcaaataaacaagcttgacgcattaaactaacagaaagcactcgaaggtgacaactatatctactttatgactagcaacatattttatataaaaccagtgaatgtgtcttgaatataagcattgctttaaaccttaagcacggttgatcaatcaataagaaggctcatacttggtatcaaccgtaccctggatctccaaaatttactttacctcaatgtcctgagtatggctcatcttcttcgacaccaaattcgaatgacaagggtaagttctgtattggggcagtggaacagaaatgtccatcatctagaatcaagagtggaaggaaaccaaaggggaaagcttcgatctctagtaaaaaatcatctggagttaagacaaggagtggaagaaagaaatgcctggcagaagagaaggagttggttacggaaaatatggcagaaattctggctaactgtgttgaggtggaagtggtatatgatcaaaattttggaaatggcgaggaggcggccgataccatgcccccacctt

SEQ ID NO: 309341 - DNA, 2254 bp, Cannabis indica
tatgaaatcccatatttcatgtaattttcactattataaataaataaatatgtatataaaattagtaaaattaaaatttgatacaattttattactaagttatcattaaataaaagacataatttatttatttgtataatttaaaatttcttaaatatccacctcgaagcacggcttatttactagttgtaatatgttaataatattatatataattattaagtacaaataaactaacctcgaaagatgatacttgttcggtaaatttgatacgcaagtatacgcaatcaaaataaataatataatgataaataaagtattatttctaagaggattgattatcaattaccaattaattaattctttagttttatttgattaataaaaattattggatagaaagtaaataaaacaagacgataattaaaattaaaaaaataaacaataaatacaaggttattatgatccctaactattctttattttacttcctattgtaattattcaatttttcttcttcctatttaattgacgtacaagtagaattaagcagtttatataaggttaagacttacaaacccaatctacatgaaaaaaaattatattcctatggtaaagtttaatcatacagaaatcattaagcaaaacaacttataaattatacatataatctagatacttttgtcctaaattaatttgcatccataacaatcagagcatattcaaatctcacatttcagaattttgattcgaactcatagataacaattatagatgaccagtaaataattataaaatcaaaacagattttacgaaattgaacaaagagaagaagaagaaattgaacaatcacattacataaaataaactcaagtggttcacataataatctttaaaaataaattagctactagaagtcattctaaaacaatagaaatttaactaaaaaatataaaagatagagataaagagatagaacaatatttgaagtcctctaataccttttgctcctagccttccttctaagcgactaaattttcaaattgtattagatctctcaacccctttaaatacacaattaggaaggttttccaaaatcttccaatactcaaaattgatctccaagttcgacttataaatgaaacatagttccaactcatttttttaataatagttccaactcattttataaataaaatttgggaagttttccgttttttccgcaagagacgcgactctttcgttttctgatttcctgctgcaatgaccgatagtattttagtcacaactctctcaatatagctcaaaattggacgattcaagatattttagaaagttgaaaaaagagatctaaaatttttatttagaaacttttttctagaagtgaatagattatagtcaaaaattagtttgaaaattcaaactttattttcagtcgcaacagagcgtgttgaaaatccaaaacttagaatttttcacccattgtatcttacaactccaaaagctaaatgcataaaattcatattatttagcatattttctctcattttaacccacatgatatatttgactattaaaacttgaaacaaaaagaaaacaaacgtagacatgaacaaaaacaaataaaaagcactaaaatatatactaaaatggactctaaaactacataataataagcctaacaacgtttatcattcaattatgattagagtataaaagaaagtactcctcaattagtttgttgagaagtggtaattataacctcttattataattttttagtcaattttcacgcccgaaattacttgtcgaaatattttttataatttgtttttcatagcggtatttgttatagttgcaatatcatccttataaatttttgaaaattttcgaatagtttacaataccgaaaataaagatcttgatatttcagtttaccgcgtgcattcgaaaaatttcaaatgtattttcagcactataaactattcgaaaattttttaaaatttataaaaatgttgttgtaagtataacgaacaccgccatgaaaaaaaatatttcgacatatatttttggatataaaaaataattaagagattgtaatagaaaattgatagtgacacccttctactttgtttgtgttctagccaatatttgtaagtttgcagtgaaaagaatatatacatatagagcggaccctccaattgggtgagaactacttgcatttagagatggaaattgggcggttaatgtacgg

SEQ ID NO: 309342 - DNA, 578 bp, Cannabis indica
ttcccatttttttttactttgttgtcttttcaatctttagtcacttcttttgcaactaactacggctttcagagatgtaggcattctcttttaatcataaatactaatacagaaggagcatactacttattagtaaatcgactaaagagctcttctcattgcgtctaaaaaaggtaacctttttagctcgaaaaaataaagattcaaaagatcttaaaaaattcacctggtcagagcttccttggtagaactagagaacctgtagatgggacatgaggtgcctcatagaaacaaatgatagcaatcaaggcttagctgaacaaactaaaaaaataatgatcatataccataacgaattgatcatataccatgccaaccgtttgtcaaaacggtacacgatgtcgccggctacaaaaatgccaccgaaaagtagcgaaccaggcaaaatggtttagtgtaggttgttctcctcgatgagctgagattactggtgaaaacatctcgtcaaacggacgccggaggtgaccgaaaaatcctttcaaagtttgaatcaccaaactttgacttgcgatcccaag

SEQ ID NO: 309343 - DNA, 2939 bp, Cannabis indica
cccttgcaacaagttttggtaaaactagaggcctcaggtagaaaactgaagtagtcagtagagttgagccaatttgacatcaattacaaaccaagatcagcaatcaagggacaagcccttgcagactttatactcgagtttccaaatacaaagtagccatcatcacagaagagcgaattgatcctgacgtaccatatcgtgaagggtggactttgtatgtagacggggcatctaacagtgaaggatcaaggggtggcataatcctcataagtcccaacaaattgaaggtacacgctacccttagatttgagtttcttgcatctaacaatgaagccgaatatgaggctctgatcgtaggattaaaactcactattgagatgaaagtcgagtatttgcaagcattcagcgactcgcaaatcgtggtttgtcaagtcaatggagagtacctagctagaggagatcgcttggccaaatatctttctcttgtgagttattacaaaagtttaaaaagatagttgtttccaaaatacctcgtgcttacaattctcatgcagatgctctggcccgattggcctcgacaagagaagctgaattactcgatgtaattcctgtagacatattaactcacccaacaatcaatcgagatgaaatgatggaagttgatacagtcaaaaaagtcacctggatgaccccgataatagactacttaaaaagaggagtgcttcctgaagataaaatggaagccaaaaaactgcgatatcgagtcgctcgatatgtcatttatgaagacaagctctattgcagaagcttcaatcagccattactcaagtgtatcgatgggacttagtgcgattatatactccaagaggtgcatagtggaatcagcggcaaccacgccggggtaattctcttgctttaaagatcatgagtcaagggtattactagccgacattacgagcagatttatctagctttgctaaagatgcaataaatgtcagcaaatagctacctatgtaaacagaccacctagccaattaaattctatcacaagtccctagcactttgcggtctggggcgtagatttaattggagagttaccaaaaggtaaaggaagagtaaaatacgttgtagtcgctgtcgattattttacaaaatgggctgaagccaagcctcttgggactataacacattccattagaatttcattccaatacttgaaaattcaaccaaacaaaggaatagaatgaaaattgtttcttttccattccattctatttcattacctccaaccaaacgccacctaagtgtaataattttaaattaaagttataagtataataaaattttaattatgaaattatatgtgtataattttcaattataaagagttttgctataaaaattttaatataagggcaaaaaaaattgctaaaagatccttatttaattacaaattacaaaaaattaattaataattgtaattaatttaattttaaaatataattaatcttcattaaagttttataagcaaataaattattaggttactattaggttataagttaattattatttatttttatttaatttctaaattaatcacaaccattcaatagtaatttgctaaaaaaatgtaaccatgatggttccatatttaatgtaaccattgaaacctcctccatctatacttttactctttttaagttaataaataatatataaaaatattttttctttttataaaaatttatatttttagttttaggttcttaaccattcaagtaaaaatagtaaaatacatttaatttacatttatttatcaactaaaaattattgcgtcagacaagcttgttagataacacttacacttggaatggaagtgatcccttccgttgccctttgtaaactttattttcttaatttttctcaaatttgcctttgcttagtaaaattcacaaataagatctagtctcatttagaattctaatttattatctaaaaccaaataatggagtctacaaggaaatatgatctcagctattgtgggcaccatgggtctctataatcaagctcgcaataagtagttctaaaataaatttagtaaattctttaacttactaattcctcctgattccactgtaacactctattctccaagaatagatacactattaattatccattattttaatctaaataattaaagattctctatagattgtctacattaatatggactaaaattacattgttacccttcaatgtattttatccttaaaacccttggcttcctataaactgaaataggaggtcttccatttatgtctattagccaagctctaaggaggcatgattttacttctaaatagttttagaagctatatgttccatgtttatgattagcgctcccactcaaatgtactaccctgctcccaagatgtaagtattgagccaaacctacaggtaggctacaaacgaacaagctaaagaaaaagaataacacagttaagccaacacctaatcatcttttgattaatattattgatctatgataaactattagagatttaactagaaaagatattacgtcaggtttacggtatctcttttgctataaatattagtccagtccgatgtatagtcaatacatctgatcttagcttgctcctttaataccttcgaaaatggattccacttatgcaagtgtaagtaaactatatcaataattatcacgtccgtataaatcgtgtgcactgataaatcatgggactacatataatcacgaagtaatcatataaaccaagtaatataagtttaacttctatatcattctttaatagttaataagattaccatgagatgagttttatttagggcataaaatctcaacatactcccacttgcacgaacataaaacaaaagtgcatctctctaaatct

SEQ ID NO: 309344 - DNA, 1905 bp, Cannabis indica
atattgaaatgagttttatttacagcataaaacccaacagatggctgggagggacacgacaagaggtttggattccatgacagggcagttggagaatgatgcagttactggtataggtcgtgggaaggaagttatgggtgataataatattcaaaaattaaaaggaaaattgtatatggattctgatgtgggccacactaataaagagatgggctctttacaaagcccacatatatttgaagctggacagagttcaattgggctggagaaaattggacctaatagcctgtcgaatcactcacgaggggaagcttttcgaggtgtctttgattcccagttaacaaaatctattgcagggaatgataaaggggtacgatgtcgtgaggaggaggattgtatggtggagttcgatattgaggatgagagggaaggaagaaaatggaagtgtggtcggaagggagctactacggatggcggggcagctccggttgaaggagatacgatggtggagatggtggatactgggcgatttatcatgggttgtggaaaggaagtgcaaggggacgggcaccatggtaaagaaactaggaagagggtctcgaattaaaaataaggctcgggcaaaggctaaaatgggtggatcgcaagtggcttgtattctatccgagaagaagaagatggaggcaggtgcggttggactgcctgaagttggtgttcttgatgggaatgaaggaaaccgaggatgtgattctaattcggaggtaggtatttctaattgttttggatttaccttcttcttttactgaaattgaagcggcgagccttgttaatcaaggccgccgagagcaatgaaacttttaagttggaatgtctaggggattgggaatccctggacattacgagcattgcaatcccatgtgcgtgatattagtccgagtctaattttcttagctgaaagtaagttaaaccgggctcaagctgaaagggtgtgtaatgttcttcaatatgagaatttgtggactgtggatagagttggtttgattgggggttgttgttaatgtggaaagctgatatttaggtgcaagttttttctagttcacctggacacatacttgctactgttgtagggagcggatttccgccatggcttttaactggattttatggtaatcatgaagcttgacaacgtcgtttttcatggcaactattacgggatttgaggaaggaagtgcaagggccatggctctgcatcggggactttaatgaaattgtcaatttgtctgagaaagtaggtggtcgagatcgtcttccaggggttatggatgggtttaaagaagtgttagatgattgtcgatttattgattcaattctacgaaacatgagttgacatggtgcaatgaacatagtaattcatggattatggagcggttggatagagggttgtgtacagaggagtggttggaccaattcgaaggggctgatatttcgttgcttgattagtgggagtcggatcatcgtgcgttggttgtggatatgccggttcgagtggatggagttaaatgtgggaagtctaaacgtaagagtcggtttcattttgaggaagcatggtgtcaagaggaggagtgtgctgagattgtggatctagtgtggcaagaggaaaatggtagtggccgactgggctcatttagatgtaggattaataagtgtgggaaggctcttcagaattggaatcggaaaaagaagcataaactaaacaatgaaattgagatgattaaaaaagcgctccatgagttaattatgatgcaacaaccggggtgtgggagactatacaacagatggaagctaagttgaatgggttgcttgaaaaggatgaacaatatgttggaatttattttaccaggatct

SEQ ID NO: 309345 - DNA, 1333 bp, Cannabis indica
atgttgagatagatgccttgggcaattggctgaaccaatcgtgggcattgcctccagagttgccgcgagaatgcgacacttcgcaagttggggtacctgatccacttccataatagtattaaatttttctaagtaatctatgggattagtggtacctttatattttagagattcagacaaccggaatcccttaggcaaccgagcttgccgtacttcaacagtgaaaggagaagtcccatgcagcttgtaatgggctttctctgctgttcgatcatctttaaagcttgcagaagcataccctgatcgatacctcccgttaaggcagcattgccctgtgttttcgcaggcgtcgttattaccgcaacgatgtttgctgggatattgactccattggtcgcgttgcggtaggtgggttggtatgattgtttatgccctgatcgcccacctaaggatcacgaggctcttcgacgttctgaggtgtttgggagtgtgccctgaaaatagcattaagatgatcacggagatcacccttatggacttggtatcgccctcctcgcggtgtttccaccgaatctgatctggtgtatctgctgggagtgcgactgtgcgaggatgaagagccggactcaatgtcgttatcttcgtctcgcggctggggtctgctgcgagggttatgttgctcaggtgcctcctctgtttgtgccttttggttaaggttcctcgcggactggttcctcgacattggttgattcaaatctagcccttcctaatttgtcctccgttccctgcgagtacggttattgcgacgtctagaatttgttacctgagggttatccgtgcgtgtaatgggcactcgaggaggacgtcgagccctgtttcgtccgtcgacctcggcctgcagagcacgtagttgatcttgaattgcggatcagtagttaactggatgatgccttcggataccactgctggcgtgataggcgaaaaatgtcccgttgtggctgccggtgtagacgtttccccaacgtgaggggcagtagtttcagggaataaattaagaggagtcacattgccccgtcctactccatcgttgataacatccacgggaggcaccctgcctcttgacagtgggacgttcatcatcccaatgttgatgaattcgttgttaagaccctccttcgcttggtttccagccatgatgattttccttctaaatcaacaaaaagtattgtcgttcccacagacggcgccaaatgttgttgaatgaattttacaacacaacaaatgaattataataataataaaaactaatgaacaagtgcgagtatccgaccca

SEQ ID NO: 309346 - DNA, 1817 bp, Cannabis indica
ccatctacccctatagagggaaagggaaaatccgttttggaggagcaggaagactcttcaaatgatgacgctcaatctgtgcttgttcggccaaacgatcctgccagcgcagaggacgttaacttgcacttatttttcttgattcttttccctttatacattttatgccttcttctgacagtattgtttttttcgtgcagaaatgtctagggggagctcggggttgtcccctccagccaagaagtctaaaggcggtgagacaccgtcgaaggagaaggcgccagttgaagaagtcattgttctctctgaggagtaacatgctgtggatccttccaccttgaaggtcgccaagtccaaaggttctcggggagggagttcggatggacctgagtaggctaagacttgatccgagctagtcaggggcgaatctgagcaagttagggtccctgccccacctttggtattgtgcacagagaccaagagaggcaaagacatgcttaaccactatgtaacccggtcactcccggggtgaacgaatagttggctggggctgataatgatttgtctttggagctggtcctgggaggagttttgaaggagctttcacaagtaagtcatttccaacacttttttttttatttctctttggctagttcgaattttaatgcttttttcttttgcatagactggtttgaagatggtatatgcctattcctgagctgaatcggctgtttttaagaaccttgccacttccaacacaatgtaagggaagtggacttggccaaaaagcacgtcaaagatgcgcgggtccagcttgagactgtgcaaactaaacttggagaggtcaataacaaacttctttctgctgagaatagagttgctaagctgaccagggagctataagagatgccgtcaactgaggaacttgaggcagacaatgcttctttgtcttatgaaattgcaagtgtttaagacgagagggagggttttcagactctccttcgcaggttggaggataaggccaaggacaagaagactagggaggagaaacgtgaggctgaggttaagagcttgaaattcgaggtggaaaagctcgggaagaaagtggatgccttagagacagctggtctcgagattttttatgacttttggaaggccaatcccaaggcaaattttgaatacctcgacacttccaaagacatgtttctcaactacggcactgctcgggtgaccaatgagaatcctgaggcaaccacttccacctctccgaccgagcacaatgttgaggctcccattgcccagactgatgatcctccggcatcttcagacctagttgatcctccggctcctttagatctagttgacccgtataaagagcctgggactcccgctgttgaattgccttcttttgaggcaaggtgaccgcccaagcagtctttaaacttgcattatttttcaatttttgaacaactagctgactgggcagcctttaatcctgggtttaaatggtttattattcttaatgaatttcatcccttgtttataatcattgtgcaactgtatttgttttgttctttaccaaatgttttgtataggtataggtgccccccaagtgaccgagcagacttttgactcttggtaacttgttttcacaagtatgctttttgtctgttcgggggtttgggcatgaccaaaccttttgtccacatttaattataaatttataccatgctaatgaacttaactcaatttgaattgaaataaacatctttattcatttattggttagaaatatgtctgttaccgtagtaacttac

SEQ ID NO: 309347 - DNA, 1498 bp, Cannabis indica
gtaaatgtttttgggatcccaacatctgtaacttttagtttataaagtttaaagtattacaagtttattttcattcctattgttattaaagtttaaattccgcgccatttttattagtaatcccgtttaggggattagggtttaataggtgacttgggtagcgtgcctaataatttagggccttacaggaagggtgttgagaggttgatgggctgattcaagagattaaattactgatgcaacaccattgtatttttggtttacactttgtttttagagaagccaatgaagtggctcattctttagccaattatgctttgttaaccaaagctagtgtttgggggagaaaatgggaaagggcgtaaaggcccaattagatatattcccaacaaaaataaaagggcccaacagattgaagaaaaacaaagcgacccacgaatagataaaataataaaaagcgtccacaaagccacaagaagacaaatggagcataccaacaaagtgtgaaaaactcaagaaaggacaaaacaagtgcccaccactcagagtaataattaatgacagaactaaaatcgacaaaaagaaataagtgacgacgacacactcagtagtatgccaaaaagtcaaggtccaagataagttaaagccataggtcaaacccataggtcaggcaggatgaacgcaagctcgagcaaggaacaccctccatctatctgactcaccgacgtatgaaccagccctgtgtaattaggaagacgaattccatagagtgaggccatttaaaacaagataaaataaaatcatacttccgtcggagaaaaagactcgacgagagttaattctagggccactccatcacccttgactaaaagtaaattatcccgtcgaaaagaaattattccaaaaaggaataaaacatcagaagacatctagcaagaaaccaacagatccaatgtatacggaaagaaacacctactacccatattgtaacaaggcacgtggcacacagaatttagaaaaaaataaaagacacgcgtcaggcacacatcaaaagaaggacaggtcaagcatgcacaaaaagaacgtacaacataaattagggattctctacataaaaaaggggtagattaggaactaaaaaaaagggaacccacacaaaaaaatagactgtttttagtcaaaactgctagttttatgtggattggggtcaatcccccttgtgcgagtcatgccataaaagcggactcgccttatcctttgtaattgtttggttgttaaagaatcctttctaaaaaaaaagatactacatttgatattttatttaaaaaaaaatacatttatattttgtaaatattatattttaaatttttaccactatatatatattaaaaaaacataattttttcttataaaaaaacttaattagattttttaacctaaaattcccaattaacttgagatgggcctgttgaattttgtgccctaaataaaacccttt

SEQ ID NO: 309348 - DNA, 4073 bp, Cannabis indica
gatcagtgttgatcctgaacaaccatccatgaaagaagaatgtagtggtgatcttgaaccaacacagaaaagtactcgaaggagaagcaaacggagcaatttaacaaaaatggttagcgagggaaaaaagttggaggttgagtacaacaattacggacaaaactgggaaagggagcgacgacaaaagttacccaaattggaacatgggtgcgaattaatgttccatttcgagacatatcgtggcctagagtgagccaggatattaaaaactaattatgggatgacataaaggtaaaattaattctattattcgagttctttactattgattataatttgtacttataactacgattgtcaatttgacaggccgcgttcgatgtatcggagatagataagaaattaatcatttctaaaagtagagagatgtggaaagattggaaaaataccctaatagatggtatttttaaatttaaagatgtggctctccaacttctcgacaagacacctaaactttatgaaaaaataattgatttacaacaatggagagagtttgtggctacgagattaagttcagaatttgaggtgaggaggaaaaaggcccaacagagtagggcttgtaatatatacaaccatcgcatcggccgaggtggtgtaaggttggttcaagaacaaatgcacaaagaggcaggccaccaaattactgaatttaatttgatagatttgaaatatggaaaagacttcgcatgaacacgaaaggcgaggtggagggcccaactgcaaaaattgttaaacggattgtaagtttaattaaagtttaatttcatttgtattaattattatgcttcatcatttatttctaactctatttgttatgtttgtaggatgactttcgtaagcaagtggaagagggtgttgtacaagtggaaggtaaaagggatgtgctaaccatggagttggggacagatgagcatggtggccgtgttcaagccatgggtttcgacgtcacccaaaccaaatatttcaacacaccacgccctaacaagaaaaatgttgatgggtcaaaccaggcatcaattgatttggagagactcgtccgtgggacagaggaaagcaatagaaagctacaggagaaagtggatgagctcattcgtctgattagttcccagcatagcagcgttgcgtctggttccagtgttggaagagcatcaaatgaacaaccccatgctgaccttgcctccaatccagtagcataaccaccaggtcctgccaatgtctatactccactagatcctatagcacaacagtcgggtgttgctaatgtctctacttcatcaccaccgcattttagaaaggattcttctccagcagtagcaccgccacctactggtggggtagttcagaagaggtaatcttaatgttattttacgaattgatctaatgcaaaattataaatatggtcaatttacaaattgaattgttgcttgtttgatttggatttgcagactttaccgtgttggatgcactatcgattggagcctagtgggatggtactgaaggttgcttctgggcacattgtgaaggagaaatatttgaaagatggaaagttctccattcacaatgatgaatacctacacaaagattatcgtcatgtattgatcgaagaagtcaatgtagagaatacactgctactgtgtcccatagctgaagattcattgacaacagtaggtcaagctatagaaacttacgtagcatggccgaaagactatcttacacctgttggaaaatacttggtatgcttcaatttgtttacttaagttattgtgtttagtcattaatgacatttctaactttattttttttttcatacatatatacacagccacccaccaagaaacttcaaaagcaacccgtgaagagaagcagacaagcctttgaagatttactcggtcctccaacacagcctccaaaataccatgagaggctgagtaagccaacaggccatggtcattatgtccaaccacgcaaaaaactagctcaatcattaccttccggaactccgtcaataatccagaagtcgtccataatccaattccaggttgcttatgatctatttggggtcgaagatgactctatttggcttgttaaaaatgacattcacaaattatataccatgcaatacttgggagcccaaccattaagagtttggtgcaagtatgatttctaactcttaataataaacttgataatgttcttttgacagtgacggttattaattatgactttgtattaggcacatgaaagaaatattgttggaaattaatgggttgaatcgaatatatgaatttttaaatctgggtgtgattgctcctatgactaggatgactaatctagacaaatggtttattgccccatacaataatcagtatatgtagatttaaaatacatattttagtatttataactcttcataatatttattattatttatatattaacaattttgtacatatttgttcatgcagaaaaatgtttcattggatgcttgaactcatccaaccaagtacgcaaacggtggcatacttagattcaggcaatgacaacataccggatgatttagaaattcatcataatcacgtaagttctagattcaacattccaatatgtaagtgttttctatatttataaatttatatatgctaactttactttttgtgtagatcgttcaccgtatataatcaaatgataggtcggcctgatcgacctatccagtggatgactcctatatgtcctaaacaaccagacaacaaacaatgtggatattatgtcatgaaattcatcaaaagttttatgaccatagaagatccaatacatgtgttgacacaacatgataggttctctactgcatacacaaatgataagataaatgttatgcgagattggtagattcattacgtgaaagcggaagcagatcgacaacagttgtcgtgttagtcagtgtgtatatatctcgatttattgctactatatagatttgtaaatatatttagatgatattagccatagtttaactattatcactatatagaattttaaatatatttagatgatattagctagtttgattattgtgactatacagatttgtaaaaaatttaaaaattattgcaggggaaaaattgcaaaaaatctgcatttttaccctatttttctaatgtaatgactaaaaaacatcgtccctgaaaaaaagctttttataataaaaaacgtgaccattattataaggtacagtttaaaaccgtcaccgctaacagggtattggcgacggtttaaaactgtgtcccatactataagcgacagttttaaattgtgccttatagtactaggcacaattttaaaccgtgccttatagtactaggcacgattttaaacccttaaattttccctatagtatagggcactgttttacaccgtcgcctataccctgttataggtgacagtttaaaaccatcgagaaattcacattaacgatagttttgaaccgtcgcaaattatgcccattttttgacggtcgtataggtaacgattatagaaactgacgggaatactttaaacaactatttaaaaatgtcagaaaaaactatttttgtactagtggtcatcttctcaaatgtcgatattagtaattactttgtgaataagtttgtaagattaacaattgattgaatatgttggacaccaatatgcattctcttaaaatgtttaaagaagaattcggtgaaataattttaattctatctccttcaataatataccctctttttagttcagcgatgcaagtagtaatatcttcatagagtactgcttatgttgatacttctttattgagtgtaatctatatgttttctgaatatattatgtcaatgatcttactcccacacattcactacttgcttcataaagtacaagtatgttaacatgatttaagccccgtttgggggagctttttaaaaagataaaatcacttttgaaaaaagttatgagttaatatgtgtttggtaaaattttaaaaa

SEQ ID NO: 309349 - DNA, 1210 bp, Cannabis indica
aaatatttatttgtttatatatatgtgtggttaaaaatgtaaatatatttatattaatttttttaattgttttactttaaatatgtatagacaagtaaattttgtgtaaaaatgtgtaaatgtatgtatgtatgttgtaagttaaatttggtacgcaagaatatgcaatcaaatcaagtaatataataataaagtagagtatccttcccacaaagattgactatcaattatcaatcaattaattctttgtttctatttgatcactaaaaagttgtaaaaaaaataaaaaaaaagcaaaataaataattaaaaattagagaattaaacaatgagaaaaaatacaaggattattatggtcctcaactatcctttttttttacttcataattcatttatacaatttttcttctttctattaaattgacaagttgaattaagtagttcataatctggttaggacttataaacccaatctatgtaaaaattacttatattcctatggtaaagtttaatcacaaagaaatcattaaacaaaacaactcataaaatcatattaataaacttgatacttctctcttaaatcaagttacatccataataatcaaagcatattcaaatctcactttttagaattttattttgaattcatatatagcaattatagatggtcaataaataattataaaattaaatcaggttgcatggaattgaaataatgaaagaaagaagaagaagaaaatgaataactacgttacttcataaaagaaattcaagtaattcacataataaggcttaaaagaaaattagctcataaaagtcattcaaaaaaaaaaatcaattaaaaatataaaagataatgaaagatgagaatgaacactatttggagtcctccaatggcgtcttatgctttcagtcgtccttctatgcccgaaattggtctccaagttcaaatgatatgaaagcctagctctaaaacctttatagaccaaaaacaagaaaattttccattttttcgttgaacagtgaatgtcgcgacatagccttgaatgccacgatattccaagcaaaattccaaaatggttgtcattttggaattttattgcgatgtctaatgatattttgaccataactctctcgatataactctgaattagacgattcaagatgttttaaaaagaaaaaagaacgatctagaacttttattcagaat

SEQ ID NO: 309350 - DNA, 2576 bp, Cannabis indica
ctattgaaactactttaaatgcaagaacattgatcgtactctatttcccaatttcaacatgtctcttagagataatcggctcactgatgctttcaaagtaaaagtgtagacaatgggtgccacactctaatatcagatggcatatcgactccaagaccatgctcttgatcttaacatcccttaaacacaaggcgctttactcatctcagttgattgtgagcaaatactgacctgtacacatgtctcaaagcaaatgaccactgaagaactcacaaagcatttacccaaatcgtgtgtcaccaactatgaaaagcttcacgagcaacaactcgtacttcaaaccacaattgagccttcctactacaaaagaagatggatctattgaaattatttttgacataataagtcaaataaaacaacctagctatttttgctcctaatacttcatcactcccatctagccaacacatgaaaatgtcatgtacttgaattcttaaggaaagccaaattatgtttttgcatccttaaatgggcataaatatcgggatatttgtaactacaaaagttgtctagacgatgatgagcccttacgatatcccactaaaggaaagtgactaaagcaaaagctagaaaaagagcgacataaacatcgatccattaggccaaccatctagaaaatttaactatatagtcaaatactttgcaccaaagagctacaaaaaacctacaccagaacccaccaaatgagattcaaatgattcttcaataacttcacagccacaactagttttgcctagttacaaaaaacaagcaaaatagatgaagaagcatggagaaaatttccaacaccaactattcacccatcaatttgatcacttcttgacgcaaatatgataactcctaatacatccattgattattatatacatttccctcctctcaagaggtttagaaaaattgaagagcaacgtaccacttcccaccagccaaagatttaaaatccttctactagaaataccgatggaactctacaaaaggtcttcgcagcagaagaagtattgaattggaaaacataaaatatgatttcccaaaaccacatcttaaaacagatagaaaaacgaatcactcgcacagagtcaatggtcaaacagcaactttaggacacgatcactgaaaagttgacaaacaagattcaacaaacgcatgacgaattcatgaccattataaaatcaaattttgttcagacgtcattattcttggcaaaagaatttgaaataaaaatcctaaaaccccaatacgaatctttgaaaaagcaattttttcaaagagaaccatattctacaaggtctcaatcaacgctttttggaggaaatacaaccgttcttaacaatgccaaagacttctccgatatcacctttcttggtctcttcataagaagactcacttcttcgacttagacaaatgcttgatgaaaatcaacaacaacaacaacaacaacaacaacaacaacaacaacaacaacaacaacaacaacaataacaacaacaacaacaacaacaacaacaacaacaacaacaacaaaaccatgaagggaaagaaaaaaaaacttagataattctcctccacaaccatcctctctattggaaaaagagcctaaacaatgtattgcccagggaactgtgactaatcctatttctgtcataatccatcaaacagatgaataactcaaaaatgaaggaaatcaattatcttcctctgaccaagagacttttgaaacttggtcccatgatttagatactagtgaagagtcttaggattcagatactagtgaagatgacgtacccctcattttatggaccaatgtgcaaaagaatgatcatatttccaaattgagcctattgtcaaaagtgaagataaaagtgaagaagaagaagcagagctagaataaaaccagaatccaatcgattggtcttatggtactaaattaggtacgcaacagaagaatttcgtattatctaataatcatcgtaccatagccacacaggatctccatatgtgtgtacattaaatcaaaacaacaaaatagtaagtttagagtatacctcttgaagcctattagggtatctttaaaacttctcgtaagttgtatcccttaatccaattgatgagaaatatgcaatttggactcacactagtgtcttccaaattgatccaccacacacaaagaatagtgtgggctattaggataaattgtataaccttgttcttgttgagttctcaacacatgagcaagaacaatagagatgaaaaataaagtctcttttctctctgttgaattcaaaattagcagtgtaaaaggattgtgtgatttctctaatcaagcttctatttgtagtagttatgtgacagtcagtaatctcgtgatccgtaagggggaaacaccaggtaagctgtacaatctcacatcgcttgggtaaggtcaagtgggatgattctgagactatgtaggtatgggactgcacagttgaagagagcttaaatggattgattggtactacctatatcaacaaggttca

SEQ ID NO: 309351 - DNA, 742 bp, Cannabis indica
ttttgtttttaacaaagcttaatgaaaatgtacataacattaacaagttcatagacaaagaaccaatttgagtacgttgtggctagaaatgacatagataaatctctcttaagaccaaatcttctaaattgccattgaaccatcttgagagaagaaaaaaaaatgaaaagaaagactcaaacaagaagaagaagaagagagagagatcataaagagtcaatgatcttcagctctctgagtagtagtagtatatatatatatatataagaccatattctaaaggtcaaagcttcttaagtcatctctaagaatcctgtaactgaaagcaggaggtccattcaagttgaaccgatttctttcatcaacttctgaagcagaacataaactaggaatgaaactccgagaagggcttctctgttttcttctcttccaactcataatcatcaagaacttgaaacttggccaagagttgttaccacgcttagaattagtagtagaagccatatctagaatctggggtcctctgggcttgcgtgaatttccatggcggtctacctcaagcttggtgaaatactcaatttccttcctcacaagtgatcctacagtgcctctagtacctattgctattggagctgttgaacccatttctaatttctcctccttattttttttttggttcagagaacttggtggttgagattttggctttatatattgcaattttttttttagttttttaatt

SEQ ID NO: 309352 - DNA, 1045 bp, Cannabis indica
tttttttttttttttaaagggcccaatttttaaaatttcgcacaaggcccccaaaatgcttgggctggccctgccattgggtgtacaacaattttacttaattttttctctttgtttttaatcattatttttttagtttaatgatttttttagatacatattcttaattaataagtatttttaacaacaaaactatataataaacaagaaagtatggtgaaattttttctctctgcacaagttatggaatgttgtatttctgacactgatggtgatgatgcacgtcccccttaggggtacggtttggcaggaatacgcttttgtacgacgaggacacaacgcctcttgtctggaaagacttattcttttaaacctttttaggctttagggttttttattcccgatttcatccattaaaatatctcccttattaacctatcaccttgttgtttcttaccctttctagcaaccaacccgtagatttattctcatttaatatggtgtttggtttttcttctactccaacccgccatctttgtctattgtttgttaatatggattctacggtgatttaaaatcctctggaggtggtgttggaagaggtggttagcctcgtgaaaaatgtggatgtcaatgatttctcttttgaactagtcctcgatgatgtcactgctaaggctctcattcataaatctaaagtgggaaagtttttgtgaagcaaaagattagtaatggtcgactttgctctatactatctaagatgtggaatgttagtcctagatggcgactccaggagattcaacccaaaacacatatcttccagtttgctaaggaagttgaggcctcaaaaattgttgggattggcctgtggtccccctgtggaggctttttattggtgactatgatgccatggaccttgactgatttacaaaatgtgaggatttgtgtaacgtcctcgcttcaagcctccattgggcccttacacccagagactcatggctcttatacacgagtacgccactctggctgcttcctagattgatga

SEQ ID NO: 309353 - DNA, 1615 bp, Cannabis indica
tttatttcattgaaatcacttcttctagtgcttgtttgagtttgttattttgctaatccaatatgccatgtttatttgatggcagaatttataagttgtttgaagagcttttaaggtgaagtggaaactgctcacaagatttcagggggcagaaaagaaaagaatttcacaccaatcaccaaaatttaccatgaataagcactacaaagtttagttaccaatagcttataacatttaattttcctttaaattttttgtatttttttctcttcatactttataatccaatacttttacaaaataacattatatttaactaactaacaaccgtgaagggccttctctagacgcttcgaacgcttcgaactctctctcctctttgagattgcagatgcatgtggttccctccaagtcctcttgttcacacctgcaatctaaaagtttccacactgtgaaaccttgctcaagctccagatctcgagatcttggtggctccgacgactcatccaacgacgaccaagccagctcaactagttctagccgtccccgttgcatcatgctgcgacgcccagaccgtaccaatcgcatcaacaataactccagccagatccccaacctcccctttcgtcatgcatttatgagatttcttcaagtatactttctccctcttgctattttctggtttttgtcaaatcgtatctgcaaaggaggggattaattatgatttctaggtataaactcaaaaggaaatttaatcttctgcctgaccgaagcctacttcccctctgtatggatagtatgaacaccatctcatccatttattattctgcatttttcaatgtttatcaaaaagaatgtattaatctagttaatactctgggtactgaatgtgttttgccctctaccttcatgaaatcctctgtacaattgctctgcattccatttaatgcttgtactacaggtttctatttccactttagggaaaatccgaacctgcgatgtgatactcaaccaccgagtatcatatttattaccctttttggaaattttcctataaatggatcgctattttcatctcccagatcactaaccctttgccatttctgctcttgctttctttgttgctactcttgttgtctgtttgtctgctctaacaaggtcaccactatggatgacttaacaaattcgcttactgttgctttaaacctcacagataccgaaagcacaatccaggccttgcttgaacctattcctactagcccagccgagactgaaaatgccccaacccagttcttcttggtttcaaaactacacacggttaagtcatttaaccgtaaggtttttatcgaaaaaatgaccagcaattggaaccgtatctatagattcccggttaccataactgatcgttcccaaggcctcttcttagttgagtttggatgtgaaggggataggcatcgagtgcttttgcagcaaccttggacctacctcaaccagcccctcctcatggatattcctaattccttggatgtccttaattgtgatagcctcttgaaaatccctctctgggtgcaagttttcaacacaccattccttaagcgaaccgaacaacttgcgc

SEQ ID NO: 309354 - DNA, 1403 bp, Cannabis indica
gatcttgggttaattgttaatttatctcacaactcctaccatatacactgcaattaagagactgctgcgctactaacaaaagtttgacatttattttttaataatagtgaatgatacttcttaaataaaattctggcccacacgcttgaatatcatgatcgcatttgactatgttttacattttggtttagtaagataatcctccaacaatatttaatgtgatttacgatcccaataaacttaaaaaactaaaaaaaaactatgggatattgattgttgccgaagcaacggtttggaaaaatagctgctcaacgttcttgggatcttcacatgattgggcggtttaattaaagttttataataatctaatagacaaggtttggagctacgggaaggggatgcatgattcatattaataagtaatcatgctttcaccttacagcttcattatttacctgaaaatgtcatgtattattattggtgggtacgacgtcgaacagtactttttaacatttctcagttattacatcatttatttgcctcaatttgttgctccataacatttatttaattttatatatatattttaatttttctaaaggcatatatatctttttcttttttctttattttataaaggtgtatttttttaataaatcattcaattaatttatcaataacaattaactaaagtaataacatgcaatcgacacatctcccccaaagacaactagaattaaaattagaaaaataaccaaaataattcttagatcgtgtttgacaggaaaactaaacattaaattaattatattaaaaagattgtagcatttaatcttaagaacacttatattcaatttcatctagccctcaaaagacataacagtagaaactgttgcagcagattcattcaacctcataacttgaacattcaactattgtgcaaggtacgtaactgcactactaacaacctcttcagtctcagagaacttattattcccaaccattaacaacgatttgatggtgagtcatcgaagaacaaaaaagaaccaacaacaaaataaaacaaaccaaagtcacagaaaaaaaaaataaaaaaaaaaaaaaaaagaaacttaaaacactcaaaaccatatactcgcagagacaagactaatcgcaatagtaaaaattgaaacgcaatagcaaaacactaacttgaccaagccatacctatgcccaaggaaagccggcgggcctggccgaagaaaaaagacaacctcttgtagctctaaatttagcaattagaaacccttatttttttttaagagaaattgacatggtatactaacttatgttatttttttacaaaaatactggcaggcggtattttttacttttttactgtgtttttttataagtttcat

SEQ ID NO: 309355 - DNA, 512 bp, Cannabis indica
aaagagttttatttagggcataaaacctaacactaaatccatcctagctgacggaggtctagattgtcttctgcccaggatcagagcaatgattcgtctccacatgagaatggcgtctgaaattgaatgcgtgaagggatgagggagaaaaggagaaccatgggatttctggacatgcaataaatgaggttctcggtaatgagaaattggaggctgcattaaaaaattgtaatgattaatggaagatattaaaggaaatagcattaattaagaagtgagaggaggaagagagagggaaacgacaattgggagtcacagggagagaaagggaaactggattaaccagagaagaagggaaaaccctagaacgttcaagagcagaatttttaaatctactaacattataattattaataataacacttttataacaaatttatacgaaaaatatgaggcggtgattgttgggtttatgccctaaataaaactctgtttcaatgtaatctagatta

SEQ ID NO: 309356 - DNA, 1588 bp, Cannabis indica
cgcggtagccatgggtccttgaatgcccaaacttctgttcaatcaccaatagatcttcgaagaccgcatttaagcaaatcccttccccatatgaaactcgaccaacgatgagatgaaccatcctttttagaggtctctaggatagagaaatttagaaaatatttatgtttcaaaattcgagcatgcaaggaatataggtatataaataatctccacacttgtttcgccaataatctaggtctcatgcgtactgggtgggatctataacatccttagcatgttgatccttagtgggcgctggttgatttacagccaattcaatcattttctcctaaaaaaatcaaacaaattaaatagtcaatttgaatacaaaacaaattgaaagaaatatttagaaattaatgaatatcaatgtaaatttttattagcttgttgcacgcattcgttgcgcaaattattatctttatggtggaacttctgaaaagtgtccacaacatttagaagttcccctatctcgggattagccttaatatctttaaacttatctaaactccaataagtaagacgtcttgttaaatgctgagaaactgaaagtttacgttcatgagccatctgtaaaaattttaagaaaattgtaagagcaaacatattaaaagccaaataatttaatatcgcaaacaacgtcacaaatatgtcgcggtaagtcgcaaaaagaaattgcaaatacatattccaaaatttagcaatatttcacgatatattagcgacataatgatttaattgtttaagcatttttgttgtcaaacaaaatttagcaatgactagtgatatcatcaatgacgtctaacgacaatattatgatgtataacatatcgtgagacgtcgtcaataatattgcaagatatcgtgaaactacaactaaaccactaaaatctcccaaacatatcaacaaaaatgtacatcgtaaaagacgtcgccaacatgccgttatataactatgctttgttatattgtcaataatatcattagacgtcgcaaacgatgtcgcaaaatgtcgataatcccaaaaaacccagaacttaaacaaacatcaatgaaatcaacccaaaagacaaaaaattaacttaatccaaacaaattttcttacaatcaagcacacacagtaaaataaatccaacaacccatttaaaatcacataaaaatttggaaacatacctttttgcgattttgggggttggtttcgtccggtggatgtcgtgtgagtttcatcggggtttcgtcaggcgttagacagagaaaatgtgggcaaagagcagcggttcggtggtgggatttagtgagagttagagatattttatgcttaattttactacttaattataaaaatatctctctcttttttatactaaataaaaaatatgtttacatttagcattacttttacccatcattttctaactcaaactcaactttctttatttctcatggtctgatggaacaatcccaaccatataataaaaaataaaataaatttattttttaaaaatttaagtatagcaaaactaatacataaaaactacaaatttta

SEQ ID NO: 309357 - DNA, 955 bp, Cannabis indica
ggtattttgtcctatgtgcatttttgggctgattattattaagcttaattaattaaaagaagaaggaaaagaaaagaatttatgtaggaattaaaagataatgaccaacaaaaataatgaacaacctaagatagctctctctctcctctcttttgaccctagtagaagctgaaaggaaaattttatttcttcatctcttacaatccaatccagctaggaaccaaccctaattgctttcaaaatctttaaggtaagttcttgttatatttttccttgtttttctcatggttttgagttgattaaattagggttttgtttagttcaggggctgtgatttcaattgatgttggagtatgattttaggttaattattgaggttttttaagcttgtaatggttagatgtaagggctttttggattgcataagttagaagtggtaaagtgagctaaattttcatttgagaatgtgtttttgagcaagttgatgagttatggtgaattggtgatttggatacgttatatttattatattggattgttctagaaaagtgtagcaggtttggtggagctttgattggattttggggtgaaaaaccagatttccccatggctacccaaaaaacaggtcgagcggttatgcaagccactgcaaaccggtcaaccagttttgccagtatggggaaatctcgggttttctcttcgtgtctaatttttgttcggggtatcttttggagtgtaattcagagtattttagagatatttaagttagtttgatccagggggaaataggattagggtttatccctagaaatttgattaaaggttttattgagttttggttgtcgtgacataggaccgggatcgcctagcttgttttccactcaggtcggcccgcacacttgtgttttgaactgaggtaagaaaagtgttatgcatcacttagggttaagtgatt

SEQ ID NO: 309358 - DNA, 1217 bp, Cannabis indica
actaagtgtattggtatagtataggatgtttaaagagtacagtacgatgtcatcaatgctagtacgggtaggtacatagtgtacgtggtataacacttagtggtactcgaggtacgggtaggtacatagtgtacgtggtataacacttagtggtactcgtggtataactctttggttagcaaagatgatacgttaattaaaaattactgtagcgcacttaagtatcagggcgttacaacggttattattgattatttatgttatattttattttattttataaaacggtttgccaataaggccgttcatactttatcataggcttctcttcgtgaggtgtgaggttgatcatgtgttttgtggtgattctttatttaatatatttagacacattattttaggtgatttaatttaataaaaattgataaattattaaaatatatattatactgttatttaaaaaaaatatatcaaattttacatattttatttcataattattaaaaaaaaattactaatcgttcttaataaaaatactataatttatatgttactcattaaatattttattagtttaatattgactagtaaaaatagaataagataatagatttgtgtgtaaataaaatctaaaaacaaatttcgatgaataattaagtagagaaataaaagaaaggacacattattttaagttttctaagactaaataacataaaaaattgaacacgcccctcttgtcggtattacccaaaatgtaaccatggtttatacaaatatatgaaattgttaattgttggttgagtcagagtcatcactcatcaaccacatctacagtcaaaaaagtcaaaatttatattaaatagtaacattatttttgtttttatttttttttaatttttatgggactaaatattttttttttaaaaaaaaattaaatatccaaattccaacagcatagttgaccaaaagattttataaaaaataaaaaataaaaaataataatttttattcacgtttcacataagagtggttaaaaaaacaaatctaataaaataattttgttaccagtaaccagagcatgctcaaggggcaaaatggtcatataaaaagtctatataggcttgtctgcccctatcaaactcatttcttttgcatatcttcttctttacacactcaatctctctctctctctcttctctctctctctctctctctac

SEQ ID NO: 309359 - DNA, 1491 bp, Cannabis indica
aaataagggacatgatcaagggcctaggtggtccaaaaccttcagaccttgagattctcaccatacataaatatcttgccctgacccaagttcaagatgctggtatggaagatgtctatcgagcaagaagactcactagcacacatcaagtacttcaagatgtagcttgatatccaaaagatcactggtcatgtgtggtgtcacatagtcctaacaactttgtcagaaatggcttagcaatggtacttcaaacttgctccaggatgattcaattcctgaatcaagttttctggagaattttacacacaattctcgtccttaaggctcatacaatcatagctagaagaccttgtcgaagtcaaacaacgatgaggagaacctttgaaggattacatccaaaggttcatggccgaggccgccacggtcaaaggccttacagaagaaggccgatatatggccatactggggggaatccttccatcgagtgacttctggaaagatatccaaaagatcttaactaaaaaaatgaaggagttccttcacagagctgacatttatcaaactagaagaagctatttgataatcctagataacgcaagttactaataggcagtcataaggcatcctaaagccccatgacctgccaggcgcataggcatgtaccagtaactctgcccaaacctctagtggtaagaacactaggagcgagcgcaagagtaaaaatgctggaagaaatagtggcaaaaaggggaagtttaacatttttcccacgccacaaaaccataaggacaggaggagaagtatgcatgcttcaccctcctaataaccaattcctaatggagaaacccgaggctatcttcatggccactcagggaaaagtcccataaagattgtcccttcccattaaaagggaattgagcaagagggacatgtcaaagttttgtcagtttcacaatgactttgaccatgacaccaatgagtgtcaaaatttgaaaagggggattgaatttctcataaggaagaacaatccccatctgcgttgttatttgttgaacgactagatacaggcacaagttgcccaaaatggagatctaatgccaccactagtggcgggtcacttaggagtcatcattgccagacccatattataggcatgaccagcaaagctagggagcgctatgctcagacactccgttatgagcccaaaagcaacatcctagctatcaaagaaaggggctgtaagcaacaaaagcttggagagccaacaatctctttcacaaaaggagatgctacccaagtcagtttcccgtgcaacgaccccctggtgatcactacacaaatcaggattatgactgtggcaagatgcatggtggacaatggaggatcctccaatatgaatttatattgaaccatgttattttctgttattaagttctagtttaatttcgaatcttcattgttggtctaacttggcttgtttatctaatgaga

SEQ ID NO: 309360 - DNA, 1324 bp, Cannabis indica
gtggaaattgggaagggtaatttgtggcttttaccttgttgacaagcatgaaaaaatttaagtgtttttaaggaaccggtgtggggtacatgagataatattttgcacaaggtagaagtagaagggtgtcccaatttgcaatgccaagtattgatgtcattagaagcataattatgtaaggcagagtgtgcagaaaagggagatagatctttattgatatgtaacaaattacaagtagtaggactcatagtattgttacaatcaaagaattgatcattattataacaggcagtatcttgactgggggaaatcaagttggtggtgagataacattgttgatgttgctgagatgattcagaaccttcactcaacatgtataacccttctttacgccttcctttgaggagaggagctccggtttgcttgtccttaacaaaacagcaatttctatgaaattctagaaatatatcattatcatcaacaagtttagaaatgctgacaagattcttagtaatattaggaacttgtaataccgattttaattgcaaaggacaggaacggttaaaggagggaagaaaggactgaccaacactagagatttgaagtttcttaccatcccctacagcaagagtctcattaccatgataaggctgtgaattttcaagatgggcagcatcaaaagtaacatgagccgtggctcctgtgtcggcataccaagtgtagtcatccccaaaatcttgaacaagtgttgtggagtaggcttgagggtcatattcaaactcaacctcaacaagattagcacgggcagattggttgtttcttggtacaacccagtttttatcgaaccgataatgacatacaggtgcggtatggccagaacggagacaaacttgacaaataacccgttgctgagtgaacctaggatacccacaaccacggccagaagcaggttgagtgttatcagtcgagttcttggagttggcatatggtcgaacaccaccagaacgtccattgctaaaggtcaaattagcctgcattttgacagccaaatctgtcatagattgatgatgttctaaacggctttcatgagaaaaagtaaggcttgaacttcttcaatggtcagattttcactccttgatgttatccctgctacaacagagtcaaaatctagtccaagaccatttaaaagttgtaaaatcaagtcttgatcatcaactggtgaaccagcaacagtgagagcatcagatagagattgaatcttgtcaacatattcagagatagaaagacttccctttttgatattggagaactggcatttgagttg

SEQ ID NO: 309361 - DNA, 2451 bp, Cannabis indica
  modified_base (1404)..(1404): a, c, t, g, unknown or other
gatcacatttttcatttttattacttcactttcattgcccacattatattcaatttcaagttatcaaaacttgatcaacccatgatcaaatgtttcctcacatcggatcaccgaacaacaacttatgcatgcacaatgcatttaaactttatatcttattgcttctttttcttttctctgtaaagtacggttttttttcttcttcttttcaagccgtttctctctagacatctatttttaatcccaaccaagcatttttcaatgtcatatactagtgatggaagtacttcaatctctcttgctgaactaaaaatgtggatctacacattggagaatgcttcaaaggataatgtcatatagattatagactgattctatatatttatttatttattttgtttgtttgttcctgcaggaggagcaggaagatttagaccaagccctggattagtggctccaccaacctatcaaggctcaacatcaacatactttcaccaacccactgctcaatattcatttccttattcagcttatgggtaagctaaaacgctcataattattaacattaaatcctcaaattattactatcagtttttttcttttctaaattccccctgcatttcagttttacatcaaacattgattcatttatttcttttatggggtctaatttacagttacaccggttattcacaagactccatgtatcccatggtaaatactaattcatgcttctatcatacattcttttcttttcattggattccattattacaactttaaaagaaaaaaaattgaatttgcagaactattatggtgtgtatggaggtcaacaatatccaccttatgtagcaacctctgggggttccggggcagctgctgccatgtaccataatttctaccctttatatgctcaatatgcacagagtgaccaagctcatcaccatggtttcaatgtccaatacccccaaatggtacaatacccgtatttgcctcagcattatggctccccagggattctctcacttccttcctctgtgccaccaccagtgacttcaaccacaactacgccaggtgaactcagtctcttttcttatgcatatacataaagtttatgtattcagcaaaatgtgattaattaaggtattttttctttggtgagatcaagttggaataaagaaaataaaatgaataaaaacaatgtgcaggaacaacaggagtgacagtaacaggaacagttgtttcacaagcctctgcaacagcttccgaacagaactcatcgacttaaaaactttggctgaagagagaaaaagaaaagaaaaacattattgtcttcttacaaggctaacatggatagagtcaaaagggtcatgaaagatcagcaaacagaaaagaaaaaagaanaaaagaaaagaaaatatatatactgattactaggaaaaggattcgttggtgatcagctagcatatataacaagaagaaaggaacacccaagtctctcataattggatactttcattcatggaacatgcatttggggattacttacaaaagcttttctcagctactaacacatgttttgcttttttagaacagtaaggaaagttcttcttttttttttgttatcatcatccttaagtagtttttagcattagaaggataagaatcatattcattttacaattttatgcattggcataaggtagaagctgaatattggctttggattctaccttgcatactgataactagataattattattatcattttatattattattatcatatgtcttggaagcataaagcatccgaggtcatataccctttgtttatattggtaagaattcaaggttcaaaagattgtttttatatctttgaaccacattattccttgttggtcaacaagagaagaaaaaaagaaaaaagtggcaaagcttggacagctttggccagtaacttgtaatttttttgttggttaattgtttatgattaattgataagtcttttagataggattttagtaagaagattttatatatattagtcattatttatttatttgttagctttgcttccaatcagcatattgttaattgctttgtaagattctggtatggtatccaatggtatctattacaaaaatagaagaaaataataagggtcaaaaactattttccttttttttttctataaagaagataagggtcaaaaactcgaaagtgggtgttgtttacttttatgcatcgatcaaagttgggcatgcgggtattgcatcattagctttaatatttcagaaatatattatatacatatatataatttgtattggtgtttggtttttgacaaacattgatggaaaaaagaagaatccaataaaatctatttgatgtgaacttaagtgcgttgtatcaaaatcaccaacagtttttaacgacataagagaagaaaa

SEQ ID NO: 309362 - DNA, 2321 bp, Cannabis indica
tttcttttttagttttattttttatgaataatcattgtacttttttttttttggtaaattgtttttgtacaattattactatgtgacaccttaaggtgcttaataccatattgatctgttacccaatacttagttagttgtaatcttaataatttattaaattaaaatttttggaaggtaatattgaaatgcaccaataatagtatcttaccttaatatttttgttattaatatgtacatatttttagtaaattcgatttgaattttaattttttttacatctaatcttctaatttaattagatatttcatctgtcttcatttaaatacaattgataaaaataaataaaaatatgatgaatccattgattttaatgttgggttggatcttagaagtgaaatcaactctaacaaatctgctatagtcttttctgataatgttgggttggatcttagaagtgaaatcaaggggctgatggggtttcgtgatctaaaccgaagtgataaattccttggaaacccgattcttttctctggtagcaaagtaagggactttggcttcattattgacaagatggctcggagaattgaggggtggaagtctaagcttctttctcttgcgagccgaaccactttgatccagtctgtggccttgagcattcctacatataccatgtctaccttcctggtccctaaatctatttgcctttctttggatagattggtgcgacgtttctggtggaaggggtctgatgattcgaatcggttcttggcattggctaactgggacactatttgtgtcccaaaacggtggggcggtcttaactttaagaagttcgaggaacttaattttgctctagtctctaagcttggttggcaccttgctgccggaactgtctccccgtggtgtcagctgttcaaggataagtattttaggcgttctaattccttctggagtgctcctaagtccaagtcttggtctttcagggctaaaagcattatgtctactagggatttcctccggaatgagacttgctttgtggtggggaatggagcgtctgtggacatttaccactctccctgggtgcccggacacacttgggagagctacttagctgccttcaatccaagagtttgtgaaaaaggtgtcatggctagttccttaatcaatacgggaagtggagattggaaccttgtggaccttgagaattggtttatcccaagtatggtgaaggatatccttgataccccccagcttcagttggagggcattgatgaactcttttggaagtcatccccggatggttccttctcggttaaaaaggcgtacttggcttgcgttcggttccggtgccgtaatgaggagagagtgtggagtactctttggaaggtgaatgggcatgagaggttcaagatcttcctttggcggcttgctagggacatcctgccatttggaagtagaattcagcgaatctttggtaatagctctcaatgtgtactttgtaatgcgggagaggattctcctcttcaccttttctttcattgtgatatcgctgtccaggtttggcgctcgggaccttggggttttcggtcggattcgatgatattttctgataatttggatatggtcaagtggctattacaaccatatggcactccccttgttgatagagaccttgctttgttctctaactatgctatttctctatgttttgtgctttggaagactagaaactcttccttccatgatgggttgagtcccgtggtgaccaaaatccagcaggagatttcagcgatggtggcggattggcctaatgtggactcctctttggtgtctcggcaggtggaagataattccaagttgggagatttctttcgggagctacctcgaagtgatgcctatgtctttgtggatgcggctgtccgtggtgactttgggatagctgctatgattgtttgtgatcatttgggccaggtgattgaggttgccacggccaagaggagggtgtcttctccgtttgaggctgagcttgcggcggtgcagttaggctgctgcagaattctgcagaacgagtggccgcgagtggttctgctctccgattgcaaggtggcggtgcaaggtctctctgctgggctgtcaccggaatggagagccagggggcttttcgatgctacctgccttctcctcaggcagctactgagccttcaccttcgctggatcccccgaagaaggaatactggtgcgcacgattttgcagcctgggctgctgctgctggctattataggctgttttcttcaagggaagtggcaccctttgttgc

SEQ ID NO: 309363 - DNA, 1044 bp, Cannabis indica
gttaggaacatattagattataattatttattttaaatgtgttgcttttaattcaataagagcggtattaagtcttatgatcactatctaacctgcctggcttatgggttcgcaggctaagtcctataaaatggacgcccaacaaaatacaagaagccaggataatatggttgagaccggaggcggtcagggaaatcaaattgcccagaatccccgtggtcgcagctgtggctgtggcagagctcaaggtggacgtcctataaatccaccacaagctcctccagattgggagcagaggtttgcggagatgcaagatcgaatctgctaacaagatgaggaaattttgagattaaggcagcaaggtcttcctgtcgtgcctccacaacaagctgctcaggccgttgcagctctagtggtgccagtagaacaacctgttgctggcaatggtatagagcggttatacgaaagattctgtaagcaagcagcttcagtgtttctaggaggtccagatgtgatgaaggctgagcagtggctcactatgattgaacgaatcttgaattttatgggtgtggttggtaatgatctggtgacttgtgccactttttagttccaagaggacgccctagtgtgttgggaattggtgtctctcacccgggatgtcactgttatgacctggaaagaattctgggagttgtttaatgccaagtattaccatgaagccatccgcatggctaagcggaaagagtttactgagttagtacagactgagggaatgtctgtcactgagtataccacatagtttgatcgtatggccaaactcgccttgggaatcgtcccaatagattttagtaagaaagaaaagttttgagatttgtgccctaaataaaacccatttcaatataatcagatttactagttaataaagatcagaaataacattttaatgttgcatggttcacatgattaatttcatgattattgtttaatatataaattctaccaagtccagaacatatttatctgtacatgattatagtgttgtca

SEQ ID NO: 309364 - DNA, 1178 bp, Cannabis indica
atcagtctcaacataatcaatttccaaagagagttgcgtgatccaatttagtgcatgaaatagagcttttgcctccatttcgtctgatctaaagcatccttgaactggctttgataaagcagcaactacctgccatcatgatttctaataattgctccaacgccaagaatttcgtcaacagtattgactgcaacatcgacattaagtttcagtttgtttagtgatggtggcttccatggaatgccctctgttggtcgagtctttgttgcaacaatatttgtagaagttgcagcagaatttgaaagagttgcagcagtatgtgaagatagagtagcagtaggaacttgagtactggtagctttagtgtagttgttcatataagttgttgcatataaagccagagcagtagcatctttgttcttatctccatgtattattttattacggtcagtccatatcacccacgtaatgcatatcaacatttcaaactcttccttactaaacaaattggcaatatggaaaagataattacaatttaccaaatgtagagcctttgcataatcaataggaaagtaaaattgtttccaaacatccttagcatgcctacagcagaacaatgcgtgcccaatcgactcccaagcttgtgtacacaatgaacaaattgtcgaagtcagaactttcttttggaccaaagcaatagccaccggtatagcattatgaatcactctccaagcaaagattttaatctttgagggcagcttgagattccaaaaaaaattctaccattcactatgtgagtgagatgtagaatctaactctttgtcattcaaatctgaagctagatgaaaaccagatttaaccgtgtaagttccagcagttgtgtaatgccaaatgagcttatcttgagttggaaaaaaactcaaagggatggtcaagattctatccacatctatatccccaaaatgagtcttcaacaagggcaagttccattctctggtctctgaaatgaagtgggaaactggcaaagtggctggccggacatagttaatgggacaaaaatttgaaacagcagggatccacgggtcagttgcagcaaagacattgtaactattcccaattttatatcgaagtcctttgatgagtaactcccgtccccaacaaattccttgccaagttag

SEQ ID NO: 309365 - DNA, 1073 bp, Cannabis indica
ttttcaataatagtatattcatgtttataaaaggaaattctaataatatatgtatcttacaagtagtcaagtagagtatgatcttaatcattcatcaataattaaataactaatcgataatgtatggaaagattctttaatgaatctataaaatcgtaggaccaatcttgaatattgtatatacaatatttatgtgagatgatggttagtcttgcttgtaagaatgaaattatatatagttgatgatattttggatatatatatatataaatataaataggagataaggatatttggaatcttatttaggtagttataggccaggcatatacaagttggaaattgtgtggtggaacaaagttggaatctttcctaaaattttccaatgggaaactaaaaattaacttttattggctaccaataccatagcttgcctcttatcatttatacaataatatatatgttatgtatggagtagggtgttcgggtagtgtaagttgtaatttttttttttaaatcaaattacatatgttgtttttgtaatttttttaaccacaagcatattgcgagatcttcaaacggcaaaaaatcacattacgaaaatatagtgtggtgtggtacggtttgagcagtttacattattatcattatcaaatattataataaaaattaaaaaaatcaatctaataaagtttagcaatacaaaaaaaaaatcttattaaagtttaaatatcataacacatataataaacatcaagtcattatattaaattgtctctaaaaaagaatataatatacacatatgttaaatatatttgtttcatatgaaaaaaaaaatatattgtaaaaattagtaactttataatatatagtatgatgcggtttgaatcgcaattattaaatttaaaactacaaatcacaccacaccatatattttttacatgatgtggtacgatacaaagagtttatacaatgtgggcagtttgatgaacaccccttatatagatgaatcaagatcacctgtccaaatattatatcccatattatgtctaaccaatataatgatgacacat

SEQ ID NO: 309366 - DNA, 2124 bp, Cannabis indica
ataatacaactttactttctttttagaaaaaatggtggacgtgtttttggttctacatctgtgtagctgtaggctgtacctgtacctgttcattttgatattctcttcattgtactctacatgccagaagttatatagttgttgggtgtagggagggatggatataagatactaaaaaattagtaggaatggagaaaaggaaatgaaataattacaaccaaacattacattcccttcatgagatctctatacaataaaacacctttaaaatgttttagaaataataaacaaagggcatgtatatttgttatttttgtgcagttgtctggaatccttgggataagaaggcaaaagctatggctgattttggcgatgatgaatacaagcacatgctgtgtgttgaggctgctgctattgagaaacatatcacattgaaacctggtgaggagtggaaaggaagactagagctgtcagctgttccttccagttactgtagtgggcagctcgatcctcaaaaagttctccagagcagttagagttcaatccagattatattgtacaggtactacttgattttttaacctgttggctctcgcctttttgatcgagtccttgaaaacttttgtttgagagtttagaaggcgttctcagtcgaaagggatcaacaaagaactgaaacaaagaacatcaagaactggataatcctctgttttatttttgtttactatttgatttgtgacttgttgaattggaaacagtacaatacaaaccattgaaacacatatggtgttctgttttctttagaaattagcaagatttcattttaaaataagtcttcccaatatgctgaaaaccacttgtaagactactcgtgctagtattgaaacacaacacactcaaatgaagagcatagcttatcaatatgacaatatgtgttttaattattgaattattttgaatccttttgcaaatcaaaacagaaattgacattcacatatagcaattagaaagcaaagatcaaactttataaaagcatgtaacttgaaagagtcatttgccctttaaagaagtacaaaaccaaaacccaaatgaaaacattaagcaaaacccataataccacaattctctaaggaaacaaaatatggaaaaatagcacaaaaaagataggtaaaacaagcaaaactttgcagtctttcaaccttctgctagattctcggtctcacactccacccaaatctgaagccaataacaaaccaattttagttgcacatactcttatagcataacaaataacatagagaaaaactttcttaccaaatagctattgtagatacacactcagtttctgattatcatttccctcaatcttgttctagagatgtaaaccaaccacgccaaccgcgttcttgggatcactatctccccaagagagactccaatagcaaacccactaacaagtcctgccaaaatgaatttccagtcgagttcgattgcagattcagaagcaacatctttattaaaagcagatggtgggagcagtgcttcgcatttctttgacaatggttctccacagagtccttgattaccctcaaatgagttgttctcaaacgtatggaattggttttcttgtggtataatacctgtgagattgttgtaagagacatcaaacatttggaggaatttcagttctactagttgacgaggaatttttcccgacagttggttttgagaaaggtctaacgattccaactctgttagtgtccctagtgatggtggaatgtgaccgctgagcgcattgtttgagaggttgagtgagtaaagagccttgaggcttccaataattttaggaatttgaccactaaagttgttgctcgataggtcaatgacggctaggtttattggaatcttcccataatgtgttgccacacttttcatcacaattgtggttgaataatcatagccagtgactgcttgaccaatagcatttgagttaaaagtgatattttcccatgctttcatatatgtcaaattgctcatcttgaaatctttcatagaattccaagagaacatgtattcataaggcaatgaccctatgaaataattgtgagacatatcaataatttg

SEQ ID NO: 309367 - DNA, 1420 bp, Cannabis indica
caagtattttatttatctgttcaacttttagggctaagcaaacctcttgcatgcatgttgggtagtttaattaaattgttttttaaataaaaaatataaaattgacacaatctgaatgataattaatatctttgttcatttattgttcggtatgcgttgttaccgtggtaacgtagatttactaaattctattacatgatttgtctaatctttagctaaattaaatataaaatattttggatggtatatcccaaccaaaagacatcacttaagaggaataatttttcaaaacatattgtacttttaatagtggccatcaagctttagcatcagttgttctttaaacccttgagcgaggtctacccagaaggccaccacatcagagtgatgtttaaatattatgcaattatgtagaccttttgcatttattagtagtattttcttagattctcctcattccaataccgtggtacaagaactagctccatgctttcattatactgacaaagcttgtatgctcctgatcatgtaacttctgttacttggtatggccctttccaattagctctgagaacttctacactgtccttagtgttaaggaacactcttctgagtaccatgtcccccacaaaaaaaaattcttacctttacttgcttgttgaagtaccgagttgcttttagacgattagcttactactttatttcttcaatttatcaagtgattctgttaggagggtatggtttgcttcttggttgtacatcaatattctgtgggacaaaggttgcagttccatgggaaacattgcttcataaccataagcaatagaaaaaggagttttcccagttgttattcgctttgtcgttctgtacgaccaaattacttcgcgtaattattctggccagttacccttggctttttcaagtcatttcttcatagtatcttttagtgtcttattgactgctttgacttgtcatttgcttgcgagtgtgcgactgctgagaagctctttataatcccatgtgtcgtgcaaaagtctgtgaacatttggttgtcaaatttttttccattgtctaaaataatcttttttgtgggagtctataccgacatataatgtttgttaccataaaatccaaacatttcttggaagtaattgttgttgatggttcagcttccatccacttggtgaaataatcaacaaccactactgcatattgcactccacctttcgtatgggtagttgtccaatcaagtctattctctatataggaaagggccatgggctctgcatttgtatcagctcatttggtggtgcacggggaatttcggaaaatcttttgcatctgtcatactttttcacataagcgatgtattaccttaattaaaaactatgatgtcgagtgctgatattgtagcacaaat

SEQ ID NO: 309368 - DNA, 777 bp, Cannabis indica
attaccaaaaaataaaataaaataaacattaacagatttcccaaccaaagaaaagtagttaccagatttcaaaatggtatcgagaaccttagtagcctgttcttcgctgagcggtttagtctgagtaggtccggtacaaaccctagcctgagcatcaagcaccgtctgattcggcttcggcaactccgaactccgatacgtggaagaaacagccggattccgaatatccgattcggaaagtccgaactggtcgatggtggccgattccagcacagctctcgcagtgaaacatgtccggcttccaatccgaagtccaagattcttcgagtggagattgaagagtgttccgatgtggtgattgggagtccaattaggggattttccggcgcaaagggaagagatgggaatgaaagatagttgtggattgagaagagctttcatggcggtcatgacagtgtgtgcttcgttaaattcaactcaaccaaaccaaacggctctatacgttaaaggaattttcttgtctgtgctatttatgcacgcacgccaatatccatttttacatcattctctttgtacagttgctctttctttttttctcttttcgaattttctaagtactttttgttaacattttatgggtaagtgtttatttatttatttttttttagtatgggtaagtgtttgatgtgattaaatttataatccaactcttaaaatggatatattgatgcactttttctgttttagcactcgaaataattttgggaaaaaaacaaa

SEQ ID NO: 309369 - DNA, 637 bp, Cannabis indica
tccttcgccacagagccctccatcgcccgattagggaatatgttgacggaacaagaatataaatgtgtttgctagggttcgaggggcaacagtaaacaaatcatcaaatggagcttgggtcctctgaaaccctgtcgagaatttggggccaggatttcatatgagacagagatggtttcggcggccgatttgtatttattgagtaatgatatatatatacacacataacacaaaaacttcaagaaatcatatttattatttaataaagataatacacacacaaaagtaacttgccactttagcatttctctatgccatgtcccatacttagttttactttttttattttctacttgctgattggttcaaaactcattttttgtgaagaaacccaagaaatgtttcatagatgtaacatacaagttaaagattgaacaaaactaaatgtatgggatatttatattaagcgaattagcatctacccattttaaatttaattgcatttatttccgttgtatttcttgaatttatggtaagccattttcctaattaactgaaacatacttgtacaaaaccacttggggctagctcaagtggccataggtgggtgtgtgagtgttggaggtcctgggttcga

SEQ ID NO: 309370 - DNA, 450 bp, Cannabis indica
gggcataaaacccaacaagactcactataagttagtacggtaattcataataaggaattgtcaggaaaaagattgagaatgtgtatatttcaagatatgtttgggaaaattattaagattcccactgaagaaagaacgggatttcaggatcaaggtatgatctttgattaattattgttagttgaggaatcaagaaatgaatactcccaatttagttataggtactcggtatgagtagtgttgcttttatcatatgcgttgaattagttaactttataacaatggttacgtgtaaacgattgggaaatctaaaagttgtattagtttaagaagaattgatatatgctaaaataagtttagatgaagaaggttcaattgacatcaagtgtaacaccccaactaatataggcgtgttaacgtgatttttaacgtactgtgcaactcgttgct

SEQ ID NO: 309371 - DNA, 1199 bp, Cannabis indica
tgaaaaaaacagcctctaaaggctaacattgtagtagtgataattaagggagaaaaagagtccgtggattgataaatctcctcaaaatactaatttatgagagattcaaggcttgtattccaactctgctaggtgccattattgtcttgtaattgctgaatttgattcgatcttttgcgagcactaatcgtagcattattgtcttgttatttttttcttcgaatgcaaccaatactgttttgagcgttgcttccaatatagttcttgctgcgctaggatctcaaaataattagttttttcaaccacaaagttttctgcatcaaagtcattaacaaagtttttgaattttgcaagaagcttcttgctttttgacagccgtgacttaaaattttcagttaaatgtcgaccctaatcagccaattgaatgccacatagctcaatttttttcataatgttctccgtctggtttgagcaccagacattggacacaatctgatgacataaaggctctttaagccatgcattttcataacggaagggagcagcaaaagtagtaccagtaacagtttcaggaagcaaaaatataggcgaatggtcagatgatgaaaactcaagattagttagagatacctcattataaatatcgagccaactttgtgtggccatagctctatcaaggcgaatttcgactgcacggttggttcctctacttctttcccaagtataaggataaccccttagctctaaatcaataagttgacagtcatggacagcagactgaaaaccagagattaatgaagaagggtaaggacgaccacctttattattgtcattgctaaggatattattgaaatctccaataatgtactaggggaggttcgattcagtcgccatagcacgaaggaggttccaagtacggtgcctgagcttttgatttggctcgccatacaaaccagagagacgccacgatgccataccagaaatgcttactaccaaatcaatatgattgcgtgagtaatttagaagttgggctctgtagaatcatgccataacaaagctataccaccttttctaccattaatatcaattcagaaacatccttcaaagcccaatcggtttctaactttttcaacaacatcttttgcacacaaagtttcactaaggaaaacaaactcgggtttcttttggacacaaatgtc

SEQ ID NO: 309372 - DNA, 887 bp, Cannabis indica
tatccgtagtaaagtaggttctgagatatacagtattgtggtcggttgggtgaaataatatgcatgttagatgattttgaatatcgtaaatatttatctgtagtgaagtaggttctatgagtacatgtattgcggtcggatgggtgataaatttttgtattgctaaatgttgttgtgaatgttttattattttggattaagttttgttgttattaataacttcaatttttgtgagaacgttcaattataattgttacactatcaacattttgatagaattaggaccagttactagttagtaatttagtatactataattagttacttagttactagttagtaatttagagtaagattagttatgtaatatcccggaaagtataataatatttaattgggcatattttattaaatatgtgattaaactaattttggagtgagataataatattacttgagctaaatgtgtggtaattagtgtgaatttgataaatgattagataaagtgtagtttattaattacggagattttatcggattgcgtgggtatagtagataccatttgtgaaataaaatattattgaattcggcggctttggcgactcgacagagtggttggaaatatcacgacaattaagttgtgttgtattgaagttatatcagattaggttaaatgttgaggagtaggttgaaccggaaaagttaagaaataactaaaatacccctaggttatattatagttttaagtttcaagggaggggtagaataatcattttacaagattaaacattttgtcttctagtgttttatttaggctgagattctagaatatatattaagtgtatataggctgaatataatattaggagataaagattgataattca

SEQ ID NO: 309373 - DNA, 1922 bp, Cannabis indica
atgtctatgtagcatagacttacgtgttacgctcacacgttcattttacaattaaggctttagtagggtttatctcagttatagttaccgagtctaacctggttatgcctagcttgcataaccctattcatatatacacataatccatacattacgttctttaggtggtttatcctgatgatgtatatcaagtctaacccagttatgtcttatacacataactctaaacatatatgcgtgcatccaatatatactatactatataaaatcttagggtaataaccttaactttcatactaaataattactcgtataatatatcatagcatgcttaaaataacatctattgagggtaataaccctaactcatgctttcactcgattagcaatgttactgaacatcattgctttcttaccttcatataaattctagggtaataaccctagactgtattattattaaactcaaggtattaatctaccacgtctagcttaattgtgccttaggggcataatcctttattccaacatatttagcatggcataatactcaaaatctcttaattactagggtaataaccctagaccatataaccgctcattttagggtaataaccttaatcctggttctcaataaatcataatcataatataaaacatgagggccactgctcttaactctacgtgcaaactactgtcttacctgatgtcccgcaaacgtggagattccaaatccccaagtgctcatgactaagtgtcggtaatcctagtcacaatttttaggatccacaaaaatagggttaatccctaaatccacttccacataatacaaaattggcattgaaataccagataataatatagagctcgaaacgagctttccaacgatatatagaactcttgaaactgagttcgaatcacaaagttatgaacattcgaatatcgcattcgaatatgcccaaaaacaatgggtacaggccgcggcactccccacacgggccacgacacctgggttggaaacccatgcctataacagggggctggccgcggcgctcaaaaagttgggccgcggcccctgagttccaaacccaggaaaccccatttttccagctcgaaaatcatgctaaaatacacctaattcaacccaaacttacacacaacccaaaatcatcttcacaaattagcaagtatcaaagcagggcattaaaatacatatttcatgcttaaaattcaaccaacattcatcaaaaattcatattaacaacatcctagctaagctccaaacattgagctaaaattccacaaaacacaactcaaccatatgagtaacaagctgaaatcacaagcttaaattctaaagaatccacttcgatttcagcaactaggaactctcaatttcacaatttaaaacctacacaaagcaataactaccaattcaaacacaactatgtctacaatatcataatcaattccaatctcacaaacattcaattcaagaacctaatccatggtttcacatattttttacagcaatgcaactcaaattaaaaatggtagaaatactacctcaatcttctcacaaattcaaggtgcaagatccccacaaattaagcttgattccaatacaatctttcaacaaattcaacaatttaaaaaataataataaggagagagggggtcggtttctttagagggataaatcagaaattatcccactattcagctcaaaaatccttttgttgaaagtaattagaatatgcaaaattacaaaattgcccttagggccatatttcacacacataagcattcaagggcacttaagtcatttccatcacatatcattactcaaataatttccagaatattcaaataataataaaatgccaatgtaaatcccaaaattgtatttcgaccccgaaccc

SEQ ID NO: 309374 - DNA, 1128 bp, Cannabis indica
agcgcattttgcaaactgcactggcaaagatgtcaaagttttatcagcgtacatttgcagtagctaaaatctaacttttaccaacgcatttacgtgctgggaaaagtcatttttgccagcgcttttcattttatgctggcaaaagttctaataccaacattgatttgccaacatatcacaagtaaattctattttaccagcctaataccaacttttgccagcacaaaaatgtactggcaaaagtgacatttcttgtagtattataattagttacaacttttttacttttagttataaattttgttgtgactaaaagtaaaactttttgtagtacccctcgaccgagtttaacatatcgggggctcgtcgaacaacctggtctagctagggagtagatgcaatggtgctgcatgttcctgtgtagttgtgggggaatttcttagtatcctacttgaatcgaaaattaaagtcctacaatcgtataccaatattgtccacacgttttgttgtgaacttgcaaagcaattaccaacacacatgtcaacaacagtgtgtttgggagcactataaatattctacagaatatactcttctggctcaaatttttcacaacaaaacaaccttaatgaagaataagaagacaattttggtcaaatatttcgtcttagccaagtgaactccaagttatacaatgtatgtatgtatgtggcagttaataatgtcatcactacttaataattaattgataattaagaaaaatcaatgagtccaatattataacgcggcaatatatatattcataaatatatatatgagaataaatatagtactagaactgagctgaggatatatttatagaataccaaaattattaattattattattattttttttttgcttttagtcttgattaaataaggagtgagagaaaagagagagagagtgagataaatctatatatatatatatatataagatcgatcattcagaaaaatattatataattatggatttatcgcacaaaatgaatgaggagagcagtttgaagaaaggagatcacatctacacttacacaaacaagctacacacatcctcccttcatggtaaatatatttatatataaatat

SEQ ID NO: 309375 - DNA, 3325 bp, Cannabis indica
agagacatatcctattttttgcacgatgacatggcatctagctggatgacacgtgtcctacattcctcaatttgggcagatggtttcactcttagcagcccataaggattgatatgaaggtccaaattgcatatgcataataggatgttcggatagagttgctgagggacatccgaccaacctgaatgtatgatcaactcgcatgcaccagccaggaaatgtgagttggcaatttcagcagtgatcagtgatatctttaagtttccatgacacgaaataatccctactttcgtgggattgactcgtatcttcagagaataagggccatcaacctgagctttcccaaattcctttatcgtaattatggaaacatatttatttcccattttatgtattatagattaagggaaaccattccaatgtaatgacccctataaatagtggtctcacctcactgtttgaggacacgaattgaatcaggaagaaaacactcaagagagaaatagggaaatagtgatccaagagagaattacttagagatctattgtaagagcttggagaaaggatacattgttctttgtttcacaagtcaatataacctaaaagggagtaggctattaccacaattaaggggtcgaacctctagaaattatggtgttttctttatttacagtttttttttccattgtatattttatctaatcgcttaaatttagattcactatcattgactagaagcaaagtaaatattttggtgctttcattgagagcaaagaaataagattttttgttttaagcctttaacaggatacaagattgttgtacaaactcgaaggggagttcaaactaatcaagttgaactaatggtgaaagttccaagcatggagacccctagaatcgcaagagatctacctgggatgactcccggataagttaatacacaaccatcgacggtgggccatggagtaacttcccctctagctgggttcactctaagtatataagaaactgggaataccagtacgacggccgagcagaccacccctggcactgaaatcccattcaccaccaaaactcgaaggccagttagagatgatactgaacttcaaaacttgcgagctgtgttggggttactgcaaggccacaataacatgttgcaccatgaccagcaggatatccgagcaaccatcaatctttcctttgatgaacaaagacaccagttcatagaatggagggattgagagatggaagtcgtgagagcccagtagatagccattgataactgctctaggcaagccaccatactgatcagaagggcctaccaagtcactggtcaacaaccagtgactgattctagtatccccttgggatcccaaaatgaatcgaaagggtatataggtgactataccgcacatacttatatcagtcaaccgtccaatctaaggccacaagttcaaactatgggccaaacggtaaatgggaagatcttaccaaactgtcccttgtgaggaaatagttagctaaacaaccatacctagatagaggtgtcaggccaacctctcaccaagttggtcagacacaaagacctcttggcacattggtgttcgaccgactaggtaccgtgcacgacctcagaatcaatttgaactacagaaggggactggacaggcaaaacattccacctaccattcatctgaataaccatgtctcaggtccagttctaagagatcctaatgtgacatgggtagtcaacaggctggccaagttcatccacatgtgcaagcataaatagatcaacttaaaagccttgtacaaagcctgactgaccaaaaactcacagatcttgaacttgatcgagcaagaggatccccctttttgctagaaatcaaccctcttgacctgcccccaaagttcaaactgctagtaggaagatgtatacaggaaaagaacattttgagctaaacttgtgacttttcttggagctcttcaatcaaatctaatgattcctggagtagagagtgattctaggctgggttgtaagtgtctcgtctgtgagaagggattgtggtttctaccaggatgaccgcttcacacccaaaagccattgaatgcagtgtgtgccccgttgaagttctctctattgtttgatatgcctagaggactcgtagaagcttcttcagtaaatgggctttacaagcttggagttttttcttcaatgctgtcttcaagatcttgttcatagcttccacttgtccattcccctatagtctggccttaactgagaagcttttcatgattccatacaggacatagatgtgggtgaagtgttcactatcaaactacttcccattatcaaagacaatcttgtgtggaattttgaagcaacacacaatgttcttaatgaaaaaatatagggccttcttggaggtggctgtattcatgggctccgcttctacccacctggtgaagtagtcaacaacgactatggcatacttgactcatcttttccctgtgaggagggatcctactaagtttattctccaaacaacaaaaggccatgcactgctcatgagtgtgattttggttggtggcactcgcagaaccttggcgtatctttgacactgttcacacttccagatttactctatgcaatccttattcattgtgggccagagtaaccctaacggagatcttcttggataggcttggttagaaagtatggtctccaaagaaaccttcgtgaacctcatggatgatagcacttattttagttctaactacgcaccttaggtacgacacagctaaccccttgtgataaagcttgcaatataatatcacatattagggagcctagtactggaccttctaagaagcagctttgttactcaaaagttctctcaaactcaaatattggtaaatggggcctatcaaggaattggaatgatcaatgatggcatttaccctctgtgcttcaatacttggagcttccaagtggcttataggcaccactccatattgcacgatctccgggtctgtggcgagttttggcagcatatttgtaaataagttttggtctcttggcacctggcatataatatgaactatttttggaataaatttttttttcaggtttggtgaccttagagactcgatcgagggccgaaacgtcataacatgttaaattagtgactttgatgggaatattatgataagttgatagtatacttataagggtaattatgagtagttgagatttaacctaatgccctagaaggagatttcttagtggctaagaaatggtaaaaataacttttattaataaagt

SEQ ID NO: 309376 - DNA, 832 bp, Cannabis indica
aagtgtgggccctaggcacgggcctagcccgcctatgcctagggccggccctgtctcctacgtagaattctacatttctgcattttagatctgtatagctcttttgcccactgtgagaggcaagcattgtggccttgatctttactatagcctcgttggtctgttgtacttattccggacctaaatatttcctttctctagtttcatcccagtgaattggagatctgcacttcctgccataaaacatctcatagggagccatctctatagtattttgatagtttatgttgtatgaaaattctattagtggtaagtactcactctaagagccttcaaaatccatcacacacgatcgcagcatatcttttaatatttggattgttctctcggactatccgtcagtctaaggatggaaagccatactgaacttcagctaggtacccatggctcgctagatactttgtcaaaattttaaggtaaacttcgcatctctattcgatatgatggacttcggagccccacgtaacctcattatttgtttaacatacaaatttgcataatgatcgactataaaggttgctttcattggtagaattagaaaatgtgcggacttagtaaatcgatccacaaaaccccatactgaataaaataatcttgtggttctaggtaacccaaccacgaaatccactgtaatgtcctcccatttccacttaggaagagtcgaaggctataataaccctacaggtctctggtgttcagccttaatctattgacaagtcaaacactaggatacaaattctaccacatccttcttcatcctgcaccaccagta

SEQ ID NO: 309377 - DNA, 1974 bp, Cannabis indica
catcactaccatatgctaatttttattattagatcatcatcaagggagttacaaaaataagttcctggtagctcgcagcaagacgcgacaaatataaaaaataatccatcactaccatatgctaattttcattattagatcatcatcaacggtaaaaaatactttatttacattttatctcctatttttgtgggcttttttttacctataaaatgaaagctcccttagttcatttttcacattcataaactacccacaagtcagatcttctctctctaaagtttagaattttcaatacttagtctattgttgtaatcaccgtctcgtgagaaataataactcaaagtagatgtagccctattgctatcgtgatatagggagtgaactactatatattttgtgggtgtctctaaattatttacttaaactcattaatcatctcgccaatttagcgagctgatgttggccacttttcatgtcaacaggttgtgatactctaatttcataaacacttattattttaaaatttgagaaagaaaagttatatgaataagaattatggaggtgaagattatttggatacacaagtgagatacagtggtgataacgattttaaatatagtgatatctataaatgataagtggtgatgataacagttttgaatctaattattagagactacaagatactgatgacaacagttgaattttctatagatttatcaattattattttttatatcttcattatgtgtgaaaattttttcaatttaaatttccttttcactataacgtatgaggatgtcactattttatgatgataacaacttttaatgtagtagcgactacaagacgatgatggcaacagttttaaaattatgatgaattttctatgataaatttatcaattgtctttttaaaattttttgtgtgaaatgttttcaatttataatatcttttttaatataatgtttgaggatatctttattctataatgatttttttttcaaaatattaatttattttttcgagaaaaaaaataaaagtttaatcgaataattattcttattatcaaaaaaattaaataaaaaatgtcatataattttatgacttaattattacaactgcactcttaaataaaaaaattattacaaccgctcgtaaaacgcagtttgttacttagtaccaaaaatggaagaaaaaaatcactgtagctaattattttgtttttcttttgtggtgtatattagtggataatggacatgtgatcggggaattataagtaaattaataattcatcacgaaaattaaaattaaaaagtataaattattatagaatataaaaagtcttttatattattattcatttgtgaaagatatttaatttttatttatttatcaattactattaatcactttacttattttacgataaaattaaataaaatatgacggaaggactattttattgcaaaagttatattctaagatgtattattaataagttgtatattacaaggacaccattggatagtgtaaaaaattggaggcaaaaaatgtcaagaaaaattttatttacacccccaaaattgttaaggacaccctattttaataatttatattttatatatttaattgtactaattttttttaggctaattatgatttatcccctgaacttttacatgtactaaattatgctccctgaatttttaaagtcgttaaaaatgctccataaactattgagattgttagatttaaagacttttatctaattttattcaattttactatttcagtgattgtttagtactaaaccatgcttcccatacattgatatataccgaattatgccactcaaactttgaaatgtactaaattatgtcccttgaactttcatccatgttaaattttttttactaaaattagacaaagtccttaaatccaacaatctcaatagttcaggagtatttt

SEQ ID NO: 309378 - DNA, 898 bp, Cannabis indica
atcatcaagaggagatcatgactcaccatgctctttgaggatttccttctctttatattcatgtaaaaaaattgtgatttttatgggaatctgatggctcatttttcggatttctatatttatactgaaataatgtattgatttgtaaccactaaccaattaaaaagattgaagtaatctattcgttgttacgttgtggagaattttgttccaaaagaataagaaagtgttgtacaaaaagttaacaatcatacacttatatggtttcatcgttgggtttaattatttaggaatttgtttgtaatttacattatttttaagtttcaagttctcattatttttgaataacggtgtagcccacacccttgctaagtagactttaatggttaatactaacaaagtttagtattctagtttaatggttaataaaggtgatttttgtctttaattaatcattttttcctataaaggaaaattaaaaaatattaaatactaattttatatacttaatctataaaatgtcaaaatttgattattaaatttattaatagaatatcaaaaacttctattaattattctttatatcgtagaattatgtgtgataatatttttttaaaataaaattcatatatttattaaatatttgattttgatagtaatcaactttttttaaaaaaaaaaaaggaattgttttatatattggtgggatagatagtccctatatagtcacaatcacaagttagagttttttttaaacagtaatatagagtgataatgtattgtcatagaataatttaagccaacatgagtgtacaaagttgttgtaaacttagtataattaataggctaattagtattttactccttgtaatttcgacatgtactaaattatattttt

SEQ ID NO: 309379 - DNA, 2908 bp, Cannabis indica
aaaataaatttccaacaaaaccttctactaatcactgatctaatagggagagctctggacaagatacaccaccagagaaccttatgacgctccaagattttactattccaaagcttattccagagtgaaagagcgacctcacagtgaggagccttctccttggcttgggtaaggtaagcagacttacacaagaatctgccattactttctagagtccgaacccaccattgcagcatccgtgtcatgattaaaaaggcagtttagtttgcggatatcccaatcaccattagttaacgaaagatcaacaaccttgttaaaaatagtatcaggagcaccaataggttttgggaagaaaccgttgctctgagggatccaacgggtcccccccccccccccccaaatactcgtatctctaccatcagccaccaatttataagctcctttccttaggatagaattggcttttacaacatttttctaaaaccaagaatccaaattcttatatctacaattaagaaaatccatcccttttagatatttagcttccaaaattgggcaacacagagacttacacccaatcagcatgttccacccccattttgccaaaaaatcctagttcatttctctagtcttccggaaaccaagacccccaagagatttaggaagacacaacttatcccaagctcttaagtgaagcccatggttccctctttcaaaaccccaccaaaaatcacgcaccaagccatcaattttactaacaaggcaatttgatagtttgctagtttgcataacatacataggcagagacaggcccacatatttgatgagggtatcacgccccgcctgcgacaaggtttttgccttccagccttgtaacttagaagtgagattatccaggatgaagttgtaatcaacatccttctgtcttgatctaaacaatgggaggcccaagtacttgataaaacctacaggagatccaattctcaaagcttccctgatccctcttttcatactaggaggagtatttttgctaaagaaaattgtggttttgagcttattaacttgttggccagaccaagcgaagaatctctcaagatagtgccaaacacctttcgcttcattcatattggctctaccaaccagaattaggtcattcgcaaaaaagatatgagagagaaccggaccgcccctactaagtcttataccctgaataatgcccttgcaaagagcatcctttagaagccttgataaaacctcggcaacccaaataaagagatagagggagagagggtcaccctgatataagccgcaagagggcttagtcaaaccaaccttacctccattaagacagatattgagagtggtggtggagatacactgggagagccacttgcaaaacttctaagggatcccataacaagaaagcacatggtcaattaatctccagctcagtcgatcataagctttaaccaggtcaatttttatggaaaagaaaccctctttacctttcttcatgttgaatgagtggataatctcttgcacaatcacattgttatcttggatattcctcccaagcacaaaagcaactttggttaggcaaatgagagaaggtaaaataggtttgattctatttgcaatgattttggaaataaccttatacatcatattgaaaagagaaatggacctaaaatgattggttctttttaggttctagaaattagggatgagaaatatattcatagcattgatgcccttatgcatattaccagtcacaaaaaagtcagaaactgcatcataaaagtcatctctaacagatttccaatactgcttaaagaagagaaccgacataccatgaggaccaggagccttatggttacccatggcaaaaagagttcttctaatttcatcatgagtagggcacttgagtaactcctcctggtcatctaacgagattctttcatgaaaaaactgtctgcaattaagagcctgaccatcattggacccagtaaaaattcctttaaagaaattaacgaactcttaaccaattaactctcgattagagatctaaacatcatctttattcaatatgctctcaatggaatttctccttcttctaatagtagccgagagaaaaaagaacttagaacatttatccccttctttaagccacaaaatcccaaccctttgtttctagtataaatctttcctttctcaagattcactcagagagcaatggataagacattcagtattccaatcacgggagctagattgtaaactctgcaaaaaattaagctttttctcaagctcttttatgatcatgtaagtttaccgaattgagttctattccaatgaagaagagcaacccgagtcgctcctaatttcttgtaaacgcgggtaggagcccaagagtgattaactaagttccaggcatgatcaaccaccaacttacttctttcatccctcgtccaaccttcttcaaacttaaaacatcttttaaatctagcatccaaaccacctgtaagaagacacagtggtctatgatcagagttacttgtcttggaaaacaaagaacatctcttggaaataaattgagtcaggctccattaactagacctttgttaagagcagatttaacatggttcatcccagaacggtggttatcccacgtcatcttgtcaccctgaataggaaaattaataaggcctcgagaatcaaccagattagaaatgaatgggataaattggtacctttcggtggacccttcacgctccgaatcactaagaacaaaatttgtatctcccagaatcaaccaatgtccaccaaacttatccctagttttcataaatttggtccaaaaatttttcttagcatggaaataaggagggccatacacacaagagagaag

SEQ ID NO: 309380 - DNA, 929 bp, Cannabis indica
agatgactacgaagtctagatttatttttttgtcgaaagtatcagaaagagaaaagttaatgcaaatttagaaaagtgtgaaaatggaagagtatagttggaagaaagaatgaaaaagaaggtataaattaaagaaatttagactgcaggtaaaaatgagaggcactaaattaaaaaggatataccatctaatttcctcattttcaaaagtacctcttatttaaatattaagttgtcatccaataaagatgaggataaaatcttcttaattctcatatattaatctagtaaattccttggttaaaaaattaatctacaaatattcctataatttttttttgaaactgaatattcctataattttatataaggaaatttcctccaagatcaataattaaaaatccaaacaataaattttttataaactcccaaccagccacatttactaataaaaaaatttgatttatctacatgatgcaaagctaaaatataattcatttaggaaaaatgtattataattgtgtgtcaaaatataatataaattactctaataacagttaatttagttcggtaataaaattatattttttttataaaaaatataatgtaaatttgacacgtatagatactacatttgctgttatataaaatttgcatgactataaatacatttttattattgatttttattattttattaatatatttagttataatattaataataaattatttatatatttttttattgttttatataatataaatataataatattaatgataaaattattactattttatacttttaataaaaataattcatcttcattattgtaaatatattacaaaatatatatttttggaatattattttttcgtaaaaaaataaaattatatttttacatttattattttttatattttta

SEQ ID NO: 309381 - DNA, 1393 bp, Cannabis indica
gaccacccaagttatggatattacatatctgccacggcctagggctcgggtcgtgacacatttagttggaggtaataaaatagaatggaatagaaaggaaacaattttcattctattcctttgtttggttttattttaaagtattaaaatatcattttaatggaatgcccttctcaccattttggtagaatgactattccattttaaaatagaaggaaagatcattccaatgtaacataagaaaaaaattagtgatttttttatcaatttatttttatgcattttaaattttatttcatttctattcctattcttatatttttatattttatcccttccaaccaaatgccgccttagtttcacatccatttgtgcaggaaactaacctagaatttgtgtaggaaattaacctggactgcctcttacatactgtaacactttttcaacagccttgaaatgaggtttccaaagggttagctaagatatggcttagcatgtttacaaagtaggtcaaatctagatattagagctttcaaattattttactgtaaaccttaggatccataagtaagtatcatgtttcttgattcactatcaagttaagctctattgatgtgctagctagtttacaccccaactttccagctcttcaagaagctacaaggcataaggtctttgagaaatgaagatacctttatcagaccttcaacctcaagacctaagaaatacctcaagtgtccctagatcttttaacttgatgttgagagacttaattgcttccagattgtaattttatgatgacatcatcttcataaacaagtaacaattcagtaaagtgagtttgagaatattttataaacaatgaatgatgaatggtagagtgaacaaaactttcttcgatgggggcacttgaaattttttcaaaccactacattggtgcttattttaaaccaaacaattatttctggagcttgcatattggattgatatgtaaaatctttcccttaggaatataccgttgaggtagagtcataaaaacttcctcattattaacatcaagctgatgaagatgtcaaccatgcatagttgcaagtgccagaaagagcttaaaagaatccaatttagcaataggtgcaaaggtttttgtataatcaacccgttcttattgagtgtagtcctttgcaatactagtcaagctttgtgtctcttaagagtcacattaaatgaatttttagtttgtaaaccattttcatcccactacatgcttagtagggaaactattttttaggtgtttttttgttcttaagggctttaatttcaacaatggcttgtttccattcagaaaatttatttctatggctgagaaaagcaaaagcataggcaaggcagccaa

SEQ ID NO: 309382 - DNA, 2272 bp, Cannabis indica
tagaccaataattatacataaaacagtactagacactattgatatacataagacagtactaaacactactggtgtcttttagcatttctcatataatatattaaatgatgcaaatttattttcgtgcatgtgtcatcatgtacggggaaagaaaataatataacatgtcctaatatatgtgtcaaccacttgaggctagctcaagtggccataggagggtgcgtgtgtgttggaggtcctgggttcgagtcacaggttatgctgcttatgcattgtgtttatagtggtttaatatatagtttgagctaagcctgcttagtccattgttgaaagaaattgcgtgttttgtaattttattatatcagcccaacctcctttgaataatggagggagaaacctctacttatagatagtaggtggcagttacaaaataatagtcataatgggacttacaaataataataatacttaattgcactaattaatacaacggttatatagtaaaaatataacactcgatttaatagcacttgaatgctttgactgttatttccatcgattggtatgtattcgcacattttctagttgacaccgcaattttactaaatatgtgaggttccttccttaataatgcaatgtctcttttacctaaaagtgcgagatccttttaatatcacgagttttctttagtgtagtccttctcgcgagggagggaaaatatatcctaataacacatgcccctaattcttcaatagagcttattctatgctagacaacttaaagttgaccaagctcgcacttgtcaattgacgtgatgccttgttatattgaacgttatatttcatattggttatctaaacttacaagtttcttatatgcttgtcgcataagagtgattatgtgaacctcatagagtttcttactgatgtatgactctctcgcaaggtttttatgaatgcgtgaacctctcggggttcatatcaacgccaagaacttcttgtagctcttattggtgtgtgaacctcttgggattcatatgaacggatgaacttcttagggttcgtatagacggatgaacctctcagggttcttataaacgcatgaacctcttagaatttgcattgatgtatgaacctcgtgaggttcaaataaatgcataaacctctcggggtctgcaattatgtatgaatctcaagagattcgaataaatacatgaacctctaatcaaggttcttatcgatgcacgaacctcttggggttcttattaattcatgaaacgcatgcgactatatcagttgtgtattgggcattcatgtactgacaacatagaactcgcaaaaactggtcaagttgtcgagcatattagtcattcagacctaactcttgtaaagttgcggtctttacatagggcacgggggagaaacacttttgtctccatatgttttctacatgttgcgatgtgctaacttctttctacgtaactcttttattcaattactatgcgatgtatagcgcgctactagaccctgtcttggtcgcacattctcgcaagttttgatcatgcgatgatatattttgggaatcgtttcccttatcatgcccttaattcttgcaatgacaagtcgttgtctaatcgttaaactttacttgaatatactttaaaatataatgtgtgtttggatatcaaatagtaattacatatgaattattattttcatgttgggcaaatgatttagtaattacataatttaataacattgattatttaaaattagtattttttgtacgtaattacacccaattcatgggggcatgaaaattagagagtgtaattgagacccatcaattacatccaattacattgttactgtataactaattggttgaacaaacataccaaaccttataattacttcgaactacactcaatttaaatcacacaatgacttttttcaaacgcgccctataatacaaagtgtgtggatatgaggcaataattatatatgaattatgtttatgttatttgataaaattgtgtagtaatatttttttggaagaaaaatggaaattttcattaattattacattattatatatcactcaaagagcataataccatgtcattttacaaaaatacaaatgaatatcctaatagcacttttaactaaaatatcaattatctccaactacatagttaaatttttataggagacatgagaattggagagccctcaattatcttcaacaccctcaatatattttgattaaggca

SEQ ID NO: 309383 - DNA, 2679 bp, Cannabis indica
aataaaatgtaattagaacctcctccatatatatatatacttaattagtttatggtcattgtaatatttttttatgggataaaagttactaatttattaatagaattctctttttttcattaatgattatctgaaaattatatttaagatctgtgaagagtagtgcctgtcagagggccattatgttctatttttcttttacaaaaaaaaaattatttttctatatgtttagcttataattatgttccttataattatgttcatatgctcacttaactcaaactatcaactacatgtaaattaattggggtaagactatagactattgagcaaaatttatattttgtgctttaagatcatgtgtggatcctctacaattattttacaatgcttcatcttgttttgtttcttttttgtgtgttcagaattttcgaacaactctgagacgctagagattagggccaaaatatcgtagtattaattctatatatgcttgagattttctattattctagatttaaaaaatagttaccattaactacatgacacttaattataattttttagataattagcgacataagtattcaaaatttaaagtttgtgaagcttatgcagctaacgaggtattaagcttttgttccatgtacttctgggaagttaaagttcggttaaaccgaccagatcaaaatatgatgtccttccaaataagcttgaaaagaaattctctatattcaagcatgttgggcgtcccattggtaagaggaccatcatttctttaccaatgcaagaaaaacttaaggtagagtagtacattttgaacaattgtaataaagtggagaagtatatcatgttagacactttttgcattcttattttagttttcttactcataaccttcttttacaaaaatctatttatgtgaagtgagcattggaacgagctacaatttaggggtgatcaaaatcttgacataattcaagagaaagagtttcccaattggttcaagtctcgagtaagtattgctttctactaattttgtcatttaaacacaatttcttgtactagtattgattacatttttactcaataatagatcatcaatcaacttcgagcggataaccccgggaagtatcagatgagttgtacgccataacaaatccctctaatccagcatgctattgttttcctaggtgtattgttaacggtgttaaattcttagttgaggatcaggatgacaatcgacacccaaaacagtgatcttttggtgtctggagaaggtggtaaaaatttttatggcgtactcaaacaagtgtatgagttcacttacttgaaggattgtagtgttattatttctaggtgcaagtggtgagaaacaaacggtaacaagacaaaaagtgatgatttttttctctagtgtctgtgttgcccgtaaatggtactaaaatgaaccattcatacttgtatccaatcaaatttgatatattacattcctaacctgaaaaatagagttgattggaagcttgtcaatgtttacacttccagcaatggctgggatttcccatatgaggatgatgatgagaccaagactatacaagaaagaaattctccaagaatccagttagtcgttcaactttcacaattggacgatgtcgaatatgtgtgtgatgatgtcgacccaattgaagtgaccagtagggaccgtgagtagcctcaccatcaagatttagataattttattgtttatagtgatgatgaagacactagtgataatgataataaaaataatgtaattgttaatgatgatgatgatgattatgatgatttgtagactttaaagttttgtaatatttaagcccaccgttaattaaatcaaatacatgttccttttgttaataggttgattaattaattattcctagcttgtatgtgtagaatggctgatgtaggtgcaagcaatagtaagaaaaagagagttaagagaaagtacaaggggaaaaatattgaacaaaaactggccaagcagcttgcgggtcaaaagttgaaatttagaactcataaagggactggggccccgatagacaactatgacaacaagtttaacaattatatcaaatttcttgttcgcagtaccatttctttgaacaagtttgagttcgaggacatttaggagacgatcattcagactatctggccgatagaataacggtaacattaaaatttgtattgtaatagatcaaagaaaactatcatacaaaaaaataaatctatatgacttcaatgtttattttttttttctagactaagtttgagttctcaactgacaatcctatgttcgaggattatgttcttaaatcaatgtcaaaagggctacatgactggagagcggatacgaaaaaggcatggaagaagaatatttagaaatatcgagaggcggaaacgactaggagatcacatctagatatggtaacactagaggtgtgggcagaggttatcgcacactaaaaagacccaacaacaggtataagttcctcgtcggtaacttaattcgccgatataaatacttttactggtgagttaaggtgattcgcctgcaaaacacgttatgctgacgaatcattgccggtgcaaaagctcgccggcaaaagtacctttggtctgaagagagagagagagaga

SEQ ID NO: 309384 - DNA, 1084 bp, Cannabis indica
cccatttacaaatccatgggacttctcctttcaccaagaaagtgcgacaagcttgattgtcaaagggattcagactatccaagtcgctgaagtataaaggtaccaataatccaatatattatttagaaaaatttaatacgattattgaagtagactaggtacctcagctagcgaagtgtcgtatccttgcggcaaccttggaggataatgctcacgattggtttagccagttacctgaggcgtccatgtcgacttgggaaaccttcgtggacctattcctaacacatttccaagccacgatgaggtatagaccaccttacacaactctggctaatatcaaacaagaggtcagtgagtcattacaggattattttaaacgtttcaatgccgaagtgactaaggtcgagaaggtatccgagtcttcattagtttgcatgttgattacaggtgtcttgcagagaattgatttctagaaggagttacaggctcgaagacacgagtcgctggtagagttcttcgctatggctgagctgcataagaggataaaaaattctctggctgagttagagagagggaaggaccaacgcgagtcacctgtaccacggtaacaatctcgcagtcccagagggagacaccatagaagatgcagccctcagaggctgcgaagtccaaagttggctaagtccccctcaaagaaagaaacatccccaaagaggaaatgaggaccatgctttgtcaactacacagaattggcggtcccacgagattatatctacgcgattgaagaaaagaacgaagttttcagaaaaccacccccaatcaggggtaatcgcgacaaaagagatccaaagaagttttgtaagtatcacaaggacattggccataccaccctggaatgctggttcctgcaagacgagatcgatgaactaattagacgaggaaaatttggaaagtataaaaagcttagtgaaagtcatccctaagcggatgacaatgatgaaacaaacaatgtgagtggttcgagaacccctcgcaatattttgacaatcattggaggaccccacattgtaggagactccaagaa

SEQ ID NO: 309385 - DNA, 885 bp, Cannabis indica
aagaaaggaaaatggcgaccgtcggtggaatcaaagaagttgatgggaatcagaacagtctcgagatcgaaagccttgctcgttttgctgtcgatgaacacaacaagaaacaggtgcagatcctcattttctatccgattacaattttttttcttatttagttattcagatatcgatcgatgaccgatcgttgtgtagagggaaagaactgagattgatttctttgttttgggatgcagaattcgcttctgcaatttgagaaggttgtaaacacgaaagtgcaagtggtttctggtacgatgcatcatattacgttggaggctttggatggggataagaagaaggtttatgaagccaaggtgtgggagaagccatggatgcattttaaggagctccaggaattcaaatatattggtgatgctccttctggatcatcctcttaattctgagctatatggtaagctgtaaacgtctttgattttttttttcaaatctatttatctaattctatatatgattatgaatacgggaatataagaaaaagactctgtttttgcaatcttacttttattgcaatattatgaaaatatatatttcttttgagtagtatcattagacgctctgataaaattgaacctcaattgagttgtttcatatttcaaaactgacacaaacaatgatcctgatcacttaactttgacccttgtgctatttggttacaagtactattgtgtaaaccattgttttcatgttagtatttgcttaagtttcatgaattgacatcattagacttgatcacttagtagttaacatgttattgatcattatataagaaagatgatgtgttattattattattttcaattcgtttgttagagaattctt

SEQ ID NO: 309386 - DNA, 617 bp, Cannabis indica
ataaaaatggttaaagttttcaaattaaactcataatcttccatcatttattccatctttaatagttgggtgcaataactatccgctgcaatgcactcaacctctattgtagacaaagagattgagtttttattcttactatgtcatgaaatgagattgattccaagatagaaacattcgccactagtgctcttcctatcatctgcattacctggccactcagtatcacaaaccatattagaattagtgtgtttaaaaaactaaatcccaaaatcaatagtactatttacatagcgtatgattcttttcataacaaaaacatgtaattccatgggtttccttgataatgagcacaaatacctacactattacaaatatcaagatgactagaattaagatcaagtaaactaccaatcataattgagtaccaagtaggatctatcattagtcctagttcatctttagataatttcaaggttgtgctcataggagtattagcatgtttggtatttttaagtccaaactttttcatcaagttctatgcatacttactcttgaaacaaatgcgtcctcatcagtttgtttcacttggagacccaaaaaataggtgagttcac

SEQ ID NO: 309387 - DNA, 621 bp, Cannabis indica
ctattcgtctattcttcaatcttcatcatctctctctcgctccgaaaacgctggccaacgaagaatttggtcctctcaggcctctctactgaaggagattttccttttcattttgctctgtaactcaccggcctcgtccttccggccttcccttcagttctggccatcactgcctttccgactgcgtgttcccctctgttttttccgatctcacaaggtaattttatctgagtttttttatttgtttgccaattatttatttatttttattgttaaatgagaacaccaaaataccaaatatccaactggttgcaattctgggcattgtattttacacgagaatttaggtgactttggtccggaagaatgagaatggaattgaaaaaaatttaaaatacataacaaaaaaaattgattttattttaaaatagaataatcattctatttggtagaaatatcattccattcccattaaaatacaactaaataaaagaatacaataaaaattattttttttctactccattctattacctccaaccaaacaaagtgtacgtttggtaatgtctttttaatcagttttttatttttaaaatttgattagtgaaaatattttccaaa

SEQ ID NO: 309388 - DNA, 1192 bp, Cannabis indica
ctttaacaacttcatctcttttcttacttcctcttttcgaacaaaaacttgagctcttgtattgaagtcgctgatgtatttcactgggcaaccctgcaggtcatcccatagctctcctccagctgtggcaagatcagtcgtgatccctacctaaagagtagtaagctgggtactatcatccaagtttctaaccctcgcagtagctatgctaaaatgacttaagtagcccttaagcgtcttgcccagctgcggctttatgttagtgagggaggatgccttaggtcgcctatcccttactgcctggaactttttcttgaagtccttagacaactgttcgcaagaggtgattaaatgatgcgtaaatttgttgaaccagctactcgatgctctaactagcaaagttgggaataaaatagagcgtaaattatttgtaacatcgctggctcgcatgatagtattaaaattattcaagtgtgagttcggatctgtagtcccatcgtatcacaagacgtgagggttcttgtatccctaggggaattcagtattcataatgtctagatggaaaggctcgagctcttcgtccgagtcgtatccggacaattttccatattctccatctttatatctcctgaatttgtcctccaactcattaattcgcaattggataggatcttcttgcctttgcttgagttgttggcgaaggttaggtttttctggttcaagtgattatgaagatccagttgttgcaggtcatagttactcacggacctcgtcctactcttggacctcgtccttgagtaactttcaattctactagtgcctgtattctatcgatcaatactgtaatgagttctgtcccctcgtcgtgttgatcgactacaggttattgtgcgtcttgagctggcaatcgccctgtcacatactggccttctcccttaagtaagggttattgcatgccccctactagggtttgtacgtgccctttccctattgattcgagaaggacgttgacgatgtctcgatggcaacccacctgttctacgttgagtcgcaagattaccctcgttctcacgagggatttcttgttccctagtccttggttgccttttgttcacatttctgtgagaaggctccgattgatcatttggttgttcattttcatgggggaccctcaatttccccaggttgttct

SEQ ID NO: 309389 - DNA, 1383 bp, Cannabis indica
ttttgatttttttttttttaaaatttcagtttttaagaagaaaagaaaaaaaataagggaaactgatgacagcaaaggcacgatgtttgacataataaaatcatcagaatgtggttctaatagtttcaaatttcacaaagaaaaatagaagagatgaaacacgaattaacatgaatatagaacacaagttaagcaaaatcgtagacataaatggaatagaagaaaaaacacaaaagatagataggccaaacccgatgatcctaagctctgataccaaatgatacgaatcacactaacagttgtgatgaaacccgacaccaaatatgacagactctaagaattctcaaaaattggaagtggaatcgcgacacaatgcttagttaagcatgaaccttggtatgaaggaagacaccacaaacggtggtggaaatttgtttgataagtcaggttagacgccacaaggaatagtccttgataagttcgaatagttctctcaagaactcaagataaaagcctctcaaaattttattcaaaaataatctgattttccaaagtgtttacaaggctttatatagccaacttacaaccaagaaaaaataaaactaaaagaaagacaatttttcaaataaaatgaagatagaatgaaggaaacaaaattaaaaaagaaagctgccaaatgccttgaaaaacgtgatcaactcaatttgggtttaaattgagtctactttgatgagaagtacaaatctttgttctccttcagtgtcgactgcgatctcctcttgttttaaaactttgttgactaagttgttgagttcttctttgaagctcttggctcgtgccctcgtcaccgagtcaactggaacttgacttgtttctttggccttagtgttctcatcacagatgacctaggggtcgatcccgatcatgtcctcatgcgaccaagtaaaatgtcttgaatactcctaaggaaattcatgagaatctcactcaagacctctgccaggtttgttctaatcttgacacccttggtcaggtctgctgtgttgagggtaagttctttgtgttcctcggtcggaccaactcctatgttaatttccccaaaatgagggtgaatttcgtcctcatcttgggcacaccatcaagtggctttaggttttgtcgtcgtcttctccgtagtttggacttcagaggtcttcatcgtctgtttggctcttgtgggagagaccttgcatgtaatgtctccgcttcaagcctccattgggcccttacacccacagaataatggctcttatacacgagcacgccactctggctgcttcttggattgatgactgaccatacagaccaacacgagtgttttcagcgtgctttgtctcactcgca

SEQ ID NO: 309390 - DNA, 1950 bp, Cannabis indica
aataaatattttatttaaaataattatataaaaaaagacttttaggaaataattagtattatgggcgctttttttaaatttttaggaacaatttttgtcacttttaaaattatttttcatttattattaatattattttaataatatctctattttgttaataattaatatttatatttttaattattaaataatttttttttctcattttataaatagtgatatttttttttttaaaaaaagaaatagggttaaaattttcaatacaattaatattatataatccaaacaaataattgactaaaacctattcaagggccttggctttcggaaatctataaaaatgaatcaagcgtttctagcaaaatggggttggtctcttttaacgggcaaccaatccctttgttgtcggatcttggaagccaaatatttgaaagaaaagccttttcctaactgtacctctaaagactctgactcctgattttgaaaagatgtgatgaagactaaacgtatcataagaaaaggggcttgcaagttagtggttgatggaaatgatacttttatttgggaagacccttggattgcccataaaaaagattttttccctagacctaagggatcttccttgcttggggtgaataaagttgctgagctcctgtacgatgatggtgggtggaatatcttgaagttaaatagtctatttgaccaagagactgtgtctgcaattttgaaaggagggctccatctggccaggacaatgatagatggatctggactttggaaagtaatggtctattctcgagcaagtcggcttatctggcccaagcttttgatcgggcacctcattgtgaggtcgccccctcactctgaaacaaattgtggaatagtaaaattttagagaggctgaagatcctttggtggtgcttattgtccaatgcaattccagttcgcttggagatttgtaaaagatttcctatagaggatgttaaatgccctctttgtggatcagaggatgaatccattgaacatctttttctttcctgtcatgtggcgtttcacttgtggcggtcatctcattggggtatttaccctatttgtggcaccggtatttggatgtgggattgggtcaaattcttatggaaccttaaatataaatgaatcaactctgatgaggtcttccattatgcctcgttaactgttgacaacatctggcaaatctgtaatgataaggtacacaataattgtccagttgatgtttttacttgtatcgacactattcgttattcttttgcagatcaccatgcctcgatgctcccttattcacctccgattggggcagttgtctggtgccccctcctcaagactggattaagctgacttgtaatgttaaagtcgatcttgacagcatgtgcgctgcgattgtgacaagtgatcatcttggtaaggtgatttgggttcatacttctagattagagtttactgatgtgttatgcagtgaagcggcgacatgctgctatgctttggatgttgcattggacagaggctggaagtttatcttagttgagagtgattcgagggtagttatcaacgctcttaacagggaggagtctcgttgggagattgagaactatgtctcattttgtactaagtcctctctttcttttaataattgtattttcgctaatatcagtcgtaactgtaattttgtcgcccacaatgtagctaagtgggcgttatctaccaaatattcagttgtattccggtttcttctatccctgaacacatcttttgtaatgaccattcggtctaacagatatttgctattgatctcttcaaaaaaaaaaaaaaaaaaaactaagcacgacaaaaaaaaaaaaaacatattcaggaaaaaaaatgacaaaaatccaaaacccatttcagtgttcattcccatttcgtgttccctct

SEQ ID NO: 309391 - DNA, 1467 bp, Cannabis indica
aaccatgcaacattaaatgttatttctgatctatattaataagtaaatctgattatattgagatgagttttatttagggcataaaacccaacacttgcagcacagcgactgcccctcattgagaagatcccagccccactttgctaagagggcttggttcatttcaacggtctttctaaagccaagtccgccatgcgacttgggtaagcacaagtggtcccaagcctttaagcagatccctctgttgccttgctcacagccccaccataagtctcttaccatcccgtcaattctcgtggcaagttttttcgagagctttgtcgtttgcatcgtataaacaggcacagcaaggccaactgatttgaccaacatggcctgtcctgccttagaaagagattttaacttccacccatgcaacttcttaaccagattgtcaatgataaaattgaagttagcatccttttgacgagacctaaataaggggagacctagataatttatgtttcccatcccacaactgagcccaagagcctgtttgatgcccctcttcattccgttgcttgtattaccagagaagaagattgatgttttaagcttattaactctttgccccgaccaatcacagaatttctccagacactcccacatctctttagcttcattcagattagccctacctaccagaatcagatcatctgtaaagaacaggtgagacagacaagggccatctctgctcagcttgatacctttaatggaaccggaactcagagcattctcaagtaatcgcgaaaggatttcagcagcccagataaaaggattaaactactaatctttctattattgaggaaaaggttgaaagatgtcgttgtgatgcactgactaacccagaggtgaaacttctcaggggccctaaaactgcaaagcacatgatcgataaaggaccagcttagcttatcatacgccttaactaaatcaattttaatagcaaagaagccctccttcccatttttcttcttgaaagagtggataatttcttggattaagacattattatcccgaatgctccttcccggaacaaaagcagtctgggtaggacaaatcagccttgggaggattgttctcactctgttagcaataatctttgaaattaccttgtagatgacattgcacagggcgattggtctaaactgagccaccttctttgggttgggaattttaggaatgagagtcacattagtagcattaaagctcctgtgcaacttaccagataagaagaaatcggtcacagcatcacagaaatccgcaccaattgaacgccagtagtgcttgaaaaatagaaccgacattccatcaaggcccgaagccttcaagctacccatagcgaacaaagtttttctaatctcttcctgacagggaatgacctcaagcccttcttgctctgaaggggagagtgttgggttttgtgcc

SEQ ID NO: 309392 - DNA, 1071 bp, Cannabis indica
atctgaatgtataattttcttttaatttttttggtctcagttatacttttagtgtcggtctactaactgacacttaaagtcgttataggtgtcaattataaattgagaccaaagagttagggtgatgtttagtgtcgaatttttaaaaaaaaaaacgtcactcgaaccgacacaaaaagtatattttgtagtagtgcaaggaggaaacaagtgacctccacaggaagaacaaaaggttagaaactagtgtggctagtatgcaaaaagtgtcgagtggcatacttgatggcaaagcccaagcctcacacttttgtcacgaaagccatcgagtgggaagcaagatctcaagtatgtatgctggcataagtgattccatgtgatccaccaaccacaccctagaagatgaacatggaaggagcttgtcgcgagacaaaagctcaacaggccaagtaagacaactcgagcctacctatcataagggaatttcattgagggaagcaccccatagcctaaggaagagactacaaccaagaggtctcatgctagggggcactttgcctatggctccccaccaagtgcaacgtaagcagaaggccttattcatcagctttagtggtaagttacacgctatttggacaagaggagtaccctccacaagccctatacaaaccacacgaaagacccaagttccactcactaactcccgagagaggatgagcaaaatgatgaaggagttagaggcaaaaatgtaagacctacattgaaagatagtgttgacctctaaaagtgatcaaccaacaaaggggtcgtacagatctgatgcttgccatgtgtgtgcagaaataagaataaaaagtaatagacaataagatttgttatagaggttcgatctactgtgaaagagcgtaatgacccactccccttttaattgtattatattgagggaattactatttaaattgttataggtgggatctactatagtacccttaggattacaaggtataaatcaatattgataaaactcaagtgtttaagagcactagggtaggtgtgtgtgtgtgtgtgtgt

SEQ ID NO: 309393 - DNA, 1435 bp, Cannabis indica
gatcctggtaaaataaattcaaacaatctctgattcgagtagcttcttgaagagtagctttgcaatacaaataactgtcatcagcgaataacatatgagacactttcggagcaccgttcgccactttgcaaccatgaatgagccccatatcctcatatcttttaatcaaagccgaaagtccttccacacaaagaatgaagatataaggtgacaacggatagccttgtcggatacctcgagtaggagtaattggccccattgttctacctccatgaacaaccttatacttggccgagttaacacacttcatcaccaaagaaacccacttttcagagaaaccaattctcctaagaactgcatccaagaatttccattctatgcgatcatatgctttgctaagatcaagttttaatgtcatgaacccatccttaccttttcttttttctcttcaagtagtgaagcacttcaaaggagactaaaatgttgtcggttatgagtctcccgggaataaaagcactttgagattcttaaacaatttgatccatatatggctcatccgattagccattactttagtaatgattttgaacaacacattacattaaagcaataggccttaaatcaaccatactttcaggtgttttcttttcagaagcaaaactacatttgcatcaccacaaattgaatcaaactcacccgtattgaagaaactctgaaccacggctgttacatcattctgaacaatctcccaacatttttggtaaaaggctggcgtcataccatccggacttggactcttgtcggggtgcatggtgaagacagcttttcttacttcctcggcaataataggttggtggagatcttcattaattcgggttgtaaccttcttctgaatgcactgaatcataactcacttccaaaatctgaagcagtaaataaattggcgaaataatccacaacaacgtcatcaaggccattatcccaatccttccaattatcacttgaatctttaagtttcgagatatgattgaagcttcgacgattgctagtagcgcggtggaaatatttactattttgatcaccctctttcaacaaaaattgcttagccctttttttccaaaaaacttccttttgatccaaaaccataaagagctccttcttcacttcggcataccattggatagaaaaagcatctcttttattcttcaaactcttcaattcggtttcgcatttattgattagaattttgaaattaccagtcacattagttccccaagtagccaacttttttgcacaaagagctattttatcagcaacagacatgctgctggaaacagtccagcaatcttttgttgggttttgtgccctaaataaaacccatttcaatataataagatttacttattaataaagatcagaaataacattttatgtt

SEQ ID NO: 309394 - DNA, 1879 bp, Cannabis indica
aaagggtttatttagggcacaaaactcaacaaaagtgtgaacttttttagtcaactgaaacctttggtgaggaggtccaattcaactagagttttgttgctaactcctctctctaaacaaaataaatacatatgatcttaaacacaattgtatgtagaggtgtagcataaatcaatctagtccaattatagctgattaatccaatgacaaccaatcgtaaaatattagatatgcaatcatgatcatatcgatgttattttttaatatttaattggaacggatcaaatgttaaatgaagtgtctgaaaatcaaatacaattcaatattcaattgaactaataattagtaatttcatttggtttggataaataattatattttatattattatacttaaaatatatatgtatatatgaaaattatgattaaaattttacttatttttattatttagtggattagatggatccaatcgaatctaataaatattagattgatctcatccgattaaaaaaaatattgagtctaaaacattagatgaattgaaattatataatccaatagatttatatgaattatatctaataatagatagaaccgattctatccaacatctaatgaatgttggatcgctttggatgcctgagattaattggatcggatcagttgacaaaatttaaagtccaatctttgatttaattagatttagataagcctaaaaatattggatatgatccattaaatacctttagtggtatatttttgttaatctattgatctgcatctattttagagatgttatatagggtggaaaatttgggaggttagtattgcactaataatttgtattatttctcaattatttttacgatacattaagtatgttttctatatcactaaattaatcataatgctgtaaattatattcaatatcctaatattttattaatatctaacaaaaaaaaaatcacactagggtagatttcctagtttatgcagctattctgacccaaaatacatgatatattggttattgacattagacgttattaaataaaaactctatcaaagtggaatacaccaaccaaagttatgatcactattatctaagttgtgtgtttttttagtgattgatatgatgaatacacatatggtggaaatttaattgaactaatcaatatggctcgaaaccaacccacccaagaaatgactagttcaacaatttattaccatccaatgttgataaagattctataatggaattgagagtgaagggagtctcttggaaagactatagtctaagactgactagatatagttcaacagttacactgccaatattgggcaaatcctgatcatgatttagcacccaaattttccatactttaaaaaccataattacatatagagtaaaatctctatataatgagaccaaataaattatattataggggcataggtataaaaaaaaaaaaaaaaatctaaacacaaaaatattaaacgacaataacattccgaataattattcaaaaattatttatttaaaattgagaagtttattgaattcaaaaaaaaaaaaaattgagaagtttatttactctttatcactattgagattttttatgccatttttatcttataaatgtcaatttcaaatgaattatatttggattatatttgggaaatttgattttctatacttattaaatttaaaaatttgttttttaaaccaatacattttacactataaaaaatatgctaattttttgaaaaccccaaaaatacccccgtcataactcaaaccctttctctctccctgaaaccgaatgaaaaaaaaaaaagcccaggtccgatggtcggaccacggggtccgaccaat

SEQ ID NO: 309395 - DNA, 1162 bp, Cannabis indica
gtattattatatattgcatatcataaatttgttatgtacctatttttgaaaactttatggtaaaaattccctattgtaaaatcatttatcgaatatggtttattagcatgtgatatacatatccagggacacgatttttgcccgtgatgtactttcacggaatggattccgtgatacattagatggatctcagggtacattagatgggtacgttactaatgtttaaccctaattacccctagatcaatctcaccccttagatcaaataactccctcatctaacggatgtcgtacatcacgaaatacattctgtgaaagtacaatcacgtgacaaaatcatgtccctgcatatacaatatataaaatataggtagggacttgaatttggttaagttatttagtccacgttgatatatatttagaaatttttatatgaaaaatcaaaaattcaacttttattactcttttaccttcacaagagtaggataatttttatatcccttattttgttttattgaccaaaataccacttgtacacataattcgcttaatgatgatgtcattgttcttctatcatactcaaccaacctatcttttctgtaaagtttctgcatatcatttcaattttttctttcttctttttttttttttttctattttcacctacacatttaaactttcatacacgatttaaagaagaaatatactccaaaaaaaaaaaaactaaaatatcacaatcatcaactggtattgaagaatcagcctgcatttttttctacacatttttatatataactcgttattcatcttctccatctccctttgtggaaaaattcctattacaggccctaaagcttcagaaatagggttaaaatttgtctccaaaaaagggaaagggaaacaaagttagatgatagttttcttatgatcattttgttgagcccatacccaaatcggggaaggctcctcctaagaaatctaaaatcgttaaaggagagaaaatcgaggggaatcctattattgttggtttaaaggagaagaatcgagcttctcgtttgattgagtttaattaagtgatttgattgacttcttggtaagcatatgtaacgcctgtacttttataaaaatattagttttatttacaagcgttaaacgcagaaaa

SEQ ID NO: 309396 - DNA, 2006 bp, Cannabis indica
tctccatgattggtctccaaaacaattctattcggggatccccctaacggcattccaaggtatttcattggccactttcctatctcacagccaatagaagtagcgcatctcgaaatcacattctcatccatgcaaatacctaagagttggctcttactcaagttaactctcaaacctgatatcgcacagaaagcgttgaccaccaaagccatgttattcagtgacgtctcatcatttacaaagagtattgtgtcatctgcgaattgtaggtggctaacttggatcttctcctttccgattaggaagccagatagattcccagactcagttgctttgtccatcattcttccaagtacatccgccaccagagtaaatagaaacggcgagaggggatcaccttgcctaagccccctagatcccaatatcttacctctcggttttccattaacgaatatggaaaaagaagttgacgaaatgcaacccctaatccgtttcctctacacttctccaaatcctttgcgttccaatactagatcaagaaagtcccactcaactctatcatagaatttttcgaagtcaattttgaacaccattccttctttgcttctacttctatattcttccaccgcttcgttggcaatcaaaactgagtccaattatttttttgtagcaaaattgagtcccactcctaattattattttttttttgtagcaaaactcctttaagtatcattctatttgcaaatctaatacataagttaaatttggctgttaaatgtcaactaaaactgtcattgtaaacacatgagtacactagactgttttattgacccaaatcattttaataattttaatattataaaattataaataaataaatgaaatattttttcttttttcttttttagttatcatattttcatttttaattaataaataaataaacaaaaccgtaactacaaatctacctctctcttatacacttcactttctttctaatagaacaattgacgctgctgcctcccatcaccggtgatgaaccgaatgtcgtccacacaagacccgcgcaaccccctaaataacaaggatgaagactccatctccagacgcaaaaaagattcgcaagagagtaaagggggtttggggaagcgatgatggggtttcgagtgccagagagactgtcagtggcctctgcttggctcaccaaggtcgagaaacggccgttcacatcgttctgagattttatttttattagttttttctttagagattttgatttggattttgttattgattcagatacaaaactatggtatggtatggtgtggtggtgaattttttttattttatttggatttatttttgatgttatggtggtggtgaagtagtagtgatggtggtgataatggcaatggtgaggtagtagtggtagtgatgatgatttgggagaagaagaaggacgagaggagcagatgatggatggtggagaagatggaaaaaacagggaaaaatattaaagtaaagaaaaggaaaaaaaattacagaaaagaaatggaaataaagattattaaagttttaatattttaatattttttttttataatctattaaatttattttatagttttccatgtggatattaaatttcccatgtaagacaattcggtgactaagactgacaagttggcatttaacaaggtaaaatggacagaatagtgaatttacaaacgaaatgacacttaagtggcgtttagttaggaggaatgaaaacataagaatatgaaagagaatagaaataggaacggaatggaatcaaatttaaaatgcataaaaaaaattgataaaaaaattattaaatttttttcatcttgcattggaatggtcattccttccatttcaaaatgaaatagtcattccaccaaatgatggaaaagtcattccaatactttaaactgcaaccaaacaaaggaatataatgaaaaatattttctttcctttccattcca

SEQ ID NO: 309397 - DNA, 1514 bp, Cannabis indica
agtatatggagtaattctcattttattaatgtgtatggatgagatttacatttatatatatgagcattgctattgaacagcactggtgcccaacaccttctataggtgatgtcttacgattagttagcgatattccctaaaattactttcttaagttatatattaagggtgacaaaatgtgtcatcgtgtcgtagtcgtgttatattttatgtggtctgcttttatatttcgtgtcaggcgtgttggtctattttttgactcgtgtataattttctcaaccgtaatccaacctgtaaaaaattatgtcgtgttcgtgttaacccactttaacttgttttgctattattataaagctggagttgtagagaaaaaaataataaatttaagttctattacaaaacttgtatagtatatgtagtttgttatgtatataataaaaattaaaacttttaaaatatcttttgaaaattaaattaatgtttttaacttaatattaaagtcattaaatataaatattttttatataattatattattattaacaatttattattttatttaatttaaaaaaccatgtcaagcgcattaaatttgtgttaagtgggtcgtgtcaacttattttcgacccgagtctaattttctcaatcataacccataaaattcgtgtcgtgttctggtactgtgtcgaaactgttttgctacccttaaataattatatgagacctaatatttgattacaccaataataatatgatattagcacttttttttagtatttctcatatctatatataacattttcattaattaatatggttgcatgtcacgtcaaagatactatacatgtaattataaatggaaatatatatatatagcttcttcattctctttgtacgttctcaacttgcatcgatttcttcagttctggaagaaacactactacaaaacaagcctttagagtcgcttttttcagcataataattaataaccgacgccatagggttgaaaatttttagaagggaatttgacgcacttttggcgtcggttatttggaaataaccgacgccatagggtgtgcccccctatggcgtcggttatttccaaataaccgacgccaaaagggtttataaccctagctcatcacttcgtcttcctcattcgaccagccagcccagaaatccccaaatcagagaaaccccaaaccctctccgccaaccaccacgaaaaatcacccccatttcaccattttttcaccattttagctcatttttgtttctaaatcttctatttttcatacttaaaactatatacctgaaaagatcacatttttcctcattttttagggtaaaccgaaggtagaggtagtggttgtggtggttatacctccggccaccgtttttagaggagaaaacattgtatctcaacgtctattaaggtataaatctgatttctactaattttagtaatgtacattgctttattttttattttataaattttttagggtttttct

SEQ ID NO: 309398 - DNA, 1273 bp, Cannabis indica
acacactaacatgaaggacaagtacaagtatggactggtgaggagtacaaccataccacctataagccctttagttaggtgttagttgtacaaatttaagtacaagtagtgggagtaaggaacctacgaccataacatgtgctaagggtcaaatgccactatcacttgcaatcttcggcctgcaaatttgaagttcacccacatgtctcaaggggaccacatgtattatctagccaatagagcctactccttattcaaggagtgggaaagctctcaaagagaaacaccattaaagagcaatatacaagcactacaagaaaaatggtctatgtcttcattttttacaattagaaaaataaaatgtgagtaggatactatgaaatgacatttctcaaacaatatctttgttatatgaaaaaaaaaagagaaaagaatggatatgaaaaaatataaaagaaactattatttttttttctccttcgaatagaaccacaatttttgttgaacccacttcacattttccctatgatcagttacgttcaatgattttttttttttgcaaaaacttccatttccctaaccctaaaacctatatatattacaacaacgaatctatttttaaattagaggttaaaaccaacacgattaggttgatggttctttgggttttgggttttgggttgtgatcactggcagttcgtaacatcctgcgttttttagccgttttgaaaagtttagtcccaaacaaaaatatgaaccctaacgggtaaaaacctcaaattaataaaataaaaaaaaattatttatgaaaaagtaatactttagtgcatgggaaatttattgagagttcaataaattttataaatggaactagtgtgggaattcaaattaattatgtatcttaactaagaaatgcttaattaaggctaagtgtatttgttgaaaaattaattaaatatattaaaaaaattatttatgattgtgaaaaattattaagatgtcacaaaataattaatttaattcatgttgaaattattttatgagagaaaaccttatggtaagtttgaataaaaggaaaaaggtaggaaacactcgttacatctttactcttttaggtaattatgtgtgagttaaaattttaagagcaattatgtactttccaatacattatttaatttatgtaagtatagagacggtttttgatacaatttggctattttaattgtgacagtcagtagtcccgtgatccgtaagggaaaacaccgggtaagct

SEQ ID NO: 309399 - DNA, 1201 bp, Cannabis indica
gattttccaaatccaattactaattggattggatcggatgaggaaaaaaatgttggattggatcggatgcccacccctaactacgacctaagtataaacagacattcctagacaaaaagttggtcgccttgttcgcagattgtttatcaaagaaaagggaaacactctttaaatcattgatcaaagaaacacaattagcaactaataatccaaacggagaatacatagttactttattttgaatagcattgataagcatttgacaatcagagtccaccacaacttgaggaaagtcgatagttttaagccaacttagaacctctttgagccctatggcttcagccataacaggctcgacaacaacctagtgcgccacaactgaagcaaagatgacttgaccctcatgatctctggccaaccacccgtacccaaacctcttatcagtagcaaaaattgaagcatctacattgactttgattgtattcaaacgaggaggttcccaatgcggagaagtgatcacaccagtaggcaaatcactctcaaaagattgagatttcgcacttttccattgatcaaaatatgctaatgcagactgcacaacaacatttgcaagcggctgtttattgttccaaactaactaattccttgctttccataatgcctagcagatgactgcaacactgcccaaactagaagaagaaaaattgcttgccatacttaaaaaccagtcagcaaacaacgcaccagcagaacccgagagagaagagttaaaatgttgccaacattgacgagaaaatgagcaatcaacaagcacatgctccacagtctcatcttctaaatgacgatgacgatacaacaaaggaacatcaacttgcttcaccttcagactaatacgtgttgggaggttattgcggcaagcacgccaaaggaagacatagaattttgttggaattttcatgttccatagcttcctccacagccccaaattatcccctcgagaccatctaccattcaaaacttgaagcctcttataagcacttttgactgaataatgaccagaagcttcgaaaaaccagtatcgagaatgaaattcgagagacgaactgatcacaacccccctcacatgttctttgttaacatcagaaaaaagatcattaagaatatcctcatcccaccttctctcattcggaaccattaattg

SEQ ID NO: 309400 - DNA, 1329 bp, Cannabis indica
tatggcacttttgcttttaggagaacgctatttcgattatgtaacgctctaggaacatttcaatggtgcatgatggctatctttctgaatttgattgagggttgtatagagagttttatggatgacttctggtttttggctcatcttttgataattgtttgaggaacttggagattgtactaattaagtgtgaggagtcaaacttggtactcaactgggagaagttccattttatggtgaaagaacggattgttttgggacacaagatctcaagggcgtgcattgaggttgatagagccaaggtgtctacgattgaaaatctatcccctctctgtaaaagggcttcagagttttcaaggtcatgcatgcttttatcgaagatttatcaaggacttctcaaagatctctaaaccattttccaacctgcttgttaacggagtaccctttgagtttggaaaggaatgcttggaggctttttaagcttttaaggagaagctaatctcagcacccatagtcactacaccgaattgagagttgccatttgagttgatgtgtaatgctagtgactacgccattggatttattttgggtcaacgagttgatagggtatttcataccatctactatgctagtagaaccctgaatgatgctcagttgaactataccactaaggaaaaagaaatgttagctattgtgtttgcatgtgacaagtttaggccatatctgattgggaataaggtaatagtgtaaacagataattcaacaattaaatacctaatgaccaagaaagatgcaaaaccaagactaatttggtggattctttgctccaagaatttgatattgagataaaggacaagaaggggaccgaaaatcttgttgctgatcatcagtcaagacttgaattggaggagagtcaaaatgcaaagaaggtgcagataaatgaagagtttcctgatgaacaactatttagtttgagggagagcttattggtcacttggttcgcagattatgtgaatttcttggctgctaatgttacacctatagagatgtctcgacaacaacttaaaatgttctttttagaagtgaagcactactactggcaagatccaatcctctaaaagcactgcgctcatcaaataataagaagatgtgtgcctgaagaggagatgtactctgtcttgaaacattgccatagtttacaatgtgggggcattttagtggaaccagaacgactgcaaaggttcttcaaatcgattttattggccaactcttttcaaggatgctaatgtaacgccctaatgctaaggcacgctacagtgctttttcaat

SEQ ID NO: 309401 - DNA, 886 bp, Cannabis indica
ttcagcagtgacatttggcaacactttttgtatgctgcttcagtgttggagtgagatataataggatgcttctggctttttccaaattatcaagtttgagccgaagaagatagcaaaaaccagtagtggagcgcctatcatctggatctgaggcccaatcagcatcacaaaaggtaacaagatcataagtatgaggcctttctagatgaagaccaaagttcatagtgccacttatgtatctgagtattcatttgacagccaaccaatgtgtggttaaaggtttctgcatgaattggcaaaccttgttcacattgaatgaaagttcaggctttgtgattgttaaatactacaatgcttccactatagatcgattgagttggataacttctgctagttccctttggtgagccgacaaatgaatgctactgatcatgggtgtaggaccctattctgtgtgttgtacttcaaatccaaggaaatagtgaagaggacctaaatttttaagagaaaattatgtaatgagagttaagacaaggtttgtaaaaacattgtgatcactacttgtgatgataatgtcatccacatacacaagtaccaaagtgacagaatctgtagcatagttaacaaacagagagtgatctgaataaaatgaaacaaaaccaagagatagaagtttattttggagtttgtcaaaccatgctctaggagcttgtttgaggacgtaaagagcattatgaagcttgcaaactaatccgttttactaggaatttcaaatctaggaggttgcacaatgtacacctcttattgcaattttctattgagaaatgcattgttgacatactgtgacagtcagtagtcccgtgatccgtaaggggaaacaccgggt

SEQ ID NO: 309402 - DNA, 582 bp, Cannabis indica
ccgcctatgcctagggccggccctgattgacacctcaccatgctatatttaattaggtttcatataatatagtcgtatcagtatatatatttgtattattgtattatatacaaacataaatttgtgtggtagaagaaatctatggacaacatatacacatctatacgtacacgccaatttcatgtgaacccccacaccaaaatttcctttgttctcattttttaaaactcatatttgagttactttcaatttttgacgttccaaggaaatttaatttacttattagagttacactgcagttttaagttttattttatgctaataattaattgctgtataattctgaatacataaataatcagaaatgtttaaaagttgtgaatgctagccaattattgttttttctttattattattatatatataggatacttttacgcgcctttaaaaagtgtctatcgatacattttttatttgtttggcatataagacactacaaatttttttactttttagtcacaacaaaatttgtgactaaaatgaaaaaattgttataaatcatgattcctatattgtgactaa

SEQ ID NO: 309403 - DNA, 3497 bp, Cannabis indica
gacttgaacatcacagcaccatgacagatgtttctatgaaacttcaagctaatctggcctttgggaacaatagaaacaacactggtcgatatattccaccagctgctcgaggaaatgcccctgatactttttcaagaaatggtggcaaactgcctccccgtggttcttttggctttcaaaatcgtctcatgtgtcaactttgtctcaaaagtgggcacacggcagctgtgtgccactaccgttttgataaaaactttgttcttccaaagccaaatactgtcaatccacgggcttatcttacggaattggacactgacaatgaatatcaggtatataactccactgttatccctgactttggtgatgataacctttggtttgttgatacaggagctaatgttcatgtgactaatggatctgaatctcttgaatcaccctctccctactctggaaccgagtccttagctgttggtgatggtaagcaattactcatcactcatgttgggtctaccttcttatctccaaataattcatatcccttgcgtttaaactctgttcttaaagttcctgcaattaaaaagaacttagttagtgtgtctaaactaacaaatgataataatgtctatcttgaatttcacaaacattgttgttttgttaaggacaaactcacaggggctgtgcttctcaagggaccagttagagatggcctttatgttcttggtgaatcggattcatcatctcctgcattacaatgcaatctcactactgtttctgctcataaatccttttgtaataactctactggtatgacagtagactcttgtacttcatctctcaataataataaagaaattgattcagcctatcctttacattgcttttcaactgctttatctactaccttgcaacaagatgtcaacatttggcatcaaaaattgggccatcctagtgctactgttttaagcaaacttttaccaaatatttctcatagtgggactttaaaagatttaaaattctgtattgcatgtcaaaaagggaaaagtcataaactttcttaccctctatctactagccatgcttcccaacctcttgcattaattcataccgatttgtgggggccgtcccatgttgaatctaaagaaggttttaaatactatattcattttatcgatgatcacactagatatacttggatatatcctttaactctcaaatctcaagcatttgatatttttataaaattcaaaagcatggtcgaaaaacaatttaatttgcccattaaaagtgttcaatccgattggggaggggagtataggccttttgctcgatttcttagtgatcaagggattcatttccaacatccttgtccacatgatcatgaacaaaatggaagggctgaacgaaaacatcgccacataactgaaactggtttggttcttcttgctcaagctggtttgcccttgtcctattggtggtatgcctttcaatgtgctgtttttacaatcaatcggcttcctacagttgttcttgggtttaaaactccttatgaaagcttgtttgggactcaaccggattacaagattctaaagccttttggttgtgcgtgttttcctcacttgaggccttacaacaaccataaaatggaatatagatctgatcaatgcatatttcttggctattcttcacatcacaagggctatctatgtgaaaactccaatggccgaatatatatagcaagaaatgtggtctttaatgaaagccactttcctgcctttacagttttcaataacagtcaggtacaatcttcctcttctgcttcatttcctacattttcttttcataatacacttgttactgatgctaactcatctcctggttgtgctaatggtgctcctcctatacttatgcttaaccaaaatgttgccccaaccaatcaagcatcaatacctgtcccaccaccatctatacaaccagaaatttcacccagtaacccagcaactacacaccagcaacctactgttccatcacccatacctgccttgactgtatcttccctaccactgcccacttcctcaactacagatgctactgtaatgctacagcagtccacaaattcctctattccaccagataatgtccctgctacagcaccaatttccagcatcatcaatcgggttcatcacatgaaaactcggtctcaaagtggcatttacaaacctaaggcatacatggcaacaagacatcctttacaagaatctctcttcccaactgaacctagaacaactcagcaagccctcaaggatcccaaatggcttcaatcaatgcaaagagaaaacacagccttgatcaaatcccacacttggactcttgttccctaccatccggatatgcatgtcattgacaacaagtgggtgtaccgaatcaaactcaatgctgatggttctctcaataactacaagtcaagattagttgctaaaggatacttgcaaacacctggcatagattatgaggagacatttagtcctgtggttaacctgttacggttagaacagtcctatctcttgctgttacttcaaattggccagtcaaacaattagatgttagtaatgcattcttaaatggtgacttacatgaaactgtgtacatgagacaacccaaaggttttgaagaccccaccaaacctaatcatgtttgtcatcttcgcaaggctatctatgggttaaagcaagctcctagagcttggaatgaaaagctaaggactactttgttgcaatggggatttcacgcatcacgatctgacacctctctgtttgtctatggttcagcttcggatttgatcattttactagtgtatgttgatgacatactagtaaccggccctaattcagctcttatttcgaagttaattactgatctcaatacttcctttgccttaaaagatctcgggtccatccattactttcttggcattgaaatttatcgagattctgggggaatgtatctttcccaaagtaaatatatttctgatcttctctctagattgcagcttgatggagtcaaaagttgtcccaatccagctagttcacatcagaaattgtctctcaatgatggtgaaccatttcaggatcccactctctacagaagtaccctcggtgctctccaataccttactctaactcggcctgatgtagctttcatcatcaacaagcttagtcaatttattcatgctcctactgttacacattggactgcttgtaaaaggttactccgctatcttaaagggacgatctctgatggattacttcttcgacctgctgcatcaatggaaatttcagcatattctgatgccgattgggctagtgccattgatgacaggaaatccacggggggttatgtaatttttcttggtggcaaccttgtatcttggtctgctaaaaagcaaaatgtggtagcaaggtcgagtactgaaagtgagtttagaagtttggcaaatactg

SEQ ID NO: 309404 - DNA, 1217 bp, Cannabis indica
ccattcttattcccattcctatattttattccttccaaccaaacactaccttagagttggcctacgagacattaaagtatgttttaaaacatttcaaataatttatggtgctaaaattagagttttaatagtaagtagtgtgtggtatgtgtttttatttttttttttccaatataatgttaaacaaactgtttgaacactgattttaatatcataaactatttaaaatttctcaaatttttatattttatagggaatgagttttgtctctttttaaaaaattatattgctttgttatgtactataaactttattttatgctctttaattaaggtggaatgtactctaagctcggtatgaagtgctttgacttctaactgttagatcaactcaaatttgatctaatacctttacacaactactacctacattcttatggagtgtttgttatatgagttaaactttgagagagtaaaatttaacagtaattaaacttaaattaagagaatatgaaactcaaatagtgtcggaggaggttaacacttaacattacaatcaattaaacaagttggagtcacttgaaaatacaaattcctaaatcattaaaatttaatttaccaaacaaaaataccaattgagtttgacattttcattctcatcaaatttagctccatactaaacaccccattagtagtagaatcttcttctcaaagtggtgatagttaaaactaagctaaaaaaacagagcaatattatattattatagtagaaaaagaaaaggcaaagtaagtacctttattttatataactgcacatataaatacacatttttatattgagtaagaaaagtgtaataacaaaaacagtaacaaatgtagtttgccaaaaatgggaaaattccaaaagaatttaaaaaccctagactgtccccaactatttataacacccatagacttacaaaagatcacctctgcctagtgccctgtcctctcttctattactctatccttaaacaaaaaaccccatgattcttcctcttcttcttctttcaaattctcataacaaaaacttagaaattagatgaggcaagctagatcttctaatactaaaggaatggtagaaattgatcatcatcatcatcaacaactccatcatcatcatcatcatcataataataatcataataaaaataaactcatagaaaaagaagaagatca

SEQ ID NO: 309405 - DNA, 3106 bp, Cannabis indica
tcattggtggaatgggatgtggaatttacaggtaccacagaaagtcaaaattttcctttggagaatgtatcatcgggctctcccgactaattcccagcttatcaaacgtaagcttcctattcagtcgatatgtcacagatgtggtgaggatgcagagactccggagcatgttttagttttttgctcttcattgtttctaatttggtctaagcttcggatttggacccttctatatcatggtcggaatgggtctttagtggagttgcttgtttatctctttgaggtaattgattagaataattttgcgttgttatccatgatatggtggtggatgtggtatggtaggaactctgttttgttcaggaaaaagcattctagattggaagtgattgttgaattagctaaggatgctttggaggagtttcagggggtgggcgtgagtggtggtagtcaggttttggggacctgtgatgctggtgtatctcggatgggtgtcggttctgttgggtttgggcaggggaaggtgaggagtggtggttgtgaggctaggaggggacgttggtgcccacctatgttgggtgagtatgtgttgtcggttgatgcgacagtgactccaggtaggggatttgcggggtttggggggttatctgaggaggtgagggtgtggtttgggcggcttaggctgtgggcgctattggggactttcagttggtggtggcggagctccttgctctcagtatgggccttttgtgggctggcaggttgggatttactttaatgcgagtggagacagattcttctgttcttagttcttagattaattgtccggataataatattatgtttaaacaaattgttatgagattatgtctcttttagctgttgttggtggtggttcttgttgtgccattttgcgtgatgcaaatggtgtgactcacgcactagcaaagtctgttactagttctataggggttcatttgtggactaatgcttgtcctagatttattagtgctcctgtaacagctgatttgatttgagttaataacatgtttttacttacaaaaaaaaaaaagatatgcactatttaaaaataactatctaaatggtaaataaatattaatatttattcctaatgatgtaagttttatgattaattgtactacaattaataaagaatatgcatagtaatggaatttaaagtttttaaatattcattcatagtaaaataaatttttaaaaaataaatatgtattactgctaaaaaaaagtaaataaattttgtattgttaaatattatttttataattttgtattattcaagaatcaattgcttttaattgtcatttataagttagcataatatttaaaaattaaagtaatgtgttttagatattaggaccttacaattttttttttgaggcaaaaaattaaatattattaaattaaattagctaccaagatagcttccaaacaagcaaggacaaagcccccgcaggaaatacggaatagaaccagaagaacgagccaaaaagttagccgcctggttctcggaccgtttaacaaaattaattgaaataggaaacaaaagagaggattgcataagagcaacacaatccgaaattaaaagccccaccggagacaacaaatgcttcttctgttgcacgacttgcaccagcattagcgagtccgactccaaaaccacaccagcaggcacactcccctcaacccagcttcccctcacacaactgagtgcctcattcaacgccatagcttcagccacaaacgggtcaggttgaccataagttttaaccgccagcgcatcaatgaataaaccattatgatcctgagcaatccaccccaaaccgagactattgtcatcctcaaagacagcagcatcacaattaaccttaatctccctaaaactaggtttagcgcattgctcacacccggaagtattcggaccatacattggcgacacaactctacattccagccgagcgttcttccaagaatcaaggtaagtaattgcagcgttcaccaccctctctaccgacaaagccttattattccaaaccaagtcattacgagctctccaaactccctaagaaccatagcaagcctctcaatacgatccataggctgtaccctacaaacattaacaaaccagttgccaaatacaacagcttcaccccatccactcatccctcccagcaccctgtccagacaactcttagtaaaagcacaactaactatgatattaggaccttacaattttttagtattgacattttgtttagtaataataataaaaaatatacaactgcgtacgttagattcttaggaagtcagcagtgatactaacgtcaaacaagtagtaatgtaccctatcctatattttctgattgtttaagtttaaagtctttgtttgagtgttgttatgttgtctttattcctcgatcagctaattcattggcggactcggtggctaagtatgccagaattcatcgaattaattcgaggtgtgttttgagggagattgccccctttgtggcaatcagttagtgtttttctctttcgaataaagttcttacttaccgaaaaaaaagtagtaatgtacccaaattagttctcatttcatttcagtattcgctctcattaataaaatcagtcacttattttttaaattaaaatagcttgcgatatttttatgaaaattttgtgtcatgtaatttacagattatattatattattatgatgtataatgcctcgttgacaggcaggcaagtaggtccttgatgaaattttgggccaaagggaattacttcatgatatcgtgctttatccaaaaggagagtcacgtgcctggctacccatgccatgtagattcatacataattatagtgtaaattgcggcataaatacttaatgattcagattttatacacttaaataactaatgtttattttttgatgtaaaaatacctaatgttacaattctcttacaccgttagtaccacttccattaactcataatatggacacgtgaagggttcagatgcattacatttatttttattttattttaaaacttaattatttaatatc

SEQ ID NO: 309406 - DNA, 676 bp, Cannabis indica
acaaaacacagggtccaattggtaacttttgtaaaacagagggtccaaaatagtatttaccctgacgaaaatgctatgatttctacttttgatgggtgtttatgattttggatcataaatttcaaatgaaatattattatacacaattgtgtctatgaattctttgaatattgttggtgtatttgtataatggttttagttcatgttcttgcctaaatattatagatatttttgcactaggttttttattaagtaaaagaagggaaagagactgtttttctatttttattttggtatttttggataatgtttttttatttggatttgtggtagtaggaatttcgtattttgtacgtttagagtatttaaaaaaatcatacataaacgatgaaaagtacaagagattccataaataaaatctgaaaagaatataatctagtatttttcatgtctacaaaaatcaaactcaagtaccccactaatggggtttttttagtggtcctataaaaaaaaaaaaaaaacccctataaataaacaatatatattatattaatgcgattaaagctagtggtattcctttttaaaaaacttactattcaaatttattctaaatatttcacttatctttatttttttattattacttgtgtctttttaattatttaatttaaaattt

SEQ ID NO: 309407 - DNA, 3108 bp, Cannabis indica
tgtaattcatgatcgtttttgcgaccatacaatgtgctaacctcacttttagctaatgacaaagagtcaaattaaagcaaattaagaataatttaaatagtaaatatgaataatataaaataaaataaagtaaacaccagaattatagaggttcaaccctttgatgatggtaatatcatactccccttttgttgtattgacttgtgagtagatgaaaaagaaagccgagaaagtcttgatctctctcgaaagctcttacaatgatctttgagcatttcactcttaaatctagatttctctcttgtattttctctgaatgaattttgtgtccctgaatagtgagatgattccactatttatagggattaattacatcaaataggtttcccaaaatcaataaggaataaaataggaaatatgtttactctctataattacaataatcaaaataagaaactaggtaggtttcctttcttcttcattactacgagtttatcccatgaatttatggatagtgtcgtgtcttgcaagcatgaggatatataggttatacctctgaagatatccaactcgtgacctctggtcggtacatgcaaatcgctcacatgttggaggttggtcgggtgtcctcgcacgtcttgcttggatgttccaaccgctgctgacttttagtatctaatctcactgcacagttcatcaaaggtagaatgttctgttcagttgatgaagcctaccacgtgtcacccaagtggatgccacatcaccttgtatataaatttggataacatttttccccaaagttcgtgtgggatcttcttggtcgtacatggagttattcggctatgaagctaatcggatgggtgacgtgtgtacaatttttacctttgatatgacgtgattgatggagtgtctctttgctatttggagcattgaatgccttatattgaaagttgtgccttgagtcacacaattgcatttatgtgacaccgtatgcatgacgtttgtagtgttctaatgagtactaacgttccttttttgaggggaaaacccaaaagttcgaatttcaaattacctaattatctctctaaatgcttataaaaagggatttaagctttcttgacactgttttagcaattttaatcttcgaaccatcatagcaatattttcctttttcctcaaaaatcttcgaagaacactatattggaaatcaatctttaaaatcgtcttagcacactcaggaatctacaaacagtaaattatctaatttttttcttatgcgatttcctttgaatacatgcatacttttctaaattttactgtaattttgggttcttgaatctattcatgactggtatgagagttaggaaaattagagcattaaacttttaactaatatacgtgctgattttttatgcttctaatttcttgccagtttggccagaaattatctaaaattatccattcataagtttttgagtactaacattctttttaaacccttaactttgggactttcattattggagtgaaattccttcttttttctttgaatcgacctggtcggtatatccgatatgttttaccttcttttcctctatctatctctcaccctttctctcccttcttttgtagataaaccctgatgagttttgggaaggtgaacatcatatcaaccatgatcttttttagattctctacgagaatcatccttggctcggtgcaaactcatcttcgtctggtgaaacctcctcaacttcaaactttaacgattgggaagttagtagtgatcattttgcgcctttggagcttgtggtgaaacatcatcaataccccaaccatataagcggagagggccaagaatggttcattttggaattgaacaaggattagacgcattatctccttgatttatggatgaacaaggctgacctggtaaaatcgatacactaacacaaggtcgaccaactctattggccagatatactgtagtagcagacattgctattactattgcgaggcacacctctgaattgaattcttcatccaagcataaagggatgtcaaggacaaaaaaaaccatgaagaaggctttgaagtctgacccccactttgcttggctatttgcaatggatgaggtagagcaggctaggcctctgggcgaggatgctgaagttataattggggacgctgagactaggagattgaggactagggaaaggtccatctacttggtccctctaacgtcgaaggagaagaagaggatgatgtaattcaagtccttccttttggaggctctaatgaggctagagaacctgtctctaaggttggtgatgtcttggttgcgggacaagactatgtcgatgagtaacacaaggagacccggcccatgagcaccaaagggacctttcttgagcttcaagactctcataggcgtcctggtgggattgattgactttggtaacatatttatagtattactactcatacttttgattagcctcatcaagcacattattacaaaaaatcttagctctccccttgatatctgtgacatcaactgtaacttgagctttgacattttcaatctagaggtcagagtttagtttttagcctagacttgctcatgctccatgaccacagtgccaacctctcgggaatccccctccgcaatcaaagccatatggcataacaaagcagcataagacattatataatgcaataaaaatagcaataaaaaacctgaaatgatgtgctcaccccaacgacctattgcttgcgtgcatgagtcaatatgactggatcagaactgctacacactaccaacttcttggttgttgaatcatagatggtatctaccacttggtcgatgagttgagtagaaaatggcaccaagtcgatctcaacactaggtgcaaaatacttgttaagtgcatggcaatccaacacaggtctaggacccctggtgcgacctttgtcagcaaatatttccttctagattgaatgaggttggtcctcctctaagccatcacgacttcctcgctacaatgcctttttagatagcgatcgatcttgtaatggccgctttagtaatttggattagcaaaggca

SEQ ID NO: 309408 - DNA, 747 bp, Cannabis indica
aatgaagaatggcttatgaattttgagggggcggatgttacagttttacaatggtgggcttctgaccacaaggccttaatagtcgatatccctttggctagtgaggactcaggggaacgtaagaaagccaaatcaagccgctttcactttgaagaagcttggtgtgaggaggatcaatgtaaggagatagtagaaaagcagtggagtgaatgggatatagtggtttcgggtggggattttaagcgtaaaactgggcaagtaggtaaagctcttgatagttggaatcgtaaaaagaagaaagcacttaatcaaagggtcaaaaaattgaagacaactttgaatgtactatcggccagttcggatccaggagcttggatggaggtgaagaaaattgagaaacagttaaatgccgtgttagaaaaagatgagatgtattggcgacagcggagtcgggccttatggttgaaatggggtgattccaatactaaatactttcatcgtaaagcctcgtctcgaagaaagaagaacgcgattaaaggattgatggatagtatgggtgtttggcatcaagaggcgggtatggttcaacgacttgtagaagactactttcggtctatcttccgcacttctgttataccttcggatgtttttaatgaggtgataaatgtggttcagccgaaagtcactgatgacatgaatgagatgcttcttgaagattttacagtggaggaaattgtgaaggcagta

SEQ ID NO: 309409 - DNA, 1080 bp, Cannabis indica
ttttttattcaatgtttcaactattgaaaacctgtcgataacatatcagtaacccgtcgataatatctaaacttactgaccctcaacgaaaacctgtcgataacctatcgaaaatccatcgataaataattaagaatatacaatatttttatttttctcaaccaacaccatcggatcgaaaaacaccataaccaccattcaaaattgaccaaaaattccaaaaaatccatcaaaaataagtgtatttcaacacaaacattgacaatcattctaaatcaactacaacaaaataaaaatgaaaaatttaactaacaaactttttatagaacttaccttcgcgcggagcggaggaatgggctggacgggcagtgggtgaagcatcggactcgtcgacctgcagaggaacgagcttggacggttgggacaggtccttcgtgcggatggaaagggacatgtcttcatgcagctggaaagggacgagtcttagtgtggctaaaaaaggacgaacgactaggacgagtcttcgcgcgggcggagtgggggattggacgggtgacgaatgggaagggaccaaactaaagaggcagagctacaagggaccgactgtaggttttttttgttgtttttttggcaaagaagggaagcgctaaagtgatgaggttagagggaaagagatttgattattttcaggttttgaaaaataattaaatattaagggcattttaggtaaaataagaaattattagaatagtattatataaaaaaattaatgaagtattttttgtagtaaatttttttattaagtataagaaataaaattttctcttttcaaatagctgtcttttgtaacttatatattttttttatgggtatgttgtaacttggagtatttattgtttattttttaatgataatgaagttacaaatgtggcgtttggtaacacttttattcataaaacttttatccatcggacgggcatcgggccccatcggacccgaccccttaaaagcctagaaaaattgaaaaaaaaaaaagagtttttgagaggggtattttggggttttggaaaagtggtcata

SEQ ID NO: 309410 - DNA, 1867 bp, Cannabis indica
tataaatatcatataactgattatcataaatcaattaaatccttttactttattattatctttttattaaatagattatctaataatatatttaattcaataattaaaagataaataattaatctaatttgaattattttaaccaataaaataatcaaataaaattaacatgggcatttatatgtcacctgtttatcgagattttagaaactaataaatagagcttaagatagaaataaaacagcaaatgatacacatatgatttttacatggttcggacattaataatccctagtccatgagttacttgtattggccttacaagtgagtgtttaaacaatacaatatatgttttctatataaaccctagctctgcattccttttgttttttttagagaagaagaaagctagtaggaatttttgctgaggttcggctagtataaaattgttcaccctttgcacataaaacacgagagtatttataggcttacatgtgggtaagagcattccctttactcacctagggttttatactaagcacgttgtaagggcatgcactacaacatgacgatctgagcgttggttggtaggaaacttccccattgtgtggtgtatggttgcagtgaaggatcccatatggacaaggacacgcgtcactcaaaggtttcaccttgaaaagttgttgcctaaacaagctgttggacaaaaaagggggattcaaaggcaggtacgtgtactatcatggtctgacgcaggggacaatatctgattcagtgtcagaggatgggtagcggtcacttcaggttctagataagatactgtagattaagctccgggatcaacaagccaaagccttcatggatcatactgacctactaccattctggaatacttgaagctccaggtaactctgatcctccccaattgtggatggatagtaagagttttggagcctgatccttactcgctaaatattggggaccttcaattggcttctcgaatataatagtctcttcagcgtcttcaagcagtaagaatatactgatcacagatagtccatggtggcaccctttcgtgtttgccacgtgttaggcatttgggaatatggataacatttacccccaagctcctgggactcttgagtgatgggagcttgcaacttctttccagatgttatattcattattatgatacgccaaaaaatatcttgaaatgcagaaacaatcttccatgttagatcagacaactgaaaagttgatttatcccgtgataaaactatcattttgttgaaacatggtatccactttgtgaagctgtgggacttatgcgccaggctcaggcgcattccttctgggaaaggaatgacgaatggacttgcaaggatgacatatttgtggcgtgttgattaactaccatgaaataaaagtaataaatgccccattgtctctgcaaaggtgctggttaacgcccaaatatgacttccactagaggtggttgtagtatagatcggacggtcgatttcacagggaggtaattatggacaaaagcgttagtagaaaaataaacacaaaaagttaataaaaagtaacaaataagtaaccaataagtttgaagatttttgttttggtaataaataatcaaaaggaagcaaataaaggtgtaatcaatagtaaaagagagaaaaattttaagaatcatccatatgcttgtttggctagtttgtacctttgattcacaaagttgacaaaatgatgtaacattaaagatcattatattttgagtatacaagttcttaaaaataaaaaaaaatatatttaatcttatgtagagcctaaaaatacattatacatcaagcaataatacaat

SEQ ID NO: 309411 - DNA, 1286 bp, Cannabis indica
tatttttgtaagtttccctttagttattgctagatacagcccatattgattttaacatttcttttccaagtagaaatggcgatgtaactgactttgttttagtattatcataattttggggtttttatttttttttgaaaaatttacacaaagtacctaaagtcactttttaaaattttcgtagtatatattaatggactggcattttattagaggaaaacagcattattttcatgttgttacaacattatatattttccgcaacggaaaaataacatcatttttagaataaagtaaaaataataattcctagaaagtaaaaaaaaataatttgtaaatacattaattttttgttgtttttgagtatttatggaataataatcctttcttttttgtagttctcatgcagaaatctgggtcacacccacttgctagattagcgagaatgaattataagttaagtatataaaagagagacacaagaatttatagtagtccactccttgtatcgcgacagtaatggaataacgtctactttgagttttatttctcaagagatggattacaaaaaaattgctaagtttgaatactctaatttttagagagagaaactagagagatgctctaaccttatggctacttttttgaacttaaaagatgacctagtggagctctccttttatagtgtcggaggtcctattaaaatgacaataaaataatccaaaaaatatggaaaaatacatttaagctatttttaaccgtaaatgatgatctaatggtaaaattgactccggaggtcggtcgttaatttttggagcttgagtcgtgtctgcgggactcgcttcgggtaagttgtatcttaaatttgtacctctcttaagggtgaaatttggagccgataaatttaaaattgtgattgaagtgtgtgacatgacttgatagaacattaaaatagtttggaaacgcaaatttaatcgcgtcaatcagattagtgagttatggttgttttactaaaggttgttctgggcctattggccaggttgacatcccagcgccctggttgacatgtgacgtcaacctggaagttgggtaagtgggaaaatgtgctggggatatattttttgatgcctaagtgatatttgtacgttacttagcctgaatctgtgttctggtgaagttggtcaccaattctcggagatgttgctgctctgcagaaacgggagaaaaaaatagtaaatcgccttgtcgaaaaagtgaaaatataaagttgtaaatttgactcttct

SEQ ID NO: 309412 - DNA, 2215 bp, Cannabis indica
gcgtaaatgtgctggtaaaagttaaattttagccactgcaaatgtacgctggtaaaactttgatctctttaccagcacagtttgtgaaatgcgctggtaacttttaccagcgcagcaacgaactgtgctggtaaaagtgacatttcttgtagtgcatatttctctcttgatcttattcgagactttttacaaatgatgataatggctgtatttataagtcgaggatatctaatcccaaaggcagtgactgcaaataaaaaaaaatcatttaatttatgaaaaaatcacacataaagaaatagctagttttgagaaaaaaaaaaaaccaataatatacaaaattctcttaccaattataaaatatcatctcatcgtggtattggaacaccttaaaccttaaagtaccaaacaaaaatgatcttcaatagtaattgcaatgttccacaatatactatataactaggtatagtaattataatttccatttaagaaaaaaccatacataaaaagtagcttggtttaagtacaagtacataaagaaaaaaccaaaagccacacacacatgcatacatgcatatgtataacattcttattcattactactatagtaccatcgattgacattattatatctatatatgtatatatagatagatatctaggtgtcaatcgatatatacatatatatatatatatatacatgatttacatataattactgacttttacaaactcccattggtggccagattagaaggggagtcaacacacattcaccacatccagattcagatgagcaatctccatactcagttatcttcgggttcccaggcaccgttggatcgcagatttcgccacattttttagtcgcctttataaatccatccacatggttattattgtctaaatctgatgagtaaagatgaagaagattatcattgttattcatgaaggctcgcggcccagctgcataactagtagtgaataacaatgataaaacacatatcatcatcatcatcgaaacaactgatgatgatgatattgacttcttattattcttactaatagtacactccattttcgatttggtatgatattttctataactctttggttttagtatttatagcacttgaaattataagacacaagttatattatattattactagttatggttacacacaatacaataaatacatgtagtaataaagtgtaactactttcattattattttcttaatatgtgtgcacccaaatataattttgtgattgaggtatcattttttattttttgaattttttttttggaaaaaattcatattttttatttattaatttaacacttacaacaaagtacaattacttttaatgataactttttattagtcataacataaaacttttgtgtaaatgtgattttagtcaaaacaaaaaattaacttgttaaaacatagtacttagatataaattatcactagtttagtttaaatcataacaaatattgtgactaaaaacatattttaatcacaacaaacttgtgactaataccttacgacgagtcttttacaacaaaattaagtgaaacaaacatatataataatttaaatacaatttcttcctgattattttaataattactgtctaataatatatatcatagatttggaaagtgaataagaaatgggaacataatttggtaaaatctggtttcctaataagatacaattttttaaattacacatactaaacttataattgaaatgaaggtcttttctttttctttttttttttgtaaagataattgaaatcatgaagtgttgaagtacataatatatagatacttaaactacttagtgttggaatttgcaaaattaatgaccacctagggaatatatatgaaataaatatgtatgtcagaggtatatgttaagaatgaaaatattcatatttattatgtgcatatcctcactatatatcgattttatatatagagaaattactttatatattattcttttaatcttttttttttaaatttacgatttgagtttctaaagacgtggttacagtgcttgttgcaatagaggactctatatgattttttgtggcaatttaggttgcagcgctttgcaatacaggtttctatgtagtattttgtaaaaatgcaaaaaaaaaaaaaaaaaactaatttagtaagtataaaatagaaaaa

SEQ ID NO: 309413 - DNA, 1795 bp, Cannabis indica
tgaatattatagtcctccctcgtcatcttctgaagaatatggtaactttctcaaatgggagtttatttcccattttcttttgtttactttacttaagtgctaatgtgcttcttccacatcacagatttggacctcgacttggggaatatgttcaagagtcatcccccagccaaaaagaagtccaagaagagagtagcccaagttggtgaggtctcgggttctactaaggaacccaagagggccaagaccacaaccaacaagaagaaatcatttggccaactcaccatcaagccagcaaaatccccagagaatgaggtccctactgcgacgaattccaatgaacaacctactaggtcagtgcaccaagtgaggttctctggttctcgtctagaggtggttcttctcgagccctcttgtcccttacccccgaaggtcgaaacagagggctcaccaatatgctcgctgcactttactaatgggtggcataacttcatgatccttgggtttagcaactgggagctccttacgcaaagcagcgttatggatcttagaaaaaggagttatgaactcttgcatcaagttagtttccttttcctctttttctcattatatatattttttgcttccttctcggaggcctctcttctctcctttgctactcatcataggtcgtgtcagcaagttgagaggcctaagaccgaggttcgctaggtcagggagcacagggataccctggccaaaaaatggaacctctgtggccgaggtttctcgcacaaaggaggaggccgaaaggcaacatctggcggatcagaagaagttcaaagagctcgaggatgccctcaagtccctccaggctgatcatgacaaaaagctcaaagaggcggaagctgactccaaagacatggttcatagcatcgccaggaggaccatttatcagacctggtcggctaaggagctgaagccatgtgagccttttgtgagaaaacctggaaggagaagcttggcaaggaagaggaagtcgaggaacaacagatttatccaagtcacctacaatgtagtcttggttttttttatttatgtaggaaagtggccatgtgggcgagaaaatgatttgccccttgtggcacttttgtaaagacaaattttcattgttggatggccaactttttcattttatctttcatatgttgcctcgtatttttaaatttgaacttaatatatttgtttgtttgccttttaattcacaacttaaactattatactttgatcaaatttaaaatactttaagtaagcatttccactactcttgttttcctttttgtagtccctaagtagttaataatctactatgtatgcgagcagttattatctgctaggcattcgcgagcagtttatcaattctactttgcgtaaatagttaaatttttttttaagcagacttaaacatactttgaataattcatcttgtgtattactttgtacatttatgattgcttatataaatagttgtgccttccagtcatattttaggttaagtattttttcaaggcatcttggtacctcattttatactttcctataggatgcgagccattggatactcagctttgcatgtagcttagtgttgttttttatgagttaaatctcatttaaaactgctactattgactttgcattgcctaggtttgcaatatattatgtctttctagataaattctagttgatcatacacatacatatgcccctcaagtaatttaaataataaaactttgtaattacttggaaaatacttcaa

SEQ ID NO: 309414 - DNA, 2402 bp, Cannabis indica
atcttgagacaagggtacttttggccaacaatgataaaagactcaatggactatgccagaaagtgtgacaagtgtcacaagttctctgaaatacccagagctaccctaaacaaactcaagagtatgcaaacaccctagccataaaattgtctgggggattgacctcataggttcactacctaaagggaaaggaaaagttcaatatgtagtggtagcagtcgactacttcaccaaatgggctgaggcaaagcccatagccaccatcacatcaaagaaaattcttgattttgtggtcaagaatatcatttgccaatttggactcccacagaagatagtgtcagataacggaacacagtttaacaacgacctctttactgatttttgtagctaacatggaatcattaagagtttctcaacggttgcctatccacaagcaatagcaagctcaactactttcttgtgtccattatccattatgtaagcataaccaacacaaaaatgaagacaagaaaacaatgtcaggtgatgataaatcaaaagaaaattaagctagaaggagataagataaaagaattaccccgaagatgtcggtgaagtatctttgagcaatgacatgcggaggcttggtgctgaccaactactgtaacaggatgttctcaaccttagcaccaatcaagacatcactatgagcaagaagctaggagccttgctcatgcaattattccattaaatttgaacctaagctccgagcattatgcttaatttcatttggagagtgatcaatcggagatccctcgttagtaccagacctctccctactagagtcttgagtagaaaaagcggcatgagcagttctacccctcttcctaaccttcttcttcgaagcagcaaaagcagtaggaatgccctgaaccacttcccttaccggagactcagtttccttcaacaccggaatctttctcttcaagattaaataagatgccataacagctaagaagctcatattatctgcaaagaaaaaagaccaaaggttagtatagcaaaagaaaaacaagacaacaagttaactgcatagcatggagcatcagccacttgctaattccctgtccttctctggagcaattctaatggaggtaacttctccatcatcctaggctaacaacacaaatattctccctgaatattcagtgtcatttcgaacagaagtcacttcttctgtaattattttgtaagtatggtgtaattattttagggtaaataccattttagaccttgtattttgtaaaagttaccaattagaccctctgttttgttaaatgacaaaatgggccatatattttccaaaatggtaaaaataggaccctaagctttacttttttaacaattttattttaatataaccaactttaagacaatttttaacacgaacagatacagaatatgtaactaattttgtcatagcatctctagatcagattatttttaagttttattatgacaaaaaaccagttcagggtcctatttatacaattttaaaaaaatacagggttcattttgtcatttaacaaaacagaggttctaattggtaacttttgcaaaacacggggtccaaaatagtatttacccattatttattttgttaatatggtatatataattttattaataatattgttttattttttattatatgtatatatgttttgttgtacagtatataatttttattgtatataatatatcatttatttaagatggtatttaatttctattttattatatataaggattatatatataaattttttagtatgtatacatatttttatagtggctgttatacctaaaattcggcgagcacatcaggtgtggggcgtggacgcggggcgccggtgttggcgcaggcactagcgcgggcgtggggcactgacgtggggtcttagcatgggcgcggacgtgggtgcgggagcgggcgtgaggtcctagcgcaagcgtggagtcctgacatgggtgcacgacttccgagggatactttaatttgacaaaaagggatttgaggacaaaagaggcgtggaccgtcctttgtcctctcttgcatgtatggagcatcttgagctattcatcctttcgtttaccattcataagaatacttcacttcttaaatttttgcagttaacagaatgctaacccagcaataaaccaatatgtaatctttgcaaataaggatagttcattgcagccagcaactacaccagttgaagtacattttagaaacttgtaacttgtgaaatttatttatatatgtatcattgaaataaagcattgtatactatattagaatattttatatatggaaattattttctaattaagaaaataattttctatttaaggaaataaat

SEQ ID NO: 309415 - DNA, 4155 bp, Cannabis indica
cttgcccttgcccaaatttaagaggcccgcttggaagatgtacacgggaaagcaagaccctctagtacaccgaaagtactttgagatccaaacagatctcctacaagtgtctggagatgtgcgatgccgaatcatttcggcgactctagttgaaatagcccaccaatggtatttcaagctgcctccaagaagatttaattcttgggaagagctctcccgagatttctacattcagttctctgcttcaagaaaaatacgtgcccgactagaggatcttgtcaaaataaagcaaagacaagatgaacccttgaaggactacattcaacagttcatggctgtggccatcaaggtcaaaagcctgacaaaagaaggccaatatatggccatactcggaggcattctactgttgagtgacttctggaaagatgtcaggaggatctcaatgaacatcacacaggagttccttaagcaagtttttggcttcataaagtttgaagaggctgtccggtaagcccatccaagaggacaaggtaatgatgaacaaacacagggcctcatagcgccccaaacatagtccagcatgtcgaccaacatagatgatcgctatcaattctgacacaatgagaatggtggagacaagcgcaacaatgatgactctgcccaacataatggcaaaagagggaaattcaactatcactttattccatgaagtccaaggaagaaggaggagaagtgtgtatgcttaagtctcctattaaaactcccaaagtaaggctggcctccatcctagaagcctggcctccatctcagaagtctggcctctgcctccaaaggctagctgccatctccaaaggccgacctccatgtttgaaggctagccttcatccataaaggctggcctccctcaggcgcacaggcaggtaccaccaattttgccaaaacctctggtggcagaacacttcgggggcatcattaacggaccccatatcacaggcaagacaaacatagctagagagaactatgctcaaacactccgtcacaagcccaaaagtgacttcctggcaggtgaagaatgaggctctaagcaaccaatgcttggagagaccacgatctttttctctaagagaagattatgtccaagacagtttctcacacaatgaccccttggtcgttaccttacaaattaggaatataactgcaacaagatatatggtggacaatggagcctcctccaacattcttttcaaaataaacacatgaaaatatgaggctcttacttgttgacttggcaccctgcaatcaagtgatgtgtggcctctttaaccaaggcatcgcacccattgggtatatcaaattaccccttactgctggaaaaaaattcaaccaccaaaactttgatggaacagttagtcataatcgacattcccacagcttccaacaccatgacgggctgactggctctatgcaacttgaaggcggcagcacccatcaaccatctttgcttgaatttcccaacaaggcatgaggtggatgttaagaggagatcaacaatctgctcgttacaacttggccatgtccaaagctaagaaaaagaagattcacccaccaaatcaagagcatacaagcttcttaacagacttaggcctgtgctgctacaaagttacgcccttcaaggggccacacattagaagcttatgaacaaaatgttcaatgatcccatcagccgcaacatgaaggtgtgcgtggacgacttgcttgtcaagtctaaaagggctgggggcatatcgagaaccttgacagaaaatttcaaaatcctccgtagctaaaacatgatgaagcttaaatccaaacaagatccaagcccttctgaacatgaagtcgcccacaacaatcaaggaggtacaaagccgaatgggatgcattgctgcactaagtagacttgtgtccaagtatacaaaaaaatgggtacccttcttcaatgcgaagtagaagcaacaacaaattcgagtggacaaaggaatgtgaaacttcattctaggagctaaaggaatagattggctcgatcacctgtgtttcccaaatcgctagacaaagaagaggaaggcgtgcaccaagtagtcataaagcatgctgtgagtgctgccttcacaagagaagaggtcagtgtacaacaccctatatactacaccaacaagagactgatcgacattaaaagtcagttcccactcatggagaagttggcccaaaacttgctcttggcttccagaaagctaaggctacacatctagatacaccccataaaggtatacaccgatcaatagttgcagcaggttctacagaaaccttgagcatcaggccaattactaaagcaaactattaagactcggctaacataaaagcacctcataaccgaacatggccaccaaaggccaagctctcattagcttcatggctaatcatagaagcatatctccctaaatttctcaaagttcaagagaaaagcaggagccatagaagaagtgagaacaagagcctaaaagatgggttgaccacttgcccgatgcaagcatggccccctagccacctgggggcagctgaagcatgaggtaacaaggtcagttacaaggctttttaaaacgaggttgaatatgaagctccaaaggctagccccaacctagcatacaaagtgtgggctaaccacctagacatgcaccgcgactctcaactagtcataggttatgtcctaggtgaatatacagctcaatacaagaagatggtggcgtaccagagttggtaagacaactcaaaggctatactagaaggcaagcccccaaagacagcacaatagctgacgcactcactcaactagccagctgtgccttgaaaaccaagaaaaatttggtacctgctcagttctttaaagaactaagtcctgtttcaaaaagaacagaataccacaacaaatgcacttgcccgcctggcaagcagtaccatagttgacaaaacaaacttggtgcccatccaaaacccaacattgttgtctcagaagaggtcaacatgctggaagacactccaacatggacgacacctatcgcagcttaccttaatacaaggtgtctaatactgcacaacataacacacagaactggtaatccaacaccaccaatgagcattttcaaaatgcaagttgtatagctaatgatagaagtgcacaaacgctctacatcaattacaccgaggggcaaagccaatcgaatgcagaccgggcctttagaaggatggacgaccatgccctcagtaagctggctggctatagaatccacattctagccagccaccacctccacttgctggccggccatggcctcatccatttgcccaggcagtgctccctcaatatggctggcaacctggtcttgccctggcatgcccaatccacccatagtttgctctcatatttttagtctatagggaccaagaggatcacaacatcttgctagtaggatccattgacaaaacggaaagaagaagagaccaagccaactcaaagcagcatgactatgcacaaggagttctaggcccgtaaacaaacagatcgaggaaataaattcttcataggagaattactccctaaagaatattccttggcagcaaatcccttacaacaagcatgttcgggccaaactgaaaaggtctccaccatgctataagataacaataaaggtgcacacaagtctggcgagtacactgagaacttgagtcaaaacttctaccaaatgctgaaatagggaacatctcggtaagtactctcactggccaacttgttaaccaagttcctctaatatttcatcgtgcaggaacccataaaagcgctagtacgtggtctcccactgttcttcaacgctggcctctgctttgctaagccgcgtaggggtagccactatgtgatttcaaaagtcgacactaagatgtaagcttttggtacatgttagaccaactgtgtctaaaccacttgctcacaagactaacttcttaaagttactattttagttccacatgtgtactatggacaccaccccaaggaagaacccaggcaaagtctctaaaacttggtgaatagcaagtgactaagagacttgcctacatggtcgcttg

SEQ ID NO: 309416 - DNA, 3824 bp, Cannabis indica
caaaccgttggtcggtttatagatttttttttttttttaaattaggtgggttgcacttaaattttagcaacccgaactttagattgggttcgaaaataaataggataaatcctccaaaccgatcgatgtacagccctagtttgaagtgtcaaaacttttgagattttgtgttatatatgattgtgtagcatgctttgtgtatgattatgaattatgtgaagttaggtttaagtttgggcatttttagaccttaaaaataggaattctgggttttctggaccgagtcgccgcgaccaagtttggcagtgagcatgcctgttttcctaattttattttggccataacttatgactcgagacttcattttggacgttctttatatcgttggaaagctcatttcaaactctatgtgttaatatataaatggaattcaaattatgtgtatatgtgaaagtgaatttgggattaaccctatttgtgtaaaagctcgagaatgtgtgactaggattaccggcgcttgcttaggaacacctgagatttggaatctccacgtacttggatttccaggtaagacagtaaactagcacgtagagaatagtgcagtgacgctcatgtatgttgtttatatattatgcgagaaatcgagattagggttattatcctaagtttagtataatgtggtctagggttattatcctagaatatatgtgaatgtgaatgcaataatgtgcaataatatacaatgtgattaattagatgaaagtgtggaattaagatcattaccctaagtatttattttgtagattaggggtcattatcctaagtatttatttaaggttatcctaagttaatatgttgttgtgaattagggttactactctaaatatatatgtatggtgaattcgggttattaccctaaatatattttgtcttgagcgtgctatgatatataataggagtaaatgattagttacgcaaattagggttattaccctaaaacttcatatattggagtgtatattgaaggtattgtatgtatttatatatggtaagagttatgtgtataagatataactgggttagacctgataaatatcatctggataaactaatgtaagagcataatgtatggattatgtagttatgcgagtaaggcataactaggttagactcggtaattataaccgagacaaaccctagtaaggccttaaatgtaaaataggcgtgtgagcgtaacatgtgggcctatgctatatagacgctaataaacgtgtgagcataatacatgggtcttgctatataaacgttcatagacgtatgagcgtaacacgttttatactatatagacattaattatagtggcattattatatatggaataatgtattataaagtgcagtggcacagtttatacgcagtggaatactgtatgaagtgtaattattattataattatcatatattgtattattattctgtcttgctgagccttggctcacgggtgctctaatgtgcaggaaagggtaagtcagttgttgattagccatgaggtcgagtgctttcacggtgcactgtacatgttcaggccaagctagactacgagggttgggtctaccaggagaaaatttgtataatctccacctttgccacttaggttggcgcgtactaataacttgtaatattttgaaaagttttatgggatctcgagataaaatatactcttttgaatttatgttaaagtttattaattacaagttattatttttattctgtattttaaaagtttaattttcgctcttggctctagtagattccagtttagtgggattagtatatgtttagtagcagtatgtggcgttccttttgttaggacgttgcacgaggccccaaacccaatgcccatgttgataatctgtcaatctgagtgccttccaagcatccaatcgaagatttgacttttgctttgaatctgtcttcatcaaaaatgaagaacatatccttctcgagaaaaagaaacaagctcttggcataaataacaaggcccatcgcccaggttgacacttggagctggccctaggcctaggttgacacttggggctggccctgcgcccaggttgacgtttcaacacttaggcatctcaaaggacttcccttggatgtttcaacacttttacaacatccaggttgacgtcagatgtcaacttgggtgatggaatgtcaacctgggcgttggaacctaaactaccttcagtaaaatgttcgtaactcactcaattttcattcgattgacatgactcaactagaattttgaagctatttaagccctctatcaagtcatgtctcgcacacctggcataattctgaagctatcgtcgccaaaatttaccccaagtgagttataaaaataagctctgggtaacttagagcggtacccgccagatataaaaaattagccatcactactagaagctaatttccacaccgttagatcatcatcaatggtgaaaattaatttgtatgaatttaatctccttttttatgggccttctttacttataaaaggtatagctcttttagttcatttttcacactcagaaaactacccacaaggtcagagcttctctctctagagtctaaagtttttgatacctaaatagttgatgtaattactatcttgtgagaaataagaactcaaaatagatgtagacgcattactatcgtgacatagggtgaactactataacttgttgtctctctcttattaattacttttacttttttattctcgtcaatctagtgagcgggtgtggcttagaagtctagtcacaatttttaagtcaatattttggtactttcattgagaaccacatctcaagaaagtcactagtcaagatagttgcaacacgttctacaagtgttgacaaacagactccattagctagccaatcaattgggggcacactgttgatggagctactcccgagactacttttgtcccccaaacaccaagagtcggccttagaaccatctcctcaactcatcctccaaggccaccagcaatagctccttagactggcaccaacgaccagatcccactttgggagccacgtgtggagatagaagaccttgaggaggccattccttaggtagctcaactcagccaaactgtggctgacttgcaacaaaaactgtgagacaatctcgataagtaacacgaacagtttcaacataggttcatggaaaattggaaaaacattgaaagtcaatgctttgagcagaagcatcgaagagctaatcgtggaactgcttctcgaagaggtattttcgagttggtgagagagacaccctgtcgaccagctggtcatgtaggaactagtatccaaggtgaaaacgtgaatgctcgagctaccaatgctacacctggtaaccgagcaggcactagacaaactttaggcatggagagctctcgaagggaaagtaccttcaatcaagagcccaaaaagactcaagctaaagggtgccaactaataggttctcaacttgatgttgaacgaccttgcaacaacaaacgaaacatcaggattcctccactaagtcctcctcaacattctcaagagaccaaatctcaagaccctacaaggggaaatgtacctactactcatcttgatggaagtatgtaggagacgctactttgaaactggaggctatagaatccggcaagtgaggaccaatgccctgcttcatactcaaaagtaagggaaatttgaattttcatgcttaataaactcataaattggttttttaaactaatactatgtataatt

SEQ ID NO: 309417 - DNA, 2208 bp, Cannabis indica
gtatgatgctacaacttcatttataatggattgcgttaggaataatataagtctttgtttcttctttccttttttttttttttgaaaaggattaaactcttttagaaatatcaaagtcgttggtcagtcatctttgaattgatctaattttgaagataattattgagtcaagtgtggggacaagagcattccctaccactaccacatgcatttttcctactaaggttttttccacaaactagccactaaactaatcacccttatatccttttacactttaacaaagtattaaaccaaaatattaataaatatgcattgtggtgaactaaaaaattaatagaatatggagttgctttcttttttggttagttgttttgagacttttttctgtttctacaacaacttttgcagaggttgataccattagaccttgagaagttttgaaaagacacagctttagtggtatccaaataaggaaggtttgcacttggattcagtggatattatcaaaataattatctgggaatttggtataacaacaatgatgttaaattgttttaataattagtgtatacattattatttgctgtatttgcgtattggtgtggattaaaagagtattcagtaccacatagactgaccaatattttgaaaaatgtctaaagctacttaaaccaattaatataataaatttgcatcattttcaaaataataataataataataataaattttcacatatacttttatttaattaaattataggtatttttgcttaaatagattatagactatagcggttacaaatatcccaaatatcatctatagtattgaatttgattaaaaaaaataattgttattatgttataatatcttaaaatgtaaattagtataaacaaaataaataattaattgacaatattctaattaaaatatttgtgttaaagcttcaatgatttatgacaaaaaaaaataatataatttgttacattgttctatctaatatcaaatttaaaacttttaaaaaactacttactattggaaaactaatatttcaaaaatccattagagataatcttagctattaataaaaaaattaagataatatggaataaagaagtaaatcttgtgttttgcaaaaattattaattggatcctctttattgttaaatgataaaatgtactctatatttttcaaaatggtacaaataggaccatttactgattttttgtcaaaataaaatttaataataatccgatctaaaggtgtgtatgataaaattgtttacattttttgaatttgttcgtgttaggaattgtcttcaaattggttatattaaataaaatttgtccaaaattaagcttatggtcatatttttaccattttggaaaatatagggtccattttgttatttaacaaaacagaagatccaatcggtaacttttgcaaaacacagaatccaaaataatatttacccgataaataacaaaacaataaagtttctactactacatgagcaagtgtatattgaccaagacttttccacaaacaagacagaaaaacagatcgccctgtttttagcttaataaactactaaaccaaatactaatatgcattaatggagagtggtgcaatcgtgaaatagaaaattaataatacatggagttggtttcttttctggttaccttattacttgttttgagtcttttttctgtgtctacaactacttttgctgtggttcataatgatacaattagaccattagatattctcagacataattacagcaataattctttcttggtatccaaagaaggaaggtttgtactgaaattctttactttaagaaataagggattccaaggctatctgggaattttgtgcaacgacattgattatgtagtttgtgttgcaaatccatgtaaaccaatggaatattcataaaaaaaatattaattttacccattcaaataccaagcaaaacaataaagtttctcttagagcaagttagtgtatatattgagctttcattgccatgtgtatttttccacaatgaccaagacttttccacaactattcaaaaaaaaaactaataacttaataaactactaaagcatattatatattaatatgcacaatggtgaactagaaaattattaatataaatggagttggtttcttttttggttaccttattattagttgtt

SEQ ID NO: 309418 - DNA, 1663 bp, Cannabis indica
gtggggatttgtagccagagcttatgtattcaagtgataaagcaacttgggaggaatcgccatgagattttgattccagtcagggctttctatcaaggaaagagaggggagaagcttctgatatgtatgatcatctccctcacagaagcctttatgatcttttacatggtatgcatattgattcagctttctgaaattcactgattagtggctacaaaaatcatgattcagctttctaatttttggattactaattctgttgttgcttgtgtaatctcacttaatggttgtaatctgtagagcaattattgttaagccccatagattgcttagttactaagctataaatgtgtgtaagattacttgtttcaatattacttaaaacatgaaaatagaagaaacaaaaattgcaaaagtgtgtatttttttcgacacaccatttgttaaaacatatagaatcaaacaaagcatcacttggctctttcatggattctacacattcaggttcatcaaagcttttcaatctaggcaatctgcttcgatcagccggttgtaaacaatgacagtgacactgacaccacatccaccaccgcggtcatcatcgtaaacatgtggaagtggaactccttcaactatcaggtattaaaatgaatccataccagaaattccaaagcagcaacatgtggaacttgaagttcttggactataaagttgataataatttgatattgttggaacttggaagaatagtgtcacatccaaaacttttcaactcttgctttttcaccctttattatctacatactattttaacattgagatcttctgccataggacagccaatctccaagaccaaagagtccaaccatcataatcattagtgaataaattgtggtaaaaaagaagaaaacaaagtggggaaattatatcttggacaatgctaaaaacaaactcaaaaagatcacaatgacaaagaaaaagagatctatcacttattaatattattgaaagagatttataggctcttttggctcccaccacgtggcctaaagttgacaacttacatagagttaaaaacaacactgattggtgaaaacatgggtttgctgttaagttatgtaatgctgataaatgcatggaattatcaatgggtccatatactcacatgcaaacactctgtgtttgtggttgtcttcatatatactcaagtcttcatatcaatgaaggccaataattaaatatcccaaacaccttatattattgttattattattatttgacataatgcaatttctgtcagacaaaacttaaacaagtacagagctcaaaaggcaaatttatctctctctctctctctttggaaataaataattatctctagtactccaaattcatagaaatgataacaaaaataaaagaagaggattatatttggcactttaaacagagcctaatagcggcactttctagtttccctctattaaagtggattaatagataacaatgtaacaacatttgaggtaaaaaaaaaaaaaggtaaaaaaagtaaaataaaaaatttacactttgtcaaatattcaaatttgacatttgggggagggggcaaatacaaaataggcttttgttgtaaacagatttaatgactgcaaactcactcactcat

SEQ ID NO: 309419 - DNA, 737 bp, Cannabis indica
atttttatctggttaatcaaaataatgttggaaagaaaaaataattgacaaaaaaaataaaagaaacaacttttaatgttgtttgaatatggatgaatgattaggaatataaatcatgttgtttcagttactcaattattaatgtaatttatcaattttctttccttaagtgatgatagattatagaaataaccctatctcttctcagatcattgaagtcctaaatcatatattatctatttgcatttctaaaataaattagcatatgatcttcattaagtaaataatctaaatatcacacaggctatgtaaatactctcattttacatcaaaatctatgtttgttctattagagcattcctaatattcacttctcagattttatattaggatcataaattatatttaagatggtaattctaaaatatgtattaaaataaataagaacaaatacaataatctagagaagaaaactattaatcacatttactaaattggaataacaccagtcaatattcatcatatccctaaattgggaaattagtgcataatctctaaactaaaatccataattaaacttgaaatagaaattaacacaagaaaaataaaaaggaaaaagaaaaaaatagatggtgaacttgattcaggttgccacactcgcttccttagcctccttctttgtttctggagttctttttttttgaataataatgaaatttcattaaatcaaatcttcc

SEQ ID NO: 309420 - DNA, 820 bp, Cannabis indica
gcaccttactagctgcccaccaccgacaccccaagtccagatctaacccctgagattttctttcttcctcctatctagagtccggatcaaatctagatgaagtaatactgccaaagatactttttccttagagtcttcatacaaatgagccttataagtggtacccctcttcagaaccgtgttggtgaactttactctttggtaagtttactttatgcttacaaatgttaataatgcttagtgatgttccctttttctcacttacatagttgtttatatgaacagttctactttctacaaattgtttcataagtaactcactctcaacttacgatttgaatgaatctaatcgaagtaaattattaaaaaattacttgcaacaacaacaaacttttgtgagcgaaaagatgaacgatgttgataggtatttgcttgaagaacctatcaatccattgagttcttcattcaacatcctactttggatgtgaaaggataatgctagcaggtttaaaatcatgtcattgatcgctatagatatccttgctattcatgtatcaactgtggcttctgaatctgcgtttagtactagtggacgcattttagactttttaagaagttctttgagtcctaaaatggtggaggcactagtttacgctcaaagttggttgaaagggaatcatgaaggaatttaaactaaggagtatttggatgaaatttaaactaatgattcctactgcatagcagatgtcaggtctagtgcacaacattgcatacattagacttccaactgcagaagcataaggaacttttcccatgtcct

SEQ ID NO: 309421 - DNA, 587 bp, Cannabis indica
gaactggttatttgaatgcttataacaattatttgctagaaacaattacatcctataatgaaaccttacatgtggaatcacaagttcctaaatgtaaattaaataaagaaaatccagcaccattattgcataaacgcttaggtcatatctcaaatggtagaattgagtgtcttgtgactgatgatattttagacgctcttgacttcacaagttttaatgtctgtgtagattgcatcaagagaaaatagactaaaactaagagattatgtgtcggtagagcttctaaagtcttagaattgattcacacaaatatttgtgggccattccctacatcatcttcgaatggtcaataatattttatatcgttcatagacaattactcacgttataagtacatatatctcattaatgaaaaatctcagtatgtgggcgtgttcaaagcttacatagctaaagttgaaaatcaactcaacaaaaggattaattgttggaaattattttacgaggatctagatttactaacaagtatgtttcattgacatcctaatatgaattttaaaacaatgaaataaacacataagagttta

SEQ ID NO: 309422 - DNA, 2955 bp, Cannabis indica
ctctctctctctctctctctctctctctctctctctctctctctctctctctctctctctctctctctctctctctctcacaagaataatgcttcaggtatccttcttctcttagtagtatgtatttgatagctttaaaggcgatgtctaaatttggactaacaacttggtctgaagtcagactgagtagaatttctttttttgttttttgtaggagtttgttgtaactaaaagtttgttgcgagttttggtatgtatttaagtattagtccaagggcgtgattgtaatgtgttgttatgtaaataactaagcttataaggaaatttacttaacaaattctacctaaatttccttataagcgatgagaattattttcacttaaaggattttcgcttgatgaccactagggtcaacttcttttgtcaatccctagcaagttcatgcaatgcttgaacttggctagagttatcactttagttcccatgtttgtaggattatgttcagtgggaatctttttcgctgtgacctctccctgagtctctttgtctctgataaagtggtatttgatctcaacatggttggttctatcatggaagataggattttcctagagatttagctatttgagtagattataggagtattcttaagaaaattgaattcctttaaaacaacctttatccaaaattcttccttaatagcttctgttacagagatatactacgcctcagtggttgacatgacaactactagttacagttggacctaccaacttatgcagctagctccaattagaaaatattaagttaaagtagatcttctagtgtccttgtcactagcattgtccttctgcaaaaattggattttgtgactacttgaacactaaaccaatctcagtagtccctattagatatctgaaaatccaattcatatagctagccagtgtagttttctagagttagccatgtacttacttagtacacttataacataggcaatcacaggtatgtttcttaaattaagtacattatggacccaacaacattagaatagggtacttggctcatctcctccctttctttctctagtttagggcattcatctctagagatcttgtattgactagtaattggcttactggtcttcttggcaatagtcatctaaaacttcttaattactttttatatgtaatcttcctggcatagctttaagattcctttacctctatctcttacaatagttatccctaagattttagtagcaagacccagatccttcatcttaaattcagaactaaacctttcctttaccaaattaaccttagatctttttttatttattatcaacatgttatctacatatatcagtaagtagatgacatctttgataccattcccatgaatatacagacaagtgtcatagtagctcttagcaaatcccgtcttagtgataaaagcatcaaatcttttattccattgtttgggagattgtttaagtccatacaaggacttaactaacttttagaccatgtcctttccccttttctacatgacccttatgttgttccatgtagatatcttcctctagttcaccatgtaaaaaagttgtagtcacatctatttgatcaattttcatgtcaaatggatttactaggcaagcattaatctaatggttttatatttgactacaggggaaaaaatctctgtatagtcaacacctatgtctgtgtaaattccttagctactaatctagctttatacatcactggttcgttcaggttagtagaatctgcagcttctaactccaaaacacaaattaatatacaaaaggaaagcaatggtattttcataaacatttcacgcgtccatgaagaatggtaaaaataaaaacacttgagtccaacaagactcgatccatcccaataatattaccaaaataaactccaattctttgtttaaacaacttagatcaaattgagaccaaagtctcgaaccttcctcgtcttctccacaagaaaacttagggtttctttcataatcgagtacacagatcaatcacacacacacaatattagaaatcaaccaaacacactcatcaagaacacatgcagacacattcaaaagagagattagagttagggataaagagaaacaaacagaattaagagagaatctaaacaccacgatatgatctcggagttaaccccaaatcaatgggctacgtctccatcaagctacctcagagtgcttatttttccctatgaactacaagtaattacaatgttttcttttagatttctaaccacaatgttcggttaataatttgttgacttttctctctatttttcttttcttttctcttgactaagtctcttttactttctttgatctggttacaactgagctcaaaagagctacttctctcactactctctctctacatcaatggctctcacaaaataatgtttcaggtatccttcttctcttagcagtaggtattttatagctctaggggcgatgtttgaatttagactaataacttggtctaaattcagactgagcaaaaaaaattgtttttgtaggagtcttttgtaactgaaagtttgttgcaagtcttggtctatatttgagtattagtctaagggcataattttaatttgttgttatgtaaataactgagcttataattaaattacctaacaatttatttatcgcattttattttaaatgtaaaactttgacatttgcagaaattagattttacttaataatacttgatacccaacttgttaggggcttaaaaattacgatttttatgataaaatatatttttgctcgatataatactccataatattcaaatataattctttgaagagccttcatttttcattcaagtgttcatttgggatgatatttatttatttttactttatattgagatgtacatgttta

SEQ ID NO: 309423 - DNA, 1589 bp, Cannabis indica
gtaaaataatttccaatagaaacacccaaaacaataatttgagaagtgaagttaatcacttcagacagttggatccaccaaactccagcaattggtgtgatttactccatgtggatgcccaactccactagctaggcagagaagtatgggcggcaaggccctacccaacttagggctggcgaccatgtaccagcaccatactcaggactggcgggccttgagcataccctctcctaaggtatggccgaccaggctttggccaatccaaggctgcagctcagtcaaagaaggccagttaactaggctcctacagcagcagatccttttgtgtgagcacagttagatttaatatgagacatcctcaagggcctagctgatccaaaacatttagaacataagctagacagggtgaggggatcaccattctcggcatacatcaatgccttgcccttgcccaaattcaagatgttgtcttggaaggtgtacacgagaaaagaagaacctctagtacacctgaagtactctgagatccaaacagatctcctacaagtatctagagatgtgcaatgccgaatttttttggaaactctagctgaaataggccaacaatggtatttcaagttggccctaggaagatttaattcttggaaagagctctcccaagaattctacattcatttctctacttcaagacaaatacctgcccgactggaaaatcttgtcgaaataaagtaaagacaaggtgaacccttgaaggactacattcaacggttcatggtttaggccaccaaggtcacaagcctcacagaagaaggccaatatacgaccatactcggaggcatcctaccattgcgtgacttcgagaaagatatcaggaggatctcaacaagcaatatggaggagttccttgagcgagctgatggcttcacaaagttagaagaagctgaccgacaagcccagacaagagggtaggagaatgacgaacaaacacagggcctcgtagcgccccaaacactatccagcatactgaccagcgcagacgatctctatcaattctcaaacaacgagaatagtggaggcaagcgcaacaacgatggctctgaccaacataaaggaaaaagagagaaatttaacgatccctttatgccgtgaagttcaaggaagaaggaggagaagtttgtttgcttaactcttctatcaaaactcccaaagcaatgcatggtcagacatctcagtagggcaagtcaacaacaggcagtcagaaggctagcctccatctctgaagtctggcctttacctccaaaggctggcctccatcacagtaggctagcctccacctcaaaagtgtagcctctgcgtccgaaggctggcctccatcttcgaaggttggccaccagctttggccaggcgtacaggcaggtacacccaactctgcccgaacctcagatggcaagacacttagaggttgacattggcagatcctatattgcaggcgagaccaacaaaaacagagagcgctatgcttggatactctatcacgagcccaaaagtgacttcctggtaagcgaagaacaaggctctaagcaacc

SEQ ID NO: 309424 - DNA, 1471 bp, Cannabis indica
ggtttgaaagttgtacctcgagatatgtaatgatggttatgtgacaccgcatgggtgatgtttgcattattcattgagtactaatctcctatataagagataaaaattagctttgccctcttttattttttgctctcaaatagtcacaacaaacccaattttctttagatgcatgcatttatttttcaaattttttgttgcaaagttatgttttcttaaactattcttaattgatctgagattagaatgtattaaggcttttaactttgactgatatacgcagatgtcttttaggcctttaatttcttgccattttggctacaaattatctgaattggccaattcatgctttttttgaaaattttctagatattcaccgtgctttcaaactttagggtttgggaatttccttttcgaatgaacttccttccttatttcatttgaatcgacctagttggcatatcagatatcttttcccttctatacctccatccaaatcttacatttttacgttccttctttttgtatatgaaccctaatgagttttgggaatgtaaccgtctcatcaacaaggatgtccttcgacttctctacaaaacccatccttagctccgtgcagactcaccttcatctaatgaaagctcttcaacttcatgcttttacgattgggaagtcagtagtgaccactcagaatctccgaagcccatggtgcaacatcattagtatcccgaccagataagtgtaaaagggcacaaccgatttatttgggaactaaaaaagactgaagacgttatcttcctacatcctaaacatatatggtctaacctggtgttgatacatttccaaagggctgactagagacttcaagtggacatgttgtactagcggacattgctattaccgtggcgaggcatactttagaggtaaaaccaccacctgggtgtaaagggatgtcaaaaactaaataaactttaaggaatgctttggagtctgatccaactttgtcgactattggcaatggcttgtatggaccaaactaagcctttgaatgaaaatgctaaagctgctactagggatgtcgaggtcaaggaaatcacaaactagggcatggtgcatacaggtggccctcctaatgctgaaggagaagaagatgaaaaaggatttcaagttcttccttttggtggatacaacgaggccgaagagcctgtctctaacctgggtgatgtcttggtggtaggccaagattacatcaaggaagagtacgaggagcctcgtcctttgggaaccataagaaaaaagggtccatggtgggtctcgcccctgttcacactcacttataagagacgaaagaatatctacgacaagggtctccttaggggagtagaggctttcttactcagtcccaggcagctggtcacaaacgcaagagtgttggaattattttaccagggtcttagatctactcacaagt

SEQ ID NO: 309425 - DNA, 748 bp, Cannabis indica
tattttttatttttatttaagtttttatttttctaaaaagaaataaataaaatattctagtctattcttaatccaattttttcttgtccagtccaatcctgcgtaccaaacgggccctatatgatttgcgtttctaaaaaaaatgatatgtataaattaaatatttttaattagttcaagtttttaattttaaaaaggtattaaatacatcaagtgataagtttaaatttttatttgttatagtcatttttagattttcaaaatgtgttaatagaaatatttaaaattcaagatagaatctactattaagattgagatttgtaaaagaaaatagtgataactacaaatgagacacaatgggttatatattatgatgataacatatgagatatagtgataattatgcgaaagagtgtttacttaaataataataataacactctaatttttctctaaactatcctatttaattagttatttaaaaaaaaagtaactcaaaattctattatacaattaaataaataaataacagaatatatgaacttactaatcttcttaataataataatgaataatatgatgaacactcctatttatttttatgttttaataaataatataattagatagtataattttacggagttttttttatttttacacttcaaactagttttttttttttacatttttacggaattctacataaaaacctctattgcaccgccctgcaacctaaattgcaaca

SEQ ID NO: 309426 - DNA, 655 bp, Cannabis indica
aatacccctagagtttaataaaatctcaagaattgagaaattataactctaatatttatttctaaatattggggtccacaattaaataaattcataaataataataaaataataaaaattaatgctaatcgcctttactaatccaaattactaaagcggtcattacataaatggtgttaaagattttcattgtgatttaagtgtggtagcagtgtgataattttggtttggatggtttgacttggaattttgtggaattgttgaagaatattgggctgagaaaaaaattggtgaatttgagaaaaacagtgattgtgaacaggttgatgcgtggcagatggcttatttgttgtaagggaattaatttggataccttgatattttgaaattggggttgtaatttggaaatttttggtgtgactttgaatttctaactgttccctgccgtggctgttatgatggtgattcttagtgatatggtgttgaattttgatgtgttgtagtgttggaagtattgaaagtttgaacatattagcggtgttggataaagtggatattgattgagttacacagggagattcatcatggccgagtgctacatggagtgtgtgtgtaatgtgtaaaaatctaatttagtgtggtttggtcagagagg

SEQ ID NO: 309427 - DNA, 476 bp, Cannabis indica
aacaatgtcaattcaggagaaatttttaacggctaaaaaagttcaggggacatgatttggtatatgtcaaaattactcgtgagactgtgaatgccattttgaaaaggggcaaactgttaggccaagataaagaccattggatttggacaaaggaaggatctggtcgtttctcttgcaaatcggcctacttaatccaagctcttcaatgcttccctcactgcgaggttgccccttctttgtggaacaaactgcggaacagcaggatccttgaacgccataaagtgatgtggtggagcatcctctcaaatgccctaccggttaaggcgaccttactcaaaagattctatattaagtaggggtgttcatcaaaccgctcaaaccacccgcaccgcaccacaccgcaaaaaaaatgcagtttgaaattctttgcagtgcggtcgcggtttgaatttttcctaaaccgcgcggtgcggtgc

SEQ ID NO: 309428 - DNA, 613 bp, Cannabis indica
taaaaaaaaagataaataaatttgttacgtgaattataaggtattattattattaaatcaaaacattaaaaaaatgcaaacaagtctcgaaaacacgaaacatgtatagtgtagtcaatataagaaatcacaaaacagaggcttaatcacatgaatccacacgtgagtgaacaagatcaaccatgttggtttgtctccctattaaataaatgcttacgtaacagaaataaaaatggtctctaattttgaccttcgtaagagagaaagcttgttggaggtggtaccggtgggtgagagccgtgcgtgaccagctgtgtcagggcctgagaagaagactctgaatgtggtggtgagtgagagagagatgagtccgtagtgggattagggtaaaaacacgtaaagggttgctatttatgtttttgctgttgggcctgtaatttaaacatttttgtaaaaaatgaaatttataaatttataatgttaagcttaaatttttggaattatacaatttttaattttaattccttttatataatatgttctctctaacgttatggatggcaaatttcacttatttgcattgtctcaacaattcgaatcatttttttaaaat

SEQ ID NO: 309429 - DNA, 1322 bp, Cannabis indica
acttaatttaatattaatgtcttaatttaatattaatgggcttctttggtcagtgtcaaaaactcaaatatagatattgattctgacctccaccgtccatttccgtccatttcagacattagctgtactttttattattattattattttattttgttataaataaataaattttatgtttatttttaaatgtttttcaataaaataaataataataattattattttggtggtggccttctatgtatgtagtattaaactagtctattttctttgttgctggatctttgtgggaactagggaccatttatttaatatcatatatttgttttatttatttattataatagtaaaagagaaatcatttgagacttgattacacccttttattttatttattttttatttatttattccattttagtcattaagaaaatgacttgtctataagtgtttaaagtgtgtgtgtgtgtttgtgttattttttggcttaatttctccatcaaaatttgtcacctttagataaatgggatgagtatgacctcatacttacatagttattggtttttatttatttattattattattttaaatttggaaaatgaaatttcattgaagaaaccgagtagtcattgggttttgttatttgggttaacttagataaaattggaaaaaagatatttactagtacttctacaatgccttttaaaaaaggtgcatgacatttgaaaggatttttagtatatttttttatggtagtttacgttgtaattatttaagatattctgtaaaattttgagagattcaaaaaaatttaacacgccaaaaaatagagtcatatgtgtaacaattataaatattattagtgtttcgccacaaatatcctatatataacatagaaaaatttacataacaaaaaatttgagaaaaaactacaaaaatatatcaacacttattaaattttattttccatttttaaacttttttatttacaaaaatacttctttagtaaaattatttttttgattattttatagttatattataattatcatgatgttgtttttttgtggttgtttttagttaaagggatattggcggctaaaccacctgaactttacggtttgtaacacttaaccacaaaactgaattttcggcggctaaactgcctaaatcctggttccgttttgctctgcacacctccgtccaaaaattacaactaagtgtcatggtagactgttcacgtgtacacgtgacaaatttttagtggtccacgtaatattagttataaaaaataattataaatattttaaaaaattaa

SEQ ID NO: 309430 - DNA, 1219 bp, Cannabis indica
tttgagatggaaccacattcaccttatcccaagttcttacaggattataaatctctttatcctgcgctcattaccaataataagtgccaaacctttaggaatgtatttcgtgcttgagaaaggccaatgagttgcttggcatgaactaagttagcgaagctaaaacccatattgtaataataagtatgcctaaaggaagaagaaagaagcaaaagtgagtagaatattttagagaactttcaaggagggcttgattgttgggatggtagtgatctcattcatatgtgtaactagtccccattaacaaatgctctatagaatgtgtaggatatatacatatattgatattgaaatgaatggttcaagactgaaagaaaattagctcaaacttcaaaggggtctagtgaggcattgtcctttgtggaattacatggttttgtccatgaaaggtctattttatccatttgctacttttgattcttagattaatatcttaagtattaaaacagaaaggaaatcaaagaacactaaatttataagctttctctgttctagaaacacattctaagtgactagtgcttgagtttccttgaactagagtaagataactttcactatgaaatcaacgatgtaatatctagtattgatttacaacacattacaagtaagcaaaaatgaatccacacaaaaattaccctaacacttcattccaaatcaagtttcaagatctaagtcccttaagatttctgaagtcaagatccctttacttcttcttagctgaaatcccttcaactatcccttcagataatgcagttcaccatcccttcttcagctcctaaagatccaatgatcaagcaccaacaacacaaacaagaaaagaaaaaagttttccctagtagagcaagaatcacaagaagattctatcaaagatgaagagagttaattagaatatgttagaaacaagattatatctgtacaactcttttaaaccgaccttgacagctcatcagccagctaatgatagctctcccagatctttttccaaataatgctgacatgtcaagaattaaaataaacccagatgaatctaccaattggccagatgattcacccacataatttgccacattgaaaaatatgacacttacaattaggggtgttcatcaaaccgctcaaaccgcacgcatcgcaaaaaaaaaaaaaactaacaacttagtaa

SEQ ID NO: 309431 - DNA, 2100 bp, Cannabis indica
gcttttgtgattaaatgtttaccgctttccgttttaggcaatatatgagcgtctagaaatgaatattatatgaaaagcatgaagagttaaattgataaatgtttactttaaaagagagaaatagtatgtataagttagagttaaagcaataagtgcataactgtggagttagtgcctgactcgtcgaggttgtcgaatttagggctatttgaaagagaatggaccctacacaatcatctagataaaaaggcaagcacgtagatcctggtaatgaccaaaaaaatccaccggcactgcctgtgcctctacaaaatctaaggaataatgcaggggttaataatgctaatcaacctgctgactggcagaaaatgttcctcaaaatacgaagcatcatacttcgtcaagaagatgatttgtgttgatttatgtaatcggcccaagtagctccagttgaacaagtgttaccaccagcttctgttcgagtggtgggtaactcgaggtttattctagcgcatcgagatttagtgtttgaacattttgttaaggtgcaacctccaaagttttaggaggtactaatattattaaagtggatgagcactgttacccacattttggataatatgggagtgacgggaattgaacaagttaattgtgttgcattcatgtttcaggagcacgcccgcgtctagtgggatattgtgggacagacttgagatgtcagcattatgtcttgggaagaattcaagagcctgttcgaagaaagtttttattacattgccatcaaaactttgcatatgaaagattttgtgaagttaactcaagggaagagaatagtggccgagtataccctggaattggatcatttagtaccagcaaacttcacctataaatagaaatatgtaaggtgattgaatgccactatcagtcgggacgtaaaaattaccaccgatcacgacacatcatataagaaaatggtcgagatagcactaattactgaagatgcagaacaacatatgatgaaagagcaggctgctaaggatgtcgtcacagcatcgaaccctagtgtgggtggtagtgtcagtaaggggaccgacagtaacaactcgcatcacaaacagaagcttgaagcttccagaacactaggaagtaacaggaagtttcagggaaatagaggtggtcgtcaaggtcgtggatctacatttagatcttacttcgagtgtcctaaatgtaagaagcagcatcagggtgagcaccgagctaaaacatgcttccagtgtggtatgatgggccattttatcagaggttgtcacaatctaagaaagaagaaccaaataagaacaacaattagaatctggggtgtctgttcactataactcaggctaacgttgacgctcatgctgatgctagtccatcagtggtgacaagtcagttgtccataaacggttgttcttattcagtattatttgatttgggaattactcattcttatttatcgagtagagtaataaagagttttcataaactgtttgatgtgtatacttcggggtttggtacccaattaccctctagaaacctaattgtatcgactcggtggattaggtctttatttttttggattaacggttatgaattaaccgccaacctgattgagttataattatctgattttgaaataatcttaggaatggatttcttgtccaagtacagcgcaatgattgattgcaagcggaagatggtggagtttgaacccgatagtgccaatccagcggtgtttgtgggtaaggtacaaggatcacgcatacccagtataagaatcctaaaagctaaagatctgatgcacaaaggttgcctaggattccgagttactacatttgatactagccaacctatgtcatcaagacctgagaatacgagattggtgtgcaaatttttagatgtatttccagaggatttacttggattaccacctacccgagaaattgagttcgtaatagagttagttccaggagaaaaaccagtatcaaaggcaccataacaaatagctctagcagaattgaaagagttgaagatccaaccccaagaattacttaacttgggatt

SEQ ID NO: 309432 - DNA, 532 bp, Cannabis indica
aattatataaaaaaatatttttattttatgttattttttatttttcctttattttttccctctctgaaacctctcatcttccacgtggcatccttcccaagctcctcagagttaccgacgacaatcctcagcccaaacgagccacacccgagaaacccgaatccccattttacactctccatcttatgtcctatctctctgcccaatccacatttttttctcatctctctctttctcatcgacacgtcttctcctttgttgagatttgtctttttttttttttctttcttgcaggttgacggaggttggagcttcggccagactttttttgacggtggtgagggcttcgtcttgtgcctctgtccgtcgtagagagagaaaagagagagtgatggaggcatggctggccatttacccgtgtaagaagtggtaatgtacagggcccgaaaattaaaaaggccaatatgatttttcagaatttttttttaacccaaccttccattatgccaaataaaaaaaaaaggtttttctt

SEQ ID NO: 309433 - DNA, 593 bp, Cannabis indica
aaaaaagttgaaagtaaagagaaagaaaagacagataaaactatttcttttcctttattttatttacaagaacagaaagttccgttaacttttgtatattaccaaatataccccttaaggaacttgcaaactgaaatgttaccgttgcatgcctaaatctttgcattaaatttgtccaccatctctattcattgctgggaaaaaattatttaatgggaaaaattaatcataataaataaaggtaaggggtaaaagagaagagctgggaaccaccaccaaccagtgaatagtaaatagaaagggaaaaaaaacatagtgtaaaaaaatataatagcatctataatggaatactataaattttgtgtgtatatatatgagcttgttattgggtggcagtggtatttttcttaaattatatggaatttaatatttaattacacacagtataacactgaggaggatactagataccaataatacttttttagcaattctctatatatattttagcttatcgttataatattgaattttttttttggaaaaatacatttataaataaaattgaagttagatcttatggtcattacaaa

SEQ ID NO: 309434 - DNA, 940 bp, Cannabis indica
gaaatagaattttagttagggcacaaaacccaacacatacaactttgaagtcactcgaccagtctaagtaagtgggtcactcgaccgtgcttggccctaggtcactcgaccatgagaaagaagaatatcactcggccatagtgcccttgaagtcactcgactatgtaagagagaaaatcactcggcctaaccctagaagaaacatggccaccaagttaaggaagaaagacactttgccattcttgtccctaggtcacttggccatgcttggccctagctcactctgccatggccaagagagaaagtcactcggccatgtgttaagcttgcacataacccaatcattctcttgtcaagggcacaaccatgccaagtgggaattttcccaagtgttgaagacgagggttacgaaggtacaattgcatggacaaggcgtgcatacaaggtgggtacaaccacgcttcctgcatgtatagatgccaaggaggtatgagcagtggaggcaccacacctacaagtggtgacatctcgaccaagagtgcacacaaccactacctgcgcaactcatgaccacctgacaccagataaggatacaaggcgcaagactactacctacaacctgcaacctacaacttatggatgtcatcttctcccttgggaccacaattgtacccttcgccattaaagcttataaatatcacattctcaaatgtgagaaggggttgaaaaatcattgtaatgcttcatgcatagaaatacaagtgtttctattcctccattgttgctttgaatattttttatgtttttgaattttcacataataatcttctttctaagtctagtgtgtgggtttcagttttctgaccataagttagttgaggagttttcaccgtcaacaactgttaataaaattataatagggacttaaatataaaattaa

SEQ ID NO: 309435 - DNA, 2101 bp, Cannabis indica
gtaagaaaagcatttaacaataatatatcactgacttgtatctatgcacccatacacctacccacaaggcttattagataagtaagaacgttctttactaaggtacgaccactatacaacatgcaccacgtaccgtcactgtacgagggttggtagggttttccccatacctcgagtacccctaagtgttgtaccacatacactccgtacctgtttgtactagtgttggtaacaccataatgtactctttaaacattgtacactataccaatacagtgagtaccgctaccatgctagtgttggtagtatacgaatcacaataagcatggatatgtcacacatacatattatcacatatataacatgttctatgctattcttacctcatttctgaattcaagtgagttggctgacttaaacggaaaatctcgtggtggatggatgccctaagtcgcattaacataaatgggtaaataacacacaaaaaacctaattcaagaatccaaactcactactaaggattctgatattggtgattcttataacaataccctaattatcaaagaaataaccaactaagggtctaaaaataacataaatgacaaatcaaacattttgagaaacctgcccctcatctggttaactggttttacaggacctgtaaaaccagttaatcgattcgcaccaggtaacccaaacaagttcaaatcttgtccaatttgtgtcaaaaccacaccaaaccttccaaaatacctgtatcaacctcaaacaatactttccaaacaataacagcaagaaaaatacttaaaaacctaaagtgccattaatgagtcaagcttgagttttcaaactcaaacttgcccaatcccttttccaaccaacatcaaacaaccaaaatcaacttataacaatctcataattcaactataaaccaaacctaaacctagcaatacatgaaaccacaaatagcaaaccacaacaaactacaacttagagaaatcaaagattaagggtttctagggcttacctttagcttgaactaccccaaaccttgaagaatccacaaagaacagctgataaacaccaagattcctcctaattccaagtcaaccgaaaacaagaaagagagagagaggccttgaattatccaatttttccttttctttaataatattaaatcacataaaacttaggcttagaaaattagtggccagctaccaacctaggatcaagccacctattccattactaaaaattaccaaaataatcttcttacttgtaacttaagcaataataagcgtaggactcaaatggtccaaatagatgctaaacttacccatgtgactctaacgaccatccattgcattttccgtcgtcactgagtaaaatcataaaacttgcataattcatatttaatataaataatactcctagagtttaataaaatctccgggattgagaattataattctagtgcccatttctaaaaatgggagccacaacataataaaatcataaataattaataacttagtaagaaaagcatacaacataattaccgacttgtatttaggcgctcatatgcctatccacaaggcttaacagatgattaagaatattcttaaaagaagtacgacctctgtaccgcatgcactaagtactgctattgtactagtattgatagggctgaatcgtaccccaagtactactaaatattgtacaacatgtactacatacttaattgtactagtgctggaaacactgatcataccctttgaacatcatatactgtaccaatgcattcaatagtgctactgtactcttgttgttagcatatgaatcacataaacaacatgcatataatatacatacacatatatatacatatattctatgctaatcttacctcatttttaaattaaagtgtgctagtcgatctaaataaaaaattatgcactgaacggaggcctaatgtcacaatcacgtaaaatggataaatcactttttaagaaatttttggtgtcctaaactaaaaattagaagttttcttatcgataaatagcaaggcaacaccctaaatatcgagaaaacacgagaaaaa

SEQ ID NO: 309436 - DNA, 4237 bp, Cannabis indica
gcctaggttaataaaatgtcaacctaggcgtagggccagccccatgtgtcaattgggagtagggccttgttatttgtgcccaagaattattttttttcctctcgaaggacctattttcctatgtttaatgaagaaaaatataatgtaaaattcggatcttcgataaaaaacttggaagcaacttagattgacagattgccaaccatggcgttgggtgctcgaggccccaggttcttggtgctcaaaaaccagcttgctctgattctacttttgatgcctcaaatatgtctgtggtgtctttattttgatgtcccattgcaagttttgaccattttgcactaagacggtcccaaaaattgaaaccctagttaaggatgtcaacctaggcgctgggtgaaaccctaggtgcccaggttggcttctaggttgcaggtttatgtaattttagctcccaagacttggattaatttgctccatgtcttcatggcagagagtagtgagttggattcaagttattgaagtctgaacttcaatcccgaagatcccagagtcaacctgggtgcatggctagcgtcccctcccaagttgactgctatgacccaggtctactcaactttgtgatgttatccttcatgctacgtgtcaaacaattatgtctacgtcactagcgaaagtttatgggctaacatttggccccaaaatcaacttcacacttatgtggagttgacttgattacgtgaaccgagcctatttcttgaaactactagatgggcatcaatttcaacattcttaggcacttgtctttgttactcaagcattcccaattaaattaggactttgaacactttttcttagtccttgggaattttaaaaatcaataatcgaagaaaaaaaaatctatttttttcacttatctttttatctctttatttgaaaatttcaaattttcttatttatatttatggaataggattaattggattcgaatcctaattctatttaaagatactattcgaaattagacaaaagaagagaaaagacttttggcctttttcttatcatttatcttctttccttagtcccaatagcattaggaattgttgttaccttttaaatttgtattcctattcctagatgtataggatttttgaaatatgctttaaaaaggagaagggaaaggatataattatatcttttacttatcatttacctcttccttaggaagctttaagtttaaaagactgtcatttgctttaggaataagaaatctaaatcaactaaaaataagttagttgagaaccaatttttcacacttctagcacgcctatagcctttcaaagtacacttttggatttcatcttcatcaagcctccaagccttcctcacttcaaggcagaaaaacatttttttcttgaagttaacgctgaattttttatttttttagtttttttattttttcttctcctcctttgttggtcttattccaaggactctgaaactttcgaaaacccttaaaaaaatttttctaaaacctcctaaattctaaaacactctccttgtgccttgaaaaattcctcctagttactttgacttttttcaatccaattttgattttccttgagttgtaaaacacttgagttattgagcttgagatggctaggataaagagaagcagaagattacctgatgagtatgatccccatgtggctcagttgattagagctaagatgactgtgcctaagtctaagaacttagacgaggtacgtggtggaaaagtgatgggaactgagtttctcaaagctgccattgagaatgatgatctgagtgatcaatcctttaaggttaggcctcttgtgtttagtaccccactaagcttcaagcttaattaatttgggatgattactatcttcctaaaactgttgtctcgaagcctcaacatggtgctcccaagggttctcagaatacttgctatagtgcctagttgagattccacatgaatgcgagtgcttacttgctcttatgttcatggttcatatccgtagataactattttggtgtctgcccttagcagataaacccaaatggctataggattcttgccaccttcttcttattctactgccttaagaactggcctattccaactcctcatgatataaactttatttatgccttgaaaagaagtctaacctgcaaagatcaatgcttttaccacttccatcaatttggcccattcatagaaaacataaccaagagtaactgagcctttactaacaagagtacttttatactcctgttcttttgtcgacacagattaccttccaaaagtcagcgctttcaaaagacccgctccttttattgacatgaagaggagagttgatgccatgttgcttgaaattgatgcatgggagagagatggtcgaaccctctttagtattgaaaatctttacaaagttgggttgatcatgtcatgccaaagagtgtatgttgatagtagcttccctgacaaatcttgaaccatgccactctaacaaagtgatgaagatgctcagagtgctattgttatttgtctcaaacagtgacagaagaggtgacttatgtttaaaatgacaaagaatattcaaggataatatctgtgtttttcagactaggatgacggagaagttacctccggtaggattactccgaagaaggatagaaatcagtaggtggctggcgctccatattgtgtttttaacttgttgttttgtttctcttttgttgtactaacctctggtcttcattattttagacaatatgagcttcttggctgctatggcatcttgttcaaacttgaagacaaagatcttgatgccaaaggaaactaagcctccaacaagggaaatggttcaaggcattcgtgttgcctctactgcttcgtagaagaaggtcaggaagaggggtaaaactattgatgccgctcctcctgctcaagactctagtaggaagagatataacactggtgttgctgatgagagatctctaattcatctctctccagaggaaattgaacatggtgttctaaacacaggtttggacttgattgagaaattatgcgagcaaggctcatggcttcttgcttatagtgattccctggtgggtgttagggctgagaacattccattacagtggttggttagcactaagcctcttcatgtcatttctcaaagatgtttcactgacatctttggggtaacttctttatcttatctccttctagcttaactttcttttattttattatcacctgacactatattcttgtcttcaagcttgtgttggttatgcctacaccaaggataacgaacacaagaaggtggtggagcttgctgagaagttagggcttacagaagaccgagctatcgctgctaaagaccaggtgattgctttgaaggagaaggttgattctcttgggagtgagatcgccaagctttaagaagtggctaattgtgccaagaattagaaaattactttgaagaagagcttggtggccgcttagaagaaaacttctgattttgaagaatcttcttgcgatgctctggataagtagactgttatggttgataatttgggagaccaagtcaaggtcttgaataagaaagtaactacactcgaagatcaagcctattaacgtagattttcgttaaccaaatttgagcctcacaatagtgatttcacacaagatccaagaacaagttcctcctccagttgttatcgatgccaatgctcctcgtgttgaggcaacccacactactacttcttcaagcaaggccattgagaccttgtcgatcacagtgggagaggctgggtctgaatttgcccatgcgtatggagtttcctgttggcacaaacttcaaactcttctccccacttattggtattttctcaatcttgggagtacaaaagagatgctttcaaggaacttggactataacttcattgtaagttggccttattattattggccttattattatattatattattttttatacctctttcatattcatctgttttgcaactctccaggcttctttcgttcttttgcttccaattgacaataaatcgagaacagagaacgatgcgacaaggttggttttcacaccttatatctggcctggatggcgaaccctaatatggacaccagcttcttggaggaaaaggaagaggaatctttggctctttgcgagaagacca

SEQ ID NO: 309437 - DNA, 2152 bp, Cannabis indica
tagtagatgcatatatgattatgaagatgaagaagcatttttacaagcttggaatgagatgctccagaagtataatcttgaagataatgattggttgaggcgtatgtttgctgtgaaagaaaaatgggctttggtatacagtaaagagactttttgtgcagagatgacaactactcaaaggtctgaaagtatgaataatattataaaaattatgttagttataagcatgatctactacgattttttcaacattttgataggcttataaatgattgtcgttatgaagagccacaagatgatttcagaacatctcagagtaacttgtcattgtcatttcttgctgaaatactgaaacatgcaacaaagatatacataccaacgatattcaaattgtttcaagttgagctatgcaatgcttatgattgtgctttgcatatttgtgatgaaaagacaatatcgacaaaatacaaagttactcctcatggaaagtcaattgattatacggttgaatatttttttgttgattgcacacttgtgtgcacttgtaagaagtttgagtttgcaggaattttatgcgcacatgctttgaaagttctttcttcaaagaatatttcaaaaatacctgataaatatgtattacaaaggtggacaaaacatgcaaaggttggaatcaaagtaaacacattgaagtctatcaattctgaggaccctaaggctagattgggattgcgctacaaagacttgtgtagaaggcaaacacaagtatcgacaaaggcagcagaatatgaagaaacatatataattgctttaaatagtttcaataaaattatggaggatgtagatgcattcttaagacaaaaagaaactaataaaattcctagctccagcaactcaaatgttaaaatattggcttatgatgggcttactatcaatagagatgaaaagaacattaaggttgtcaaatttaaggaaaaagtttgtggcaaatctactaggcctaaaagtgctctggagaaagctagaaaaaataaaaaaataattcaagagaatacatcccctgaaaaaggtacatttatattttattgtaattgttatgaaatttatttggtatttttttatttatttattttctaattgcactaatgattataatttgtattgttaggttccttccaataatacaaatgctcaatctggtgataatatttcttttggcgaacaaaatttgtcaagctcattgttctatatgccacaaatatcatacaaacgctagtcaggtatttattttttttattttttttattacaaagttaaatattattatataattgttgtttgtttttttttaatttttaatgtgtgtatattttttttaattttttattcaaagttaaatattattaaataattgttatgttttttaatttaatttttaatgtgcgtttgtatagaattcaaagtatatactggagatcaaaataatcaaacaagcatgattgaacttatgcaacaggtatatatattatatatatattgcttaaatttctataattagaatataatcttaattaatagtaagattttttttgtaggttcactcgttaccaacaaatcatcatgttctgtttggagattttaaaaaataattagaaaataagaaagtaatatgtacaaacattagttaccagtgcaattttttttcaatgatattatgacaatattatggaagagtatatattttaattttgtggtttacttttggatatattttttgtgctcttctttttctttgaggataattttatatggtgctagaactttatattttagtattttttgctcactaataatttacaaaaaatactgtgtaaatgtagagtgaggaatataattatgtgaaatgtgtatgaaattatttttttgatgtgaaatgtgtgtgaaattgttagcgacgaagataaatgtttctctagtagtcttttaatatttttgtaatagaattttcttgtcagaaaaaagaaaatgatacctatatattataactaggtaacgataccgcgcctcgcgcgattgtttaaaaactttttatttatgttgtaaaaataaaatttatattatatatatttaaaaaattattagttaattaatatgt

SEQ ID NO: 309438 - DNA, 1107 bp, Cannabis indica
aaaagaaccaatttttatttttatctaaggataaagaataaaatgaggaaagcaatatatttagtttagacttacttgtccaaaatacagataacagtattttcagggtctttgaagttttccaaaaccttatttacaaacccagctgtatcatcctctgaaaattgaacttggactacactcttatttatgatcttcaaatttggggatttgagatacctcaaactcttctggtctctaatatccaaaagctgcacatttgggtcatctctcagttttctaaaagcatcaatggcgtatatgaacttgtacttcctgaaatattcttgtgttaaaggtataacaaccaaccaaatgaaagtacacccagcaacaaaaaaagggtatctgttaaaaaaattatcaattgagaccaagactgcttccaagtcgattttgtttggcgaaacttgatctgttgaggaggagactatagattcagaggcaaaacatggagatgtgtagtaagttgtaataagctctgtgagcacgaaatagaggtggggttttgctaaggtttgagaaagtggagaccttttgagaagagagtgagtggtttgaagatgatttgaaagggggtctgtgtttggttgatggattttaatagaggaagaagggaaatgggtttgaagagaattggatagatgaaggtgagaagaagaagatgaggaagaaggattgagtgttggaagaaataagggtggtttagagttaagtgagtagtggggtttggaatggttttggagaggaggagaaccgaagaacacagtggaaagagactccatggatgacaatgagagaggaagaggataaagaatgacaatggtgggttgggctctcttccccaaccaataggaaaacaacacgacttcttgcaatactaaataaataaatgattaaatcgtgttcactaaattaaataggctagtagcttattagctagtcttaactcttgcgttgtctaaagtatataatgcgtttcatgtctccatgctgagaaaatatgtatcaaactcgactcatattctgagtagtgatgatgttaaacttcagacaaatttattatat

SEQ ID NO: 309439 - DNA, 1208 bp, Cannabis indica
gtattttactaataagaaaagaaaaaccaaatctacaataagttcaactaatgcaatgtcatagtccatgtcatgcaattcactttaaaatcttgttatccttctctaaaagcttaaaggaacaagagtgtttaaatatcatccccgttcttactccattttctatttagacagagaatctctatccttattaacgacggggccctacgggatccatccctatcaactacatctaataatatttattatacatagatttctatactagctttaacttgtcctataaatacacttccctatatacatatatcatcaaagaaaaaaaaacatagaaacacatatatatttctagaaaacgatgatgatgaagagtttgatggtagtatttgtggtggtgatggtaacaatggtcaataatatggggttgttgtgccatgggactagagtagcatatagtgttactatcattccaagtagtaatgatgaatgtagaatagaaaatcaatactgcagtgccttaccttggcaagccaaatattgttgtgaagggcttacctgcgtaggatttctgagtagcgacaacaaatgtgtgaaggattcaagttgtcgcccacgtgtcggtgatggttgtgcccttttgtcaccttgttgttacccaaatcattgcagtggtactactaggggttcaaaatgtttgggccctggaaaaacttcttctacttctacaccatcatcaatattgtcactagatcatgttgatgaataattatatatgtgtgttgtttgtttttgaattgtaataagaaagtacctctctatagtacttatacaaggatatatgtcaaaccacgttattatatacataatgtggaaatataagatgtataccaaaattggtactttcatatgaataaatgcatgtttgttcaatatatctctatatgttatttctcatccttctgaattatatatatatatatataaaggataagattatagtagagatattacttttgttctattgtttgagatatttttcgcttgctttgatatatatatggagaaattataatatttaaattcattttcagaatgatgtcactacaagaaatgtaatttttaccagcatatagttcactactgcgctggtaaaagtaacttttaccagcgcatttcgcaaactgcgctggcaaagaggtcaaagtttt

SEQ ID NO: 309440 - DNA, 817 bp, Cannabis indica
agaagtcgaggaggaggaagagaaaaagatttgggtagttgagatttgggggttgttggattaagttttgggtagatgaggagattcggtggtggaggagaagaggttcagtggtggtggttggtggtctgcctgagtttgagggaaagagagtgaggaagagaaagagacaaagagagaaggaaaatgaaaagggggtattttaggtagaaattgaaaacaatagcattaaattgtataaattaattatgagtctaaattttgttagaaggtattttattaagcattaaaaatgaaatttccctatcaatattagtgtaattagaaatatgatgtcacacaatttaaattaataactatagtatgaaatattactaactatttgcaagataccacagatgccaaatagcattaatggtcatctattagttatgcagtttgaaaatttttaaacgtggctttatagctcaatatatagtttcccaattgccctaaccagaatcttattaacgaacattatttatttatttatttaaaaggaaaagaaatttaatcaactaactaactttattaaacttacttttcagacttaaattattatagtacaaaagttacctactatctcaaggtaattgtatactaataatatattatatagaacaaataagtatatattattggtgatttcacaaactaataattaagctcttatttaagccctatcatcatgactctctacatggagttccaacaaataccctctttccaagtccttctcttttcagtttttatgtttattttgggtagcatactcttg

SEQ ID NO: 309441 - DNA, 926 bp, Cannabis indica
atgtctccaaagctaataaccttgcttttgattagacctcttctttcttctttcttcttcaatttcgaaaacactatagcctattttcacaaatatttttcagccattagtgatagagtgagtgcccacacacatcaagtggtatctcaatcatagtgtggaagactgtgaagaatccaatcaacaaaaaggagaatcatcatcaaggaaggagagaaagagatccaggttcagatcttgataatgctctgctacagaaaggaatcaagggctcgagaagtttaacgaaatgagtcattatattccgctgcaaccaatgtaaatgtttcctaaactttatatgtgtttatttcattgtttttgaattcatattaggatattaatgtaccatacatggtagtaaatctagatcctggtaaaatatttccaacaactgccaaaacacaatattttttctcagtcccacacattgaaaagcagcactacaccattaaaaaaaagttgtggcaggtccaacaacagcctgaatatcgaccctactctggcatgtttcaattgccactactacaaaatatcttttaaaggtggttattgtagctgattaataagaaatgatagctataaagcatccaaagagtttttcgggctcccaccccttggaaattaaaatttaattgttgttgtcctttattcaaaaaaaaaaaattaattgttgttatattatgaaacaagagaaaaccccatgatcaaatccacgcagaactcttattttcagccccattttagccattttagggccaatttggctcatttatatattttttttaaaaaaaagtctttcattttcaatacccaaaaacacattgtcgatattggattatttgtttttagcattttagtattaaactagtggagtctcacgtgct

SEQ ID NO: 309442 - DNA, 5396 bp, Cannabis indica
ttttttttttttttaatatttgacctgtttctgtgcgtattttatgccttagtatccccctaagtgacgtgaaaaagggctttttgggtcacttagcttaaatctttatgtgggataacccatatatttagttcatgacaggttaacttacagaataaagaagaatgtaaagattgaactcctaactattgatagtacttgtggagatggtcagcattccaggctctaagtactatggatccgtcaattcttttgagtttgtaagtctcgaatcctatttcatcgtcaattttgtatgggcctacccaatttggcccaattacccccactcctggctcttgggaggccaggaagaccctccttaggactagatcaccaatggcaaatttcctattttgactttggagttaaagtattttgccaccttcttttggtatgctgtcatgcatatctgagactcctcccggagctcgtctactagatccagcgcttcttgcagtaatgcttaatttgttgccagatcattggtggctcttttgtgggacgagattatagattcaaccggggccattggctcacatccatacaccactgagaatggggagtgtctggttgtggttcttgtagtggttcggttggcccataacacgcgtggcagttcctcaagccaattatttgcaagccaacaactttttgattagggtgacctttaatattttattgacagcttctgcttgtccctttttttgtggccttgcgatcgtagagaaacttttcatgactccgtgttggtcgcaaaaatctgtgaattcttcagagtcgaattgtttttcattatctgagactattttgtgaggtaactcgtatcgacatacaatattttttatgacaaagtgcaaggctttcttggcagttataatcttcatggattcagcctccgtccactttgtgtaataatccaccgccactatggcatatttaccccaccctttccagtgggtagggatctaatgagatatatttcccatactgcaaaaggccagagactagtcatcaaagtaatctcattgggtggggctcttgggatgtttgcaaatctctggcatggatcacacctcaggacatagtctatgcaatctttcttcattgtgggccaaaaatacccttgtcttaacattttctttgagaagcttgggcctctagtgtggtctccacagaatttctcatggacctcttgcataatctgtctagcttcaggatccgacacacacctcaagtatggcatgttgagcccccttcgataaagaacactgtcaatcattaaataccgatgagcttggtaatgtaattttctggacatggtcctttcttgaggcagttctcctattggtatgtacttaatgatagggtccatccaatttgatctttgttcgttgatggccactatttctttgttcctgatgctaaactccacaaggtgttcgacaggtaccacccccagcctctctatctcactatctgaggctagcttggctaagcagtctgcatgagcattcttttctcgtgggattcactccaccttatattccttaaactcttggagcaattccttgacgattgatacgtaagtagccatcttttctccccgggtctaatattctcctgacacctggttgaccaccagttgtgaatcaataaaaaacatccactctattggctcctaaagccttggtcaatctcaatcctcctattaaggcttcatactcaacttcgttgctagaggccgggaacgtgaactgcagggcagcttagagtcgtatcctgtcaggtgagatcattattatcctagcactagacccgctttcattggacgccccatcaacgtataccttccacgcgggcgtatcctgagttggcatactggcgttggcctctgtctcattgcactccacaatgaagtctgccaatgcctggcccttaatcgagatgtgtggaatgtactgtatgtcgaactggcttaattccatggcccacttgaggagccttcctgaggccttaggcttttgtaaaacttgccaaaacgggtgatttgtgaacaccttgatggagtgagctgggaagtagggtcttagctttcttgaggaaattaagagatagaaagctaatttttcgatcaaaagataccgaattttagctcatatcatgctcttgctgacataatataccgggtgttgaactttttactcctcccggaccagagctgcactgactgcgttctcgaaaacggctaaatataaatataagtcttctttgtgaactagttttgacattactggtgacttagccatgtgttctttcaactttctgaatgcctctttgcattcttcagtccattcaaacttttggcacttcttcaagatgttcaagaacgtgatgcacttgtcggttgagcgggagatgaagcgactcagggtggcaactttcccagttagactctacacatccttatgtctttttggggagggcatgctcaataaggcttgtatcatttcggggtttgcatctatcccgcgttgactcactatgaatcccagaaatttttctcatttgacgccaaaagtgcattttttgggattaagtttcatcccatacctccagactacctcaaagcattctgtgaggtcgtctgcatggcccatgcacgttttggatttgaccagcatgtcgtctacatatacctccatgttccgtcccaggaggcctttgaacatccagttgaccatgcggtggtaagttgctccggcatttttcattctgaagggcatgaccaggtagcagtatacccccttgtcagtccggaagctagtacactcttggttagcgacatgcatttttatttgattgcaccctgaataagcatccataaaggataataacttgaaccctgaggtagtgtctaccatttgatcgattctaggcagcaggaaacaatcttttgggcaagctttgttgagattggtgaactctatgtaaactcgccacgttccatttagtttaggcaccagaactgggttggccaaccactcgtggtagtaaacgtcccggataaaaatattggataataacttatccacctccttttccagggcgttagcctttattgggtctggtgtgtgtcttttttgttgtacaggaggcacatttgggttgacatttaggacatggtgatcacatggggacttattctagtcatatccccatggcaccaagcaaagacgttcgtagacgcctttatagtgtctatgattttactttgctcctccggttctaggcttttccctagacgaataactttagattagtcggggtcacacacccttacttccttgatatcttccatggcctctaacaccgcctcaaacccaatacgagggtccaactcgtcctgttcttctaccaaaactagtcctgaccccccgtatcatcaagaccaataaatgtactgcggcgttgtaacgttgtcttacttctccttgatttcccctcactgtccctactctggcctcccgagtggggaatttaaggcacatgtgtcgaatggaggtaattgctccaaagttgaccaaggacggcctgtcgagaatggcattataggcggtggggcagtccaccacaacaaaagtgtagtatttgaacgtgctttggggaatgtcaggacacaaggtaacagggagcctaacctttcccattaagatgtttataatatattagggtacctaattattgttattaattaagtttattgtttaatttaaagtgttattaattaattaagttttggggaaaaatgtgaataagagtaagaagagagaaaaagataagtatggtattatatcgtagcaaataaaaaatactagaaatctttaaaaaaattgttaatattattgtgaactaatattttgttcctttattttatcgactaaaaactgttaattgactataccatactaaacattttaaatttacaactttttaattaatatttaacactaaatactatgaacgtacttttaaattatgatttactaattagtgactacaaaaatttaaaatataaaaatatctatttataatttaataaaattgttgttaattctctcccactcattaaacttttttattttttttttcattttcttaatcattttttagttaataattattttttaaaaaatcatatgttaaaaaaaatcttctaactataaaattgttttcaaataatataatttatagttattttttaataaatcaaatcaattttaatttagatttatttattattaaaaaaatgctacacgattaataattatttagaattaaaaatatatatatatataaaattaaaactaggatgaaggagaacaaatttgctcccattgtcaatcatatttttttatttaatattgttaaatttttatctattttatcttattattaatatatgtatacatctctatttatgtatatatcattccaaatatttctcaagaaaaatgagaatatatataaatatatgagtattccatgatatttaaaccataaatgtaaatttatgttaaaaaaaaaattgatacttattaattattaaagttgtctgttttaattgttatgaatttttttagtatatttttttagaaacccctattacaactagtcagtaaccactttagaaatccaaaccgtaaatttaaaagaaaaaataatatataaggtaattctcttatttatttaaatttatttttggaataaaaataaaaaataattactcatattattagaaaatataaaaaaaaaataataaaaattaatatctcattaaacaaaatacaaccgcaggtaaaacacaattttttttctaggtaatcataatatataaaataactcgtatgagaagcatatatatatttttctttttgtagagtaaaacaataacaaagagaagctgattgatcatataaaataatttattgaaaagttgtctcttttagacatctttccacagctactcaactaaaaaatctcatgatgattaatcgtaatagccagtggacgaggaagaaagttatatatatttccaaaatttctatgtattttttttgacttttatgtttattattgttgttttcttatgcgtgattggctatagctacgaacgaggactcagcatatcataatttataaacatagcaagtccatgccatctcataactttagcgaaaagggcattcatgtcctaatcttttctttcttttcgtgtaatacaattaagagaagggatgttaaagggtaccagtggtgcctagcacatttctgtgtgtcaatatctctattagtcc

SEQ ID NO: 309443 - DNA, 559 bp, Cannabis indica
atatatatatataaatataaagtatgtaaatatgttaccgatgcattctcaagctcggcaataaatcgggcaaagcatcgtactccattaccacacatctaaaatatgaaattataaacaaacttttcatctttcaaacagtacagaatcaattaagcataataatagtgaaatagtatcaaaacaagacttgaaatctccatcataattctcaatctcctattatcaacccacaaaaatccctttagatgaaaaatcgaaaagagagatgaacaaacttagctccatttttcaaatttaccaggatgaaatccttgccgaggctatggtacttgacaaaatgaaggaaaccggtctctctgggatccaaatacggctgtcagaggaacccaaatggtggtggccgtagacataactttgaagctcagtagagtcttcttcatcttcatactgaaaatttagtgggctgggcttgaaaaacaactgggcctaaattttgggcttacttcagttttaccattttttagacttttctcaaaattattttttgaggaaatta

SEQ ID NO: 309444 - DNA, 1589 bp, Cannabis indica
tataaaataaaataatgattcttttcttatttatactttacctatgaatagatattttaaaaaattactgttgaataatttttttttatatataatgcacatatttttatacacacatacatatataaatatacacacaaccataaaaatacatatatattatttatacgtactctatacatataaatatatatatagatttaatataaaaagttataaacattaaaaaaaatatagatatatatacatatatacacaaaattatacccaaattaaagtatacacaaataaaaattagagcttaccttgactgagagcgggagagccggtggtgtggattagctcgggcaacggtctgttggtaggcagtgggttacctttgaatttttttttaaatttaaagagagagagtgagggggggatgtgggtggtggagatgatagtggggaaggtggtggtgattagaaagaagaagagaaagaagaagaaaatgggaaaaagggggacggtgctgagttttattcagcattgacttttgctagagaacttaggcttgccggtaaaaaaatttccctaaattaaaaatgaaacgtagtgtttcattaattgtaaaaagtttgtcgacgagcttaagtgcatcaattttttgcgcacatctttactgcgcgaaaattaaactgccaaaaattttatcactttcgctgatgcatttactcgccagcataagtaaaattaaaccaccaaatatttattaacttttgccagcgcacttattttaccagtaaaagtgaaattgaatcaccaaaagttggctccttttggcggttagtttaccaccttttgtcggcaaaattactgcattttgccggcttagatcacttatactggcgaaataactcgttgctataagtattttctataataaaatgagggataaatttaccatcatttacaaacgagattcgtaaactgtgccgacaaaagtcaacttgtgccagcacaatctcacgagcaaaaactctttttcttgtagtgtgagaagtgttaacaaatgtatctattaaaaaaatggatttttacaaaaaatactgaatattgggtcaaagtttacaattttactgccacacagaatttttacaaaaatactgtttttataaaacaatctaaaacaaccgcaaaataacaaaacatgacaattaaaaataacagtaaaacaactaaaaaaataaccgtaaaacattaatgaaaacttaacacagtatacttgaaaaaaaaaaatttcaccccgcaataaaaaataagaaaaaaatttaaaattttaatatgtggtgtagtaacccctaaaaaaacatagaagtatccataaagcggcaggttatactgagtttaaatagctgatttttttttattattagaataaactttattaattatatctacgtacgaccagtacggaggaagatgtttttaggtaatgtttgaaaaatcaaaacaggaaaaataaaataacatagcgtattggaccattttattttaaaggaaataaataaaaataagaattattatatggttaattaatttggatatta

SEQ ID NO: 309445 - DNA, 3676 bp, Cannabis indica
gccgatttgggcgggttaacccgaccaaaccgcccaaaccattggtcggtttacaaattttgtttaagaattaggcgggttgcacttaaattgagtttgaaaatttagaataaaccgcccaaaccgaccgatgtacaattagttcttagtattaatttttcgctgttagtgaatatgattggtagtggttctgactaagactaagtgcacaatataattttggctgatttatagccttttctaatgaaagtttttcattctaaaataataataaggaaaagtcagtaacatgcatgttcaaattaacagaaatgatatggtaacttggatgaaatataggaattgaacaattgtcagatttttaatggtactacaataatacaataagaaatgtgtaatagctggttttttattatccttatgttttcttttatttctacccaaaaaaaaacacaaaattgaaaatgacataaatttgatggctgttgtccattgcagcgagaactaataaaacaacacagcacgctcgtcttcatagcactgaagcatttccaccacttgcctcatggttggtcgaacatccttgtcttcttcaacacattgcaaagccagtttaactaaaattattattttgtccttatcaaactcacccaattccaacatagttggatcaattatttcttcaatccttgatgcaaaaataccatcttctccattcatcttttccctcacccaagttaccaatctcccatgttgatctcctattcctcctccgtaatcataaatctgcatgtctgtcgattttctcccagtaactaattccaataccaccattccataactatacacatccactttagaggtaatgggaagattatacacccactcaggcgccatgtaaccccttgtacctcgaatcctagagaagcttggatcgagagactcacctctgtttagcagctttgatagtccaaaatccgcaacctttggattgtaattagagtccaaaagaatgttctcaggcttcacatcacagtgcaaaacccactctaagcattcatcatgcaaatatgctagtcctttcgacgtccccattgctatggcaaacctcttctcccaatcgagtactatgctgtttgagcttttcaaattatctgctagagatccatgctccatgtactcatacaccaacattttattctgtccttccacacaataaccccacatctcaatcaagttcatgtggttcaacctcccaatcgtgctcacttcagctaggaattcagcttcacctccggtagtgtctgtcagtcgcttgattgccgcgacacgacagtctgatagtacacccctgtacacagtgcctccgcctccactcccgactgagttgcggaatccagccgtagctttcctcagctctgcatatgtaaatttttgaaaccgtgtagcagcagcaagggtgtaaccatgggagtcatctctgctctcttttcttgtcaaatacaagaagcaaagcactatagaaatcaataccagttccatccctcccaatgcaatggccatccaaacaaaaaccttcaagcgtccattttctttggccttattgtacgttctttgaagcatcaccatcttgggagaagaagaagaacaattatgatctccttcattttttctctgaaaagaggaaatcattgctctagggagtcttatatagacatctcctgggaaagaagaagtgtgagctccattaaccagtagatgcttagtatagcatctagaagcctgaaaattgttgttactcatatgaaattggatacctttgcaatcggacacgttcaaacactgttctttacattgttttaaggaaagattctcatagtagaacttgtcgtagccatagaactcagcgttggcaatgcggtgaaaactggtgtcccgtgtatacctccattcgaattccggttcacacccaaaggcccaatctgaagaatttttcaccttatatccaggcacacaatagcaactccttcctaaaacgtgatcataatagcacatactattgggtccacaaattccatgaatactacatggaatggatatagcttgccaagtaacattccacgtcttattttctatgtcaaaactatatagtcgaagatttccgtccgtatcaagagttaaccgccgattaaccttaacaccgtaatcagaggataaaaacacgagattatccgatgaagcaaagtcaccagtagaggtaaacactgcatttttggtgttgttgtatgtaaatcttccagtttgaaatggcccgagccaaggagctggccagtacacacttgatacgagcgggtcgggaccttgaaaacgtaagaggaggatgttgtcatcgtcaaaataaaagttatagtatccagaagaatagttggtctgggattttgaagacacaaggttggtgttcatggtgaaattttggttaggaagaagtgtatctgtggggaatttgaagctttcccagtaagtaacatgtttaccaaacacagcgcttctgagaacaaggttgccggaatcatggagatgcagtttcacaacaaggccggcacagaacctgttccccagtcccggtgtcgtgtcggtactccatacttgatctctgcctatgtcaagcaagacaagattaccgttttcagtcagcaaaagttttgaccctcttccgttgactggttggtctcgattggccatccaaactatggtgggaacagaggacttggtaaaccacacactaaagcagaatgcattttccccaacagggtaaaatcctgccgagaaatctccgttggatgaaaccaaaatgtcagtgtctgctttttcaacacttagggatgaaccttgcttcagagtattgctagtagagattgttgtggatgaacataatgttgattgaacgaaaagaagaataagaaagtaaagaacatttttatgcaagatttggttcattattgcctaatttaatgaactagacataatttcttatgcatttttatatatagactactgaatgatatgaatgtaggagtcctagtccacacgttaactgaatgaatgatatatacaaggtaaatgtctttaattaatttccatattcaaatcggcagattttactattgactcttaacacagtttgtggtgaccgagaaaatctaatgggaacaaaagtaatgtcaaagatcctggttggcgatatcaatcaaggttgaaataattggagttaggagagaaaccactcaacattttccgttggaaagacggcactgactcacaagtcacaaccacgaaacatattcaaggtgactctgactttcggcagtaataaatcgctggtgttgacaaggtattactatcttgctcttttgtgaatgaggggtgtgattattaacaatttcacggggctctcgtttcctattaactgtatattattaaagtaaactggttaacaaagcacgaagtgcatatactaattttgaaaattttattatatactttctttattagtacaacaaaacacaatttttttttattacatataaaaaataataaaattacaacttaataccaaaaatattaaaagtacatataaatagcaaaaaaaaatcattaattttttatatatatatta

SEQ ID NO: 309446 - DNA, 725 bp, Cannabis indica
tttgtgtagcaaatccatgagagggctcaactcaacatagagagaatgatcgagcaatacataaagcaagataacaagggtcgtcacatgaaggtttttgagcccggtgaatgggtatggttacacatgacgaaagaagggttcccagcctaaaaaagttccaaattgcttcctcaaggatatggaccatttcaagtgcttgaaaggatcaatgacaatgcctaccgactcgatttacctggtgtgtataaggttagtgctacttttaatgtttctaatttgagcccttttgatgcagatgatgatttgaggacaaatcattttcaagaaggggggaatgatgaggacactaaggctaaagatacatgtcaagttttagttggtctggtgacaaaggcacgaaccaaaagattcaaagaggaactttacatcctagtccatagaattctaaaacatgaggagactgtggtcaaaactgaaggagaacttaaatttgtgcttctcattaaagtagactcaatttagacttaattttaggagtatttttgacctaatcacgtttttatgatcatttctttcagattttggcaacttttgtcaactttccttttttttttttattttgtttcctttattctgtatttgttttatttagaaattgtctttgtttttagtttccttttttctttgttgtaagttggttatataaaaccttgtaaacactt

SEQ ID NO: 309447 - DNA, 1803 bp, Cannabis indica
ttacactgtgtaattactaaaaactttttattttaaatattaactaataaaaaaaaattattttcttatgtaattattgactattttgccaaacaaaatatttaaaattcatatattttgtattttaaaatatagtgaaattagtagattgtttaattatatccttaataagtacactaactaataattatacagttacttttaaacacacttaatttatatctcatgagctttttagcttccagttagacaagtagttcattttaaaatgaggattctacttattataatttgataaatgatgttagaaattgctagtatggaatgtcacatcctattagatattgacatatcaattatatattacctattatattatatatcccactttattaatataactatttatttaagttttaaaaaataaaccatcgttttaactatcactaactcaaaacatagaaaataggaaaaaaattgaaagaataaagataacaacaaattccatgaaaaaataatataataatacgtataaaaaaataaatcaagttatcaaaactaagtaaaaaatggtaatgcaaaaatatatgaaggagttaatattattttatttattgtaattaggtcaatgttttgttatttttctgttgccttgtagttatctttttgttatttttatgttgtttgttaagttgttatagaattgttttttagctgttttagttgtttttgagttattgtttttttaattttactgaaacacaatatttttataatttttaaactttaacatagtatttttgtaaacttagtacaataaaaatataaaaattttcatgttttagtatttttatatttttcttttcattttacaatatttttataagtttctctaaatattttgattgataataggctttacttgcattcatacatggttttcctatgagattccccccacacactactagccctgcttttttggtaaagcgtattaggaaaattattgtgtaattgaaagtaattttacaatttgacatgtttgttaaattatataattatactgcaactatatagttaaatgtaattaaaaaattctaattacactttttaatccttatagtcctataaaaattgaatataaactatataattattaaaaaatttctattttaaatattaattactaaaaaaaatattatttttatgtataataacttcttattttgacaaataaaatgttaaaattttttgtgtaattaatgatctcgtatccaaaaacacttataatctaaataacttgtaaagtcgtatgaaaaaagccaagctacacttattgaccagtaataatacagagcaatagcatggcaaattttggcaataggctgttgaagaatattttcagaacaataaattgctttatttgtgggcacgttttcattcattcttatttgtcgtattaattaatatgttgttgtcacatcccttcccagtggtaagataaaagattctcctccccactcaaccacatattatttcagtccatttcaaaaaaaaaaaaaaaaaaaaacagcaatccccctcttttcctttcccattttccataaaaaatttctctctatttatttccagatttgatatcctctatcaaaatatatttccatacatatgatattttttcatcattactttttttttataacattttcatcattatttgtactattatttattttggaaattatgcggagcacttttctatcgttctacatatttacatttatttttaaccaaaaaaaaaaa

SEQ ID NO: 309448 - DNA, 1053 bp, Cannabis indica
taattttataaaaataaaaaaaccatagcctatagagacgtgctacgtgtgtgagcaaatctgtttcccaacctgttggcaaataaatttgctcacacgcgtagcgtgtcaccatacacccttttattttttttaaaaaataattaataataagccctaattattaaaaaaatataaaatactaaaatgtggcacgatttcctataattttagcttctttttctccataaaaactgaccaaaaatataaatatttattaattaaaagataaataaattggggtctgaacccctctttctctttcataaaaaaccctaataatattctacttcttctcctctctctctcttcttctcgcctcttctttctttcccttggcagataatgttgctgcacagcttcctctcgtctccgttgatgcaacaaggagatgagttttggtcaggtgcgattggaatcgtgcgaggatcaatggtactaaattgtgcgagatgggttttggtcagcttcctctcacgtccgtggatcactagacgagacccaagttgtgctcttcttcctctaatctctgttttgctctgccatggatcaatagacgagtcgccattcatggagatccaacctacaccaacaaccagatctattttttcttctttttttttgtatattttttaggttttcacatgcctaaaatctttttacagccataaattatttgtggagatactcaagttttagtttttctgttcatgaaaaattgttctgtttggaggaacaatggtggccttagttttactcgagtatacagatttattgtttacattttttgtatttgcatcattgtaaactgtggtgattttggcaaattgattcataaaaaatattttttacttaaataaaattattattattatatttaattgtaattgtatataataaatataaattattatttataatatataaaatttgaattaaaataattaaataatattttttgtagaaaatattaaatatagtggcactttttgtgtgtcaatatatttcaaaaaa

SEQ ID NO: 309449 - DNA, 1468 bp, Cannabis indica
gagagagagagagagcataaggagctccctcgagcgtgtgtggtgtgtgatggggagcagagagctcctttaggcacatgacaggctacagcagggatgtaatatcctgaaaacttaattatgaataattatgatttatcatatattatgaattaattaggtagtaatgattaggattacgatcttgctaacctaatttagcataaattataaatttggctataagtggataaataagttggcgtataagtggataaataagcgtaatttattaattacagagatttatttagaatatgtggatataatgtaaattatttgtaaaataaaaatagtttttaggttcggcgacccaagagactcgattagaggctaaaaaaataacaacgaacggtaatattgtaatattgaagagattattgagataagttgatattagaaatgtcagagtattttggggtactcgaggttgaccaaatacccaagggttaaagatttcttagtgattaagaaatgataaaataattattattaataaattttttatttataatattaatattattatgattttttattattattatatataaaatttatgtgttaatttttttatacatatattatgtttaaaacgtaaatagaagaatgaacgaaaccaactccttcggtgcgatgaaatcctcctcttctttaatctattttctttgatttttaacccgaaacctagtaattcaagctccggtagtagtgggataataaatcattgaagagagaaagctcaaagtaagaattggttttattttaagttgaatacaattggttttatgtagtgactttgtgatttagagtagttataaagattttaacatcatagaatttttcttgggtagctatgggactagtttcgatatttacttgttggatttgaggtgattttgagttagaaattgagtttaaaactttttaaagcttaagtctgaacgttaatggcgtttcccgtttaagggcttgattttaatttttgttatgtaaggattgttgtatttatggtatatatgtgccctatgaagtttggaatgatttgataggtttcgatgagtgtaaaaattaagatttacgacccctactactaagaactagtcaaccatttggtgcaacgagttaattggttcgtcgggaaacggttaaccatttcccaaccagtttaccatttctggaaatttcaagaaaattgagaatcatatttttatcataactttttactccggcgtccgttttggatgttctatataccattttgaagattgcaacgagctatacaatttggtgtatattttagagctaaaatataagttttattttagtgtatttatactacatgatttagtaggaaaccctaggttatcctttacaaatattaagcagtgttttggaataaacagttattagtttaccattgttgtga

SEQ ID NO: 309450 - DNA, 5366 bp, Cannabis indica
agtgaacaccaaattttaaagaggtttgaccttgtaagtgtggtaatagcctactccccgtgtattgtattgacttgagagaaggaacgaagtgttcttactcttgaaagctcttacaattgatctctgagtaactttctctcttagaacactctttttttctctagagtatatttctatagcaattttctcgatccccttcagggtgaggctaggtcactatttatagggacttaatacatgagggatggtttccctttttcttataatgaataaaataggaaactaaattaattctataattacaatgtgagaaataggaaactaggatgtgttgtcgtaattctctaactcagcctcgtgattatagggattgtcttcgtgtttggacacaatgagattgatctctaacatcatcatattccttgttttgctcgacataaacatgtctttaccttggtcagacatctaccccatcaacctgctcggtcgtccgagcactacggatatttaccaaccataactgagctactaagaatattttcctacacccaggttttcaacatgagacacgtatcattcattcatacttccacgtcaaggtgcaaaaaacaggataatatttgtcccccaagtctgtgcgggaccttcctggtcgcacgtggacttcaatcagcctggagtcttgtctggatggttgacgcgtgtcctagatatcagatgacaaatcgatgtgaccctgattaggcgtctcttcaatttctacgaatttaatgccaattgatggtttttcctcgaatcacggtttgaaccttgcgtttgttgacggttatactccctataatgagtacataatgtacttttttgggggggaagttcaagaaattcaaattttggaatgattaatcctctttttgaattgcttttaaaaataattaaggttcaataacaatccttttagccatttcaaccttcaaacaccagagcaaaaatcttttagccaaatctccttccaaatcctttaaggaattcacaagaaaacttttgacgattccatccgagcagagcaagaaagcttcaaatcagtgagtaagttcttcatttctttcttttacaaatttgcaatgaaatacatgtctgatttataggttttttgttatgaatcttgccggttattggactattcaaggttaaccatagaataactaggtttaggacttgattaggacctgaaatcttatttatgtttaaccatagcatctgatcgtctaactacacttcaaatttaaccttaccatgtttatttccactcgtacatacgactttagtgaaaattagattccaattcgaagtttagaacttctgggcttgaaaattctatttctgggtgaaaccttcacttttgatttctcagttgagcgtggtcagtatatacaacctaatttttattcgttactctgaccaactatcactttcttgtctcctaccttttgtagatgaaccctggtgagtttttgggaggcaaacatcatatttactaggatttgcttcaaattttatacaaggatcatcctcatctccatgatagcccatcttcgtctagtgacaatctttcaaattctagctttgaagattgggaagtgagtagggaacatactccttctctggagcccaaggtgcaacattatttctatcccgaccaaattcgaggtgaaggatacagacgttttatttgggaactcaagaaaggttggaggcgctaccttcctactaactggacgtacatagttcatccgaacatggtcaacactctaccggagggccgtccaaaccctgctgatgtaggcaagcctactgccaattttgctgtgaccattgctaggcacacttctgatccgcccaagcattgtgtgatggcacggagtaaatagactgataggaaatctttcttgactgatccacatattgctcgcctagaaactctggctagggcataacagatctgtcctgctactgacgaggaagacactgctggcgacattgaagtccaagaagtggaggaccagggagaggtctgccctgctactcctagcaatattgaatacgatgaggaagaaggggtagcttgggtgctacccttcaacagctacaatgatgaagcagagtcagtatccgaggtaggcaatgttttggaggccggccaagactatgttgttaaggagtatattgaggctcatccttcaagaaggaaaagtccactaggagatcgatggatttctccaccatctatgggaccatgaagaagatgaccaatctgttcgatcgtggtctcttggggaatgtcgaatgcttccttctctcccacgaacaagttgctagtgaccctggagaaggttattttggttggttgagagctgacactaaatagggtgcaatgctacccttgcttccatacttcaagaagatagccaattattaccatatcagcccgaccaagtttactcccacgggcctcaagtacttatctgccctattcgtgctatacaccttagaaggatggggtgagccatccccccatgacactaactggatgttcgacctgaagttaagtcctaagcagaacaggttggtgtacttctacttttctcagattgagaagtcatggttgacaggcaccacagacatcgaggtgacaaagatagggggctttgtggatgagtattactttgtcaaggggatgtacactacctacaccaatttttagcagatcacatcctattgctgcccccattcacattaaagctcaggaagagggctcaaaaaattcttcaactttcttccgatgaacagaacatttctcttctggccattgatgctaattttgttaaatacaaacttcatttggccaattttgtaccaaaggccaaggcacgagaagaggttgtgcccatataggaggctccgagcaagaggaagagaaagaggaaggcctctttgaaaatccaagtacctgtcgagcgatccatcaagattagggaaaaccttgatagggttgctcgaccatctgccccagtggctggaaagagaaaaattgtcccggtgtagtaggaatacgaggattcttcagacgatgatgctccttccttgcttgttcaagaaatttctcctgcctacgtgtagggtactttaacttgtattcaaatttcatttgcattttcgtatatcgtacttgttttgaccttctcgttttattcatgtgcaactatgtctcagaaagtgttgcaagctttgaagaagaggtcaggtgatggctctggctagaaacctccagccaaatggtcaaaggtggatgaggttccacccaaggagaagagttcaactataacaccgtaactaatcttacctcaattccaaattcaggtgtcctagccaacctgattggaacaacagctcggcgaattacaggctcctaaatcacatcgataacaacatggataagtgacacgctaaatcacaaccgggacttaggtttttaaccaaaaacctatctactgcaacttaatatggcaataccctaaactagcaaggaattaaccaaccagaaacctaaaactagcacgaatcgacaacctgaatttttcgagaatcccagctgcaaaaattggttacccgattttctccaaaaaaacccaaaaaaattcaaagcttcaccaaatcgattccaaactttaccaaactctccagatctgcatattatcccccaataaactattttcgagcaacaaaacaacaacctaagcttagaattcaaaatcaccattaaagctcctagtttgagttctaaaactcaaaacttagttaaatctcctaatagccaccaattcaagcttaaatcaatataatctaacataaataaacctctgaaaatagtatcaaacaacaacagcaacaacaacagctaatacccaaaatcattcaatttcacaaacttgaaattcaagaaactagaaggcaaagtgttgggaacttacctagagcttgagatcacttagaattttctagaatttgcttgtaattgagaaagaaatccggaaccctagctggttctatagggctcgagcaagagagagtttagagagagagagagttctaatcttttctagcttgtatttactaaataataagttaatggaaaatggtttgttttattgcaaaatatcaacttattagtcattaaaattcaagttaaataaacttaacataatctcacaaaatgacaaaccataaatttgcaaagtgaccattttgcccctcccacactaaaatcataaaagttcacttaggggtattttggacaactctaaaatcttgcctattcccgacattctcaatgtccaattatactgccccactataccaaaaatactaagatgtgattctaatagctaaacaccgcattctaatgttgccggcacaaaacatacaaaattatgaaattctatatataacatataaattgcattttaaattcaaataaattttcataattaaataattcacagcaaatgaacaagttctataattaagccataattatctgctaatttcaaaattaatgctaagcagtctttacaattatcccccctcaaaaggatttcgtattcaaaatctaatctgaacaactctagatattgagcgcgcttgtcgggttctaactcccaggtggcttcctccaccttgccatttctctaaagcactttgaccaaagctatggtcttgttccgaagaaccttatccttttgtcaaggatctgaactggctattcttcatatgacaagtctagttgcagctcaagattttcataactaagtacatgggcagggtctgaaacatatttccttcgcatagagacatggaatacgttgtgaactgttaaaagagctggaggcaaagctaatcgatatgccacttgtccaaccttcccgagaatcttgaaaggtcctgtaaatctagggcataacttgactcttttcccgaaacgcttgatccctttcattggagatactcgtaggaacacatggtctcaaacttgaaactccacatttttgcatttcagatttgcataactcttttgcctattctgagaggcaagcatcatggctttaattttctcaattgcttcattagtccattgtactgatttcggacctaactatttcctctctccagtatcatcccagtgaatgggagatctacactttctgccatataacagttcatagggagcattccctattgtgctttgataactcttattgtacgagaactctatcaatggcagatactctctccaggagccttcaaaa

SEQ ID NO: 309451 - DNA, 1320 bp, Cannabis indica
gggcataaaacccaacactagcctcttcaggcttgcaaatactatctcaggctatttgtcttgcaccaatccatatgttcccttccataagaaagctctgcatatagcctcaatttcttttagaatattcttaggtagtagcatgacctgactccaataagaatgtattgtaagaagcaccgagttaactaatactgccctgctcgcaaaagaattattcttagtgctctaggatctaattttattagtcattttatctaccaatatgttgcattctttagaagagattcttttagcacaaagtgaaatccctaagtaggtaaatggtacttcactccttgaaccccgaggcatcaagtatgcgttttacctctttacaagacatcccactacaatatatagtagacttggaagcattaggctacaaactagaggtttgagaaaatagcttgaggccttgtaagagataatgtatgctcttataatccctattgcaatacagtattacatcatcaacaaagataaggtgataaaactttagatctttacatcagtcatgaaaaacaaaatcagacttctatcaaatcttcccagaattctagttaggtactcaattcccaaaacaaaaattactggtgacatcggatccccttggcagagccccctctttgcttcaaaataactgtgaagtgagctattggtcaagcgagagaattgaagggttcgaacacaagtcataataagctgtataaattgatcagggaattgaaatccatacaacattttttccataaagctccattcaattgtgtcataagtatttcgcaaataaatattgggttgggaataatattttaccaagatctagatttactaacaagtatgttgattaacatctaaatatgaatatctctaaaacaattaaattaaatacataagattttaggaaaccttacattgagtgcagcagaatattatgactccttctgctcagatctctaacccttgttctttttttcccagagtattatcaagatctgagtttggatctctttctctccttcaggtttttgttaccaccgtcttacccactatgattgagtacttgactttctatgtgtgggcataggactctatcactaagggccgactatgaattaaagaaggcttgaaaaattgtatagaaggtgtctgtctctactagttgtctgacagagatagaaactagattttggcaggttaaaaagttggatgagatgagagcatcatgttccttatatagtgtttcaactaggacctaggtttaaattatatggatta

SEQ ID NO: 309452 - DNA, 1445 bp, Cannabis indica
aattaaaaatacactaaaattaatctaaaaaataatagtaaaaataacttaacacaccccagctggtggaagctttaggaaccattctcgaaggtgaacctatcagtgagggagatcttcctgtagataataggagctgtaggaggagagaaactcctttggcgatgcaagtttgccctgaatccatatgggaaatggaccaaaaagccaactgctttctgtcttacaggatgttgcaagcgtactccgaagttgcttgtctttccaatgttcctggtctaatgtggcgtaggatttctgtccttggggaatctgcatctgtcagtgttgatggatttagtgcatggatttggtcccatatttctagtggcactcacctccccttgagaacctacttagtgagtctgattgcaaggattgggattgcgcccttctatttgattccttcatcgtatatattcttggttgggtggtacgtgttttgtaagatgaagaggctagaggttcttctctagcggaaatcctttattattattgtgtcaagtccaatctaatgaggacggataggtcaaagctagggttcttctgtctggacaagcgcccagactgctactgtctgatttggcagacggaaccacgatctttagaaatattggttcttttcctctaggtttcctaccagcagggtgccatctctttagttaggcttccaactccaaggtattttagcaattcattccaagctttgttgttttcaaatcgcaccaattctggtgtatgaactaatgtctcttaatttgcagttgagattcccctccagagttttagaacaaaggagataaccagaaaagagggccaatataggactttctgtaaagaacaattgaaggtcgaaggcttggagacaatcgagcttttttgtaggtcaggcctgatcactaggttttagagcattgacactgttagtctccagggacatcgtcaaccccccaaggaagtaaatgagacaatggccaccgatttggctactataattaccaatgcagccaaaaatgaccgcgccttgcgttctgagtaagtgttacaccatcctgatcctctgaatgaagaagaagaaattttagaaagatttgctgctgcatactccgacatgggggcattagctgcgagtacatcaggaagaggtaatggatccttccacatcttctgtacccccagcctaagttacatgtcccgaatgaatcagggaggatttgacaagtatttactaggcaaaaccatcacgaattccctatgaaggattatatagatagagcagacctaatagttaggagccctagtaacccagggactcctacgaacatcgttggagtagaccctttaattgtcatgtctctacctgaattcgaggaatatggcagcttcatggtgttggaaattatttt

SEQ ID NO: 309453 - DNA, 1866 bp, Cannabis indica
taaaaaatgaattaatataatatatatatatatatacctttatcttctccatatggaaagctggattgataatctttctatgtttggcccatttgtggccatcataacttgctagaccctttgcaagcaactctacgagtgggttagaatgtggtttgggaaaatcacctatcttcatgaaaacgtcttttatgttttctgggtttgtgatgtgtactcttggtgttggtccaatccacataaatgaatctttgcctgaattatatggattgatcatcaaaacactatggtatacataaaaatattgcacattatgtgacatcgatctaattattagtgtgcaactaacaaatgataaataatgttaatataactagctagcgctgttatttgttcctaattataaatcttaaacattgttagtatgtaccaatatatattcatctcgccagtcgccactattctcaaaacaatttttttaaaataaatatttatttatatataacatataaataaacctctccattagcctccttctctatcatataaatattatcgttgtatatggtaacaatttataatataagtaatatattatataggcaggcaatacgtctttaatttggaccatatataaatctcgtacacgtatagtcaggtacacagataacacgtaatcatagtagcactgaaaacaaccacagcatgagaagtcaatcaaatgaaaagataagataagatagaaaactgtgtatcaaatttgtgcgcactcaatcatttttaacatgtgagattttattttaaataaaaatgactaatttaataagttgttaccacataagtactgtgttaaatagatatctatatcactactcatttatatatatatatatatatatatatatttgtatagcttgaaagttgtaataaacattaatataaattaaataaacataccataattgttgactgtgtcaaggacaaaagggaaaatccgtggaacgacgtcgtctgagagattgatgggtttggaccttgcctctttgatcatcttgaagctctctctcaagctccaaacagaaacctgtaagggtgcccttaagaccttgttttctaaggcacttttcaagccttttaggcctcaaccatacccagttcacagctctcaaaatccatgtcacagttatgactatgcccagtaatttagcacatagtgaaaaaacagagaccatttcttttctgcttttttttcctttttttggtgagactaattgacgaagatatagtgggtatttatttattcgtaagagaaagggagagagagagagtgaaagaaactgagtggttagagaaacagagaggcaattaatataaagagaattatgagtctaattttattggtccattaaatttttcagcaatgtattatgtatatgtacaactatataagaaaacgacaacatgatatcagaagatagagtgagaccaaaagaggagaagaagaatacgggttttcctctggcctcaaataaatagtgggaaatttgattatatgtgtaaactagtggtgaaattattttccaaaattttaaaattaaaaaatataaacattttacattaaactcaaaaatactcttctcattttaaaacctctcaactctctctaacaacatcagttctctcccccaatctctctccctctttttccatacgtgaacatcccaacccaaaccacgtgaaccaccctacagacccacaaaatcggacagatcggaccccttcaacatccccaccagcccacggcgctcccccaccgacacacggcacaccaccaccgaacctccaccaccgactcacgatacctac

SEQ ID NO: 309454 - DNA, 1284 bp, Cannabis indica
taaattcatgagtgattttaatcattttgtacaaaaaaaaaaaaaaaagtaacacaacattatgtatgctaatttgtaatacaaccataataattaagtgaatagacaaatgtgtatttgataataatttggtgggtctttcaaaaaaaaaatacgtaactatccataattacaataacataatttttaaaaatttcatatgttttataattattctgtgtaatatattagaatttaacctttctgacttattataataaatatatacaagtggattaggtttttttcgtgtgtaaatagtagatagtctcctgtcaaaatttatagtcacaggatgacgcagctatttgatccaaaggtttttctttttcttttttttcgaaatcacatttgatccaaaggttatggtttaaagagttaattgccattaaaatatgcaaagtgccttatataaatgatgtgatcaatgcttaattgatcatgcacctcacacacaaaacaaaacaagaatttgatcaagaacaatgctaaccgatttaatattacaactcaaattgattcaaaccagaaaacaataatgaataaacagcaactataaataaaatatgaacaatgatcaatgagcaattaaagacaagaatataaggaaaaagaatcaaatacaaagattacgagattcgaacaagtgatgatgaatcacttacctactcctcgaccagaacagcccaaaggcttgaatcttttattgagctagaagagagaattacaatgttgatactcaatgtgttcttgacacaatcactcgagaagcatagcttcaattacaatcaacttcactcaagactctcttttcttgcacactaaactagctctcaaattatcttgaagacttctcccaagattgctacagaaatactgcagcaattggctatttatagccttggtgatttgaacccgattctaactgacagttaggtaaagtcgttgttagttatagggagttaagtcaaagatgaatattttctttattagtgaccaatcacaacaattaatttgttacacttgaaattaatttgtgaccaaaatttttgaatttcgaaatttaacactattaactattagattgaaataattaaggttgaacttcttaatttataaaatcgttttgttttatacttcttttgtccaatttactcacttaagtattaaagcgtactgttacggtgtacacgtggcaaaattttattagtccacctcatattaataattaaaaaataattaaaa

SEQ ID NO: 309455 - DNA, 1411 bp, Cannabis indica
tggtatttacccttatttttttgatcaagaagaagaatacttcattaatctactcaccaaatacagcaaataacacttctgcaagagaagcaaccaccgcaaagccaactaattacaaatcaaattatgaatcaaattcttctccttcctagaccaattcctatctttaatcaataagagtctatatttcacttcacatttaattttatttacgatacaattcacagtattagaataggaagagaataagcaagtgtttcggttgctccataagtgatagatcacagctgcaagcattagaacccttatcatgtccaccacagtcggccttggacagccaagccaaactctccacctatcatagtccttggaccatccaaccgtgcccagccactgaaatattttgtacagcacttgtaaagagaggctgcacttgaaaaataagtggttgtgactctgtggttcaagatcacagaccacacaattcaggttagagataggaatattcatctggaaaagatgatccctggttaacaatttgttttaagttgcttgccaaagttgaaaggcatgtttaggcatatttaaaccataccaaatagcccctgttgcaggaaactcattctgcttcaacatgctgcaacagatactgctagttttaaacttctctccacccgctgccactatttcaactttggtaaaagttgatcgtaaccgacaaagctttctccaatactaactagtatccatgctcattctataggaccagaaattactccccttaagataaaccgagttaatcgataacccacaataaatcttttttgttcatcgaatcccaaatgaacctagttaaagaagctttattccatttagtgccatccttgaacccaagaccatcataagctttaggaaggcacaccctttcccaacttatcaagtgaactctagaccgattatctttcaaaccccaaaggaatccgtggcaaagcttctcaatctcctttatcacactttgaggcaaaaggaagactctcatccaatagttccttaatcctatcaaagtagaatggattaattggacacgaccagcataggaaagatgtttattagcccaagaatgaagcttattcttcatctttttcaaaatcggcccacaatcctcaagtctccatttagttgatctaagagggatcccgagatacttgagagggaactctcctatggaatgatttaatttttgagcgagcagaattggatgagcaactccaccaatatacacctgggatttagcaaaatttatggagaggcccgaggtcttgctaaaatcatcaagcagagatttaatggcattgagagaaccctcattccctttacaaaagattactaaatcatccgcaaaacaaagatt

SEQ ID NO: 309456 - DNA, 958 bp, Cannabis indica
attttataaaaaaaaaaaataatcattactgtaaaaaaaaattgtcacattccattcctatgtcaaccaaacaaaataattttcatattcccaggcatcatcataatattactgtgcacaatcaaacacggtaatgttgctttcctaggtttataattccattcgtcactcttcaagcaatgttaaacatactcccatgaaataaaacttgcatatataccaaatggccccttaaagctttgactgttccatctattctgcctctaaagacatgggacttttagtgctccttaatttttagcaagtttaggcgatgcctaaacttttctcatgttatactctttgtgaacatgtcaactgggttctcattggtgtcaatttcgttgactgaaatctctttattaccaatgatatctcttataaaatgcaccttgatatctatgtgatttgaccgctcatgaaacaagagaatcttcataaggtgaatagcactttaatgaaccatcaactcatttatcttgataccaagctcatttgtgaaccctttaagccaaatggcttcctttcgttcaagatctctagcccttgattcctttctttacactacaagaaatgtcacttttaccaacacagttcgctactgcgctggtaaaagtaatgttaccagcacatttcacaaactgcgttggcaaagagctcaaaattttaccagcgtacatttgtagtggctaaaatctaacttttaccagtgcattatcaagatctgaacctggatctctttcactccttcgggtttggttaccaccatcttactcactatgatttaaatcgtagtgcagaacattctaaaaatttgatttagcataagaccaagagagttaaagatggaaaacttagacatcctgcagatttccaagcttggaaaaaagtaaactacataaatcctgaattcaaatct

SEQ ID NO: 309457 - DNA, 1165 bp, Cannabis indica
tttagaaagttcatatttagggggttaagcaacatacttggcagtagattaagatcctggtaaaataaattccaacagggcaagcatcaaagaaagagggaatattcattatttgatttcttatctagatcccaagaattcataaactggaagatgcttatgcttaggcctatggagtacttccagcaccatcaacaaatagttctccaactctaaaaactactctggcagtactgactctgacacctacatttacagcaccaactgtctacagacctagtacttttgcacatctaactatacaggcaagtttctctagcttcgagatggcacacaccagatatagtgctgcttttagaaaaatgaacaacaaaaggaagcacgtaattcccgtggcaaaagaagttccaaagctccaagccagagcaaatctacgaagaaaggaagaacaaccgaaccaagatactctgagtacactagcttgattgatacacaggaaaatgtatacaaagctacttgcaacatggttcactataaaaggcctccaccaatggacaagggtggaaaacaaaagagagaacctaataaaaagtgtgagtaagatggtgatattgggcatacaacaaatgaatgtgattatctgagggacaaaatcaaaggattagtttgcaatggccacttatccaactgggtaagaattccagtcatctatactgaagaaatagtagaacacgaacaactttttattcgtagatagcccaaagctctaaatcctccttaaagagtaggaatccaacaagatcctgaagtacaagctccgactttacaggtccctcagcgggtaaaaaatgccccagtggcaagacctttagttgctcctagacctagaaatccatacccacctggagctgctctgccagcattagatggtgaagtagctgtaggctcagtttttctgaagagggaaatttatgttagaagatgttatgaaaacttgtgatttgactgagccatcactttctatttataggcaactactaggtttaggttaagaattattggcattaaaataatgaaaatatcaatttgaatttccacaaatagtggccggccatggtgtgataatgggccccacttgattttgcagttttaacaaattttattt

SEQ ID NO: 309458 - DNA, 3795 bp, Cannabis indica
gtaggaaaaatatcaattcgaagatgactgattgctcctccagggtcagccaccgactttgaccgttttaaaagagtagaaatgtttagatgcattaagtggtgttttctagcattgtaccgtttaatattgacaaaatttcaaacactacttgtatacttgttgagaaaatttattccaattaatcacaatattttttcaagtcataataagcaatatcaaagcactacaagcaacataaaatactcaaatcaagcataaaagttagtcgccaagattttacgtggaaacccaattgctaggaaaaaaccacgcaaaccgtagtctgatttaatcatccactattaccaaagttcaataatagggttcaaggttcttctctaatataattagaggctcacaacaatatcaagattaaataatcttgaatcaccaatacaaccatcatcttaaaagataaatacacaaatgaaaaaaaaattgggtctcaccaagtgagtattgtagaagacttcgaaggatcaagatttcaaagtcaagtttaatgtctttgatggaaatcatttactgttatgactctgttttctaacttctttgcattgctgagtcacatcgaaatacactcagataagttctctttaatttcttttttttttctgaaaaaagggaggagggaccactcactaagattggcccccacccttgagataaataaaccctcgcttatggcggaggaaaaccgtggttacaaattgccctaaattctaaggcttaaacaaagtctcaaagatatgattacaacgagcatattctcttgttatttctttacagcagtgctctccattctctcattaaatctgagaaagaaacattttcaaagagcttagtcttgtacacccaagaagcagtccaaaatttaattttatcccatagggcttctgaagagctctccggaccttcaaagattctgttattacgttctaaccaaaccacccatagaactgccaagactgctgttctccataaacatttgcttcttttactgccccccaccttgctcactatcatttgagagaccacacaaggcataacccattgagtctcaaattcgttaaacaactttgtccagagattacatgcaaggcgacaccttaaaaacaaatgagttgcatcttccccacttgacttacaacaaacacaccaccccggtgacaagcacataaatggtcgcttcttttgcagtctgtcatgtacgttcaacttatctagagatgccaaccacccgaacactttaactttagaaggtcctctgcttttccatagagtcttcgtccaaaacacctcaccaaactccttggacgaagaaaaccagtagaatgctgatttagaggagaagatcccactgggatccggaatccacaaacggctatcatcaaggatgttgagtactctaacatgttccaacttctgtaaaagttgtgtcatttcgggatttccctgtccataaagtttcttctgaatttaaagtcccagcttgccacgcaatttcccacctcgccctcatcgacaatcatctcctgtatacttacattcttagccttagagatcactgcaacgtctgggaattgctccttcagagaggatccttcaatccatacgtcctcccagaaacgtatacttgctccgtttcctactttgaacttcaccaattggccatattcgtcgtaatgatctgaaatatccttccacggccctcttggagataatcgagccccctcttttgtatcctagaagttatctgctatgccatagcgacttttgattactttgtgccacagggagtttggctctaaaggaaatctccataaccatttcatcagcaaccctttgttcctcaactctatccttccaattgctaaaccatcctcacttcttggtttgcatacctcatcccaagccactaaatggtcaccccctgctaagtctccaccttcccaaaagaaatctctcatcattttttctattgccttgatgactatttttggagctttgaagagagagaggtagtagatagggagggaagataggaccgactggataagagtaagcctccctcccctagacaagaaggagcatttccatccatctaatcttttcgcacatttatccaagacaggctcccagaaaatctctttcctcggggagccaccaagtggcattcccaagtatgtcataggccatggtcctaccttacaaccaattacttctgcgttttgggccaccacttcctcttctaggcatattcccaacagttgactcttgttcaagtttactttcaaactataaacgccacaaaaagtttcaacaatctcaaccagttttcgtagtgaggcctcatccttaacaagaaaagggtgtcgtccgcaaattgtaaatgactgatctggacgttgtttttgcctacttagaaccccgagaatgagcctaattctactgccctatccaccatccttccaagcacatcaactaccaatgtaaatagaaacggcgatagaggatctccctgtcgaagacctctaaaacctctgaacttgcctctcgctctgccattaatgagcaaggagaataatgtagatgaaacacatcctctaatccacttcctccatagctccccgaaacctttctccttcagcaccaaatccagaaaatcccaatcaacacaatcatatgctttctccaagtcgatcttaaacacgaatcccttcttgccacaactcctatactcatctactgtctcgtttgctatgaggaccgagtctaggatttgtcgtccttcgacaaaagccgattgagtttcagaggtagtctctcctaaaacacctcgtagtctagtcgcaagtgtcttggccacaattttgtacacacttgtgatgaggctgattggtctgaaatctttgaccttgcagctgttaagtcttttggggatcagacagataaaggtttcattgatgctaccttcaattcttccctctttctcaaaggcccgaaacacttccatcagatcatccttgatcgtgtcccagttgttttggaaaaccgccatcctaaaaccgtctggcctcgacactttacttccttcacagctgaagactgttcttttgacctcttcttcttcaaaagaacattcaagttggcaagctaaggaggacgctatacgttgccattcaatgccctcagtcctttacccccttcttgcctcagaggtataaagtttcgaaaaaaaaccaattagctcctccacaagtttgtcctccttatcaataatagacccatcatctctttcaattcttgaaatggcgttcctggccttcctcgcatttagtagattgtggaagaatcttaaattagcatccccttccttagcccatttacacttcgatttaagccaattacttctttcttcttcaaaattcagccgctgccattcctcttttaattttcttctctcctcggacatgctttgagcccaggaattggttccttctagcctatctaatgcctccagcctgccttccaaagctctcttttttgccttgttttgtccgaaagtggatgagctccactccttcacctttccttgggtcattttcaacttgctcataaactttgtgccgggccaaccagtagaaatggctgttacgaattttatgtttattacgcaaatatacacaatcaagtagtatctcacgcaagtgaggtcgaaccacagggaattggattaagtactactaaact

SEQ ID NO: 309459 - DNA, 917 bp, Cannabis indica
ttatttacttattttattgtttaataaaattagttaggtatattatttttataaattaattttaaactcgattaaattttatatatttaaaaaaatatgattgaattgtattagattaagttttaatattattatttaaactaataattgggtaacagcaacactaaaacaactagcatctccaatggtgctctctattttctacccaaatttcaattgaagtagctaaaaagttaaagtagaaaactatttttattattttttctccaaccatgttccttactttagttaacatttcattattttgataatattttataatctaaatttattaaatataaattaatttgatgaaataatgaaaaatataatagtattttttattaaaataatattaaaaaaaattaacaaaaaagtaggaagctccttatctattctctataatagagagccattttttttaatgattgaagctatttttttaagactcactccctattttagctaaggagtgtgtttagagagcatgattgaagatgtttttcaaatattgaaattacctagttatgttaatcaaatagggaaattaccccatgtataataagttacacctatttttattttactatttttttaacttgggttacgatttgagttgctgtgtgggttgcaatgtggattgtgaattgagttgggttgcgatttgggttgttgcattggttgcgatgtggattgcgaattgagttgggttgcaatttgggttgttgcgtgggttgtgattagggcatttactgtaaagcaccatatatgtaatgaccgcttaagtaatttagattagtaaaggcaattagcactaatttctgttatttttatgattatttatgaaattaataatttgtggaccccaatatttagaa

SEQ ID NO: 309460 - DNA, 933 bp, Cannabis indica
taaagggagtctaaacttgtttaagtcaattgtatttgcaaatatttgaaacattactaattgatttcattctctgagcgtgaccccgtggactaggagtgtttgaaagtacattgataccacatagttcacttgtgtcaattttttattttttgcactgttatttatgttttgttactgcaaatctatgtttgtagtaacacgtttttattctgttactgtagatctttacagccgtatttttctttactattataaaaataaatttttgacagtttttcattacataatttatttcttttatattagttattgttgtatggtatacaaaatacttttcttaatctcttttaaccacattcaaattctcaaaattgatccatatttattcttcttggggaggaggacaatagtagcaattataagtgaaatgtggtgataacaacagataaaatacaacgattaacaactttgaattaatggtcgagattgttaggtttatttttatgtatttttagagtctattttagtatgtgctttagtaggttttatttgtttttgttcaggttttctttttgttttaagttgtaatggtcaaatatactatattggttaaaataagagaatatatgctaaataagatgaattttatggatctagcatgaattttagagttgtaagatacaatgggtgaaaaaattctaagttttggatgctcaacacgcttcctttgtgatcaaaaataaaatctaaagcttcaaaccaatttttgactatgatctaatcacttccaggaaagatgttttgaataaaagttctagtatatgaatcaagtaaatggaattggacgatttaacatattttgaaaagctaaaagaaagatctagaactttcattcagaatatttttcctagaagtgaatggatcatagtc

SEQ ID NO: 309461 - DNA, 2055 bp, Cannabis indica
aacatcaaattgttgagttggttccttagcttcctcttcaaaatacttatcaagttcatttttcatcttgccgtcattttctccattcttcatgccacgaactcatcatggacattacgagacttcttgcctttaggtcgactagaaacgatcaatgaagaagaaccaccatcattaataggtttagcttgtgattgagtgattgagggttccaatacttgatgctgaatcattatattgattaaacattctccaaatcgtttgttccacccctttcaccatctctttgcattctaactttgtatgagtaaagctaaaataatgataaagataatcaagtttgtatctagggtcaagaaccaaggcaattagaagtgcctcattacaatcatcaagcttcccccaatacttgtcatacttagatttcatgttatgtgacatgctcctcaacaactcatcctcatcttcatcaattgaagaatcgaccaactcttggtgaagattgcatatttcaatgaagtacttatttgcagttacataagtagacccactaaacttcaatgttacattataaaaggtctccaaaaatctcacaaacacacttgcattctcccaatcagtttcaatgggtggcccaacctttggtttcccatctttgttaacctcatcaaagtatttcatataaaatgtatctgtttctgccatctcttgaaatacctttttaaatttgattgcacagtttagcatcaagaatgttgagttccaccttgttaggacatctaaacaaagaagactgttgcattcaatcttttcttacaccactacttccttaaatgctttaaacctagcaggagaagacctaacatacctcaccgcattgcggcaatagactcatatttttccttcaagccttcactaacaattaagttcactatgtgggcactacatctcacatgtaagaacttttcctccaaaataagtctcattctctttctctttaaacttcctctttaagtatctaatggtaacatcattagaggaagcattgtctaccgtatggtcaacaacttagagatatcccattctcttaaacatatctcaatctatttaccaatagtttctcctttatgatcgataacttgacgaaaattgataatccttttttgatacttccaagcatgatcaattcatgtaattcatattttgaatagaagtccaagtatcggtagtaatcgatatcctctcatgtctcaaaatatttctcaatgtcaccttctcttttgatacaacttcaaaacatctcgagcaatagtcattcgagaagggatctcaaatctaggttagagtattttcacacatcttttgaaaccttcacccttaacatgtcaaaatgataactcatctaacacaattgattgtgtgagggcggtcctacaagcttcattgttatagaccatacctactaaatttgtttccccctccttgccacccttaagaagcttaaaacttaaaatcttctatttttcatcttcatttttgaatagactaagctcacacactttttcaaatgactccatagatgactagtcccatattttttagtgtcacaatgaaaatcactcccacaataattgcacacacttaggagcacgaggttgaggttcttcatcatcatcctctgtagctcggggaggattgtcttccttagtgaaatgaagccaaatataagactttcctttcttgttaggattaggaataagtacagtaggaggtctatccttttttttagtacccttagcttacccttatcgataccattatccgtaggattttcatcaagaagaggttgttcctcattaacaccattatcatcatttagtacctaatacaaagaccaaattataatgatatacaatacatatttccatggtgaatcacatcataaaagtccttaaagagttcatacaaaaaaaatcgtgatataactcaatacaaaaccaaacaaaatcaatagatttatgcaaaataacaaaatattaaataatgtattagcca

SEQ ID NO: 309462 - DNA, 609 bp, Cannabis indica
aaaaaaattaattaataatttattcccactttactctccactaactcaaaactacccaccactcacctctccactaccagataacatatatcgtaaaaaatgagtttaaaaggagggagaacgaaatcgccaggaggagaaaaggaaagaaaaggaaaatactaacatattctcatcttcaaagaaatgtgtcaatatgagatgtaaatcaaaaataaaataaaaatgttgagtaaagaaatgcgttatgcagtaaaatcttcactaagaaactgtacagcaataaaattgttgatcgattattatatccctgtttgaaatgcacagatcggattgactaagctaaaccttagcctgacgaagtttaaaagaattaattcttataagacaattatggtgaggtgaggttcaagagagataaagtgaatctgatagttaaattgaatatatggatatatgttccctcaaagtaaattaatatatgtgtgcatttatatttaaataagggaaaagcatgcaatgaaagaaaacgtggctatgcctcatagggaaatttgaaattatatgcatattagggattaaaattggtatcctaatctaaaactatac

SEQ ID NO: 309463 - DNA, 1293 bp, Cannabis indica
ctgcaaagtctaatatatattacaaactttggtggcctaagttgtaatgaactttgatgtaataatagttgttattaatataaaattaaagcatcattttgatccaatttataatctttgaaagattgaggcacaatgttttctccaataaattgcttaaaaatacaacgtcaatctactattttgatcaaattagctatattgcacacttaaatttcatcaaacactatattttatacatttaaggcaatgccattacaaactcaacaacaacctctattacataccactgaaaacttaaattacatagagattaacacaactttatccgaaaaaataaaaaagcgaaaacacaaattagcgtcagatttattttcaagtttttcaaaccccatttacgaccacaatcacactcatggaccttgttacaaccttctgtaatgtacttcatttttcacaaagcttcattttctctcaaatcttcatttacttcatacaacatcaattaattttcaagtttgtttatctttgtcaagacactcgaaattatttgtctgcaccttttacaagattcaacatccacccattcaaggtacttacaccctccttaattttaaaaaaaaaatcaaaaataaataatgggttttcttataatcaacagtaataagaatcaaacaagagggctaaaaatctaaaccttatttttaaaaatttacacttttcaaaattttggcctgggttcgcttcctcccattatgttctcacaattcatggaatgccacaaaagcaattttgacgatcccttccatggactgaatcaactgcttcttttgaccttcgacagtgggtaccacaactactgtaagagccctccccatccattcttctcaaccttccatgtcagaggagtaacttgaatcatgggagctttgtcgttctcaaacttccaactaaaagtattaaggattagttttaggttttgagataaaagttttcgtgtggtattattccataaaccccaaacaaccattcgactagttagttaatctttaactaacttaactgtcaagaaggacagcaagttttcttgggtccattggtctatataaagaggactactactctcgtttcaagagagagaatcacaagagaagaaatacaagaagaagggcaagaagtagagagacacaatacagtagagagagaagttagagtgagaagagagagatatctgagagagagagagagagagagagagagagagagagagcgagagcgagagagagagagaga

SEQ ID NO: 309464 - DNA, 1142 bp, Cannabis indica
aaaaatagtaaatttgttgtggcttacgacacgcatcaccagtcatgcagaagctaacctactacttgctcttggcttccggaaagttgaggccctacttctacgtacaccccataaaggtgtacaccaatcaacaactgtgggaggttttgcaaaaacctaaaacattaggctgactactcaaacgggtcattgagcttggccagtacgatatcacatacctgccaagaactaccataaaaggtaaagcccttgtagacattgttgttgagtgcaccaactgtttggtgcaggcattgctcttacaacacatggggggaagcaactgcatggagcaatcaaatttggcgagagcaagagcaacaccaaaatcccaaagaactaacatggaaactccatgttcacggaagttgcactgaccaatcgtctggtgctggcattgccgttagcaatcaaattttgcttcaaagccttgaacaatgaggctgagttcgaagccttaatcgccaaccttaagctagcacatgaagtatgggcttaccacctagacatattcagcacttctgaactagttatgaatcaagtcctaggtgaatacacagctcgaggtgaaagaattgtggcctacttgagaaaaatcaaagacttgctaaggcatctcaaagcctacacgatcaagtagatccccaaagaacaaaatgccacagccgatgcacttgcccatctagtaagaagcaccattatcgataaagaaaacttggtgcctatacagttcctagaggaacccaacattgttgtccaagaagaagttgacattttggatgacactccaacacggatgacaccaatcatagctcacctccaaacaggagcttttccagaagacaaaaatgaagtaatcctagacgggataatctatagataaagcttctccatgcctctcttgaggtgtgtcaccaaagtcgaagctgaacggctgatgattgaagggcatgaaggcttctacgaaaaccattttgggggcaaagcttatcaaaaaagataccctgataggagtacttttggccaatgatgatcgaagactcgatggactatgtcaaaaaatgtgataagtgccaaagattttcaaagataccaagagc

SEQ ID NO: 309465 - DNA, 506 bp, Cannabis indica
tttttttaggttgatttttttaagtgctgactatcaaatcattttccttttcagatatttagttattccaaatgttctatcagctgcgattagtcgtggatgtacaatgttgcatcctggttatggtttccttgccgagaatgcattgtttgttgagatgtgtagagaacatggaatcaacttcattggaccaaatgtgagttaggccaattaattttttgcagttctattaagttgatgctgtattaactattacccgtttctttctattgtgaactaaagtgagctatctaatgtggaatttgccataaatacccaatctaatgtagcttttctttatccatatgagaaaagaaaggaaaggagaaagaaaaagaaagaacatgtgtagattttagtgctaacttttgagtaaattcaatgacccagacatattttaatacttctatgatttttctatggccatatcacggattcagttttttctaaaatattttgattgtgtt

SEQ ID NO: 309466 - DNA, 841 bp, Cannabis indica
tttcagttggttgatcaagtaatctctaaataaaaactatatatagagaataagactatttaaattgaatatacattctcactctttcaaataaaaatctcaagactaagcactatccccataacctttcggccaacacgcataaaccaaacctcatataaataactacactcattaccaccactataaaagatcttcaagcaccatccttttatatcatgcctacattgttgtatgttatagttgaaatacatgctccaagccatcaccattcttagaaacgccaagaccctatgattcaaatacggaagttaagttcaaaattattctttgaattcagctaagacttatacaagatttttaaggttcttctcaagtttgattatgaaaggaatattagtgcaaacattttctatctctctctccactctcaaggtaaggaaattaagtagttttgtatgtgttgaactgcatcatttaaattatatgtgtattgaaatatgggttgtaatttattattatgaatgtgtatatggtatcgagaatgtgtggtatggacacaatatgtgtttgtgaatcggtgtatattatggctgttatatagttgttatgacttgtacatgttgtatgtatatctacgtgttacatgttgtatgtggtatgctaccgtttcaggtacaaatgaggggccatgctggggtatgatacgggataaggccgttgaatgtagagataccctaccctgcatttgtctgattcgtgtatgatattgttatggtaaggtatgatacggcgacagtgctgttgaatgtagagataccttattccataacaatggtag

SEQ ID NO: 309467 - DNA, 648 bp, Cannabis indica
ttgtttaattttgagtctggaggttttattgagttcagactatgttcttaggtttaattcaagtttatttgagtgtgaatgtgatgtttctaaggctattacaatttgatttgagtgagttgagttcaagaactcaaaagctcactcaactatggtgaatttgtaatttaagtgtatttatgagttttgaatgtttggctatgttgattttatattgttaaactattttggaaggttccaataggtttggaggagctgtgggtatgttttggtgcaaagaccaagttacccattttctgcagtagaaaccagttaactggttctacatggtactgtggaaccggttaaccgtttgacccagtggggaacttcattttctaaaaatagttagccgtttggggtgtttttccagaacctaggtttaggtgttttatcgatgtttacaagattaaggtttgtcaagttttaagtttaaggtgtattatgggtttgattaagtttttttatcaagattttattgtcgtgacatagtgttgggttttatgccctaaataaaactccgttttaatgtaatccattttattcaatatcaataaagaaacagaagtatttttcattcatttgtatgttttggttcaccttatcaat

SEQ ID NO: 309468 - DNA, 1469 bp, Cannabis indica
gttccttgttaggagctgttgtaaccttcttcttccaagccacctttttatctttgttgcagttcaccactgtatgccctagtaaatcacaagcagcacatttcgttggaagccattcatactccaccaattgttccaccaactgtttcctctcatttacgaacgatatggtctttggaggttcatcagaaataaccatgtccacaagaaccctagcaaattttaccattgatctttccatagtgactttgtccaccattatcggcttaccaatcgtactcacaagcgcactgaggttgttcttaccccagtattgaagccccaatccgttcagccgaatccaaactgggacagattgtatcattctagcagcatccatatcggttgtccaaggtcggagaaccacaagttttttgtcaaaatgtatcataccagtttctaggattaagtctcgagttgcttcatccctgaatttcactagagtgaaccccgagttcatcctagccactttctcaattccaagtttcccccaaaccctgtttatgaacccctcaaacaccttaaacggtgggtttgctcccaacactatgcaaacaatagcattcttctaataagaggcttcaacctctgcttccttaatatcgattttagcaactatttgatccaccactttgatgggttcagtaaacacaagtttagttgaaagagtaagtacttgtagaaagttatacttgtagaaagttataacatgttataataattttataataacctctcttaaaataattaaaatgtcacgagtttaatactttagaagtaatattgttttttctttacttatatttaatttaaaatttcaattaatttaataattttgaaactctatcatatcatattaattaatttttttatatatatatttggattcaatttaatctccataataactcaaatccaatccaatctacaaaagtacatattgaatcagttattttagattagttactttttaatattgaattacttaaaaattttaattctttttcacataactaacaaaaaaataaataaattgttgttggtttatgtctctgttataaccatattttgagcaataatatagtgttgacacgtgtaagaaaaaccagctcgtgttataaagcaattaatgtattcaataaactcgccttaagaaatgcatgtggtagaaatattcaaactcacattttaaaagataagggcgagctatgaataataactaccgattgataaaatttgtaaaatgaaagatcaacttatagaaggttcatctcgagaaatacaaaatacacaacagaataaaatgcctggaaagggtagataatgaattatttacaaaacttgcagctcattgactcatatactcgcgagtattgctaagagacaaagggtcacattcctagcatgattcatctcaaaattatcatatt

SEQ ID NO: 309469 - DNA, 1849 bp, Cannabis indica
agtgaaaagaaagaaagtttttttttcttttttattgttaattaatttttgaaattatcaaggactaagctaaagtgttcgaagtcctaattcaattggaaatgcttgaagaatagatacaagtgcctaagaatttcaaaattgatgcccacttagtagtgtcaagcgaaaagggctcagttcacatcatcaagtcaactccacacaagtgtccagttgaattggggagcaattgttaacccgaaaactttccatgtgacatggacatcaatgtttgacacgtcgcatgaatgatgatgtcacaaagttgagtagacccgatttataatagtcgacttgggaggggactttagccctacacccatttaactttgggatctccgggttggaagttcagacttcaataacttgaatcaaactcattatctttcagtattttgtaccatgaagacatggagaaacctaatccaagccctaggagatgaaattacacgaacctgcaatttagaagccaacttgggcacctagggtttcacccagtgcctaggttgacatatctaattagggtttcaatgttcaggactgtcttagtgaaaagcgccaaaacctgcattaagacaacaactagacataccacaaacatatttgaggcatcaacatcagaatcagagcaagttcatttttgagcacctggggccctgagcacctagtgcctaggttgataatttgtcaatatagacacctttcaagcattaaattagagatcgttttgctctttgtcttcattaaaaatagggaaatatgcccttttaaagaataaacaacacttcctgggtacaaaaaatagagcccagcgcctaggttgacacctagggctagccctgcacctagaatgacattttgtcaacctgggccattttaaacggagtttttcaagaatttatttcgatcatgttcttcattttcaaaaaatattaagattctagttttggggactaaatggatttttcaaaggggcaaaacttggacccagcgcccaagttgacacttagggttgggcctagtgcccaggttaacgtaatgtcaacccgggttatttttgatccagttcatcaaaaagtgttctaggtatttttttttcttcatcagaaataataaagattcaaagcaaacttggggagaaaaccataaacttgagccccttaaaaaggggcccatcgtccaggttgactagtgttgggcccagtgcccaggttgactagtgctgtgcctagtgcccaggttgacaatcaacctgggatgctgccttcaattttgctcaaataccaaaactgatgtgaccattaaattcaaaatggtcaaaatagggtaggagacctcatcctcaagttcagaaaccttggaagtataaaaaatgagatcccaggagctcgagagtaagtacctagcgcctaggttgacaaaaggcatggtgcgctgagttttgcttatccaattctgatgttgttttgactttccgtctagttttcatattaacaaagatctatgaagttagagaagtcaaattcacaactttacatttctcattttcggctcactcagaaatgaagagtttcgagtctcttatttttgcaaaacaacaatatctatgagaactggtgaccaactttgccagaacacaaaaactgactaagtgatattaaaatatcacgtatgcatcttaaagtatatccctttggatgttttttactcacctaacgtccaggttgacgtcatatatcaacttgggggctgtgtcataaactacctttagtaaatagtcataactcactcaattttgatctgattg

SEQ ID NO: 309470 - DNA, 1007 bp, Cannabis indica
gtggtcccatcatatgagagacgtggggatttttgaatccgggaaaaggagtattcatgatgtttagattatatggctcgagttactcatctgagtcatatctagattattttccttgcttgccgacttgataccttctgaacttatcctcaaactcatatattcccaattagattagatcccctagctttggaccgagttgttggcgaagatcaagttttctctggtgcaagtgttctcaaagatccggttggttataattgctagcagacctcatcctacttacaaactttgtcctactcatggatctcgacctgctcatggaacttgtccttgagtgacttgtagttttactcgtgcttgtgctttcttgatcattgttgcgatgagtaatttctcctcctggcattgatcggttgtgggttcttgtgcgccccgaggtaacaattgcctcttcacgtcccattctactcccttgggtgtggttcattgtgtgtcccctactagagtttgtacgtgccccttcccttttttgtttgagaagaacgttggcaacgcctcgttggtgacccacgtcctcaaggttgagtcccaggattctccttgtttccacgagggttttctcgtttcctagtttctggtcgccttttgttctcatttctgtgagatggctctagctgattatttggttgttcattttcagggggagcctcagtttccccaggttgttcttcctaagcgttttgagggttctcttgagctgtattattatcctgtgccgctctggtcgcagctgcctcacgttccaactcagcattccatcggtttgcctccttcaggcggcgtctgagttggtagttttccgactcgatgattgacacgtatcttgctggatcgtaggcaccattctcaccagtttgcttgtcttgggctctaccaatgttcattttgttgggatttatgccctaaataaaacccatttcaatctaatttgatttgttatcaat

SEQ ID NO: 309471 - DNA, 525 bp, Cannabis indica
ttttttttttctctttcagactaactttatgtttttttccttttacatgtactctcttctcaccatgagagtttcactctctctgctatatctctcttggatcttggagctgaaagtggtttttgggtttaccagttttataaacttctggtctctatatatagagtagttttaagagtggaagatggtttcaatagatgaatccaagttagtcgtaaatgtccatccaagggtggtggcatcaagtaattttggttgttaactaaaaaaaataatcataaatttaagaaaataaaaataattaagattgtaatttacaattgtatatgatcaaaaaagaaaccctttaataacactacattatatgcttgataataataaaataattaggtaagcatgtagttgtgtaacctaaatctctaaattaaaatttattagaagcaatgaaaacaaatatgattagtttaaattttagttctgtaattgtaatattattaaatcataagttttagttttaggttatac

SEQ ID NO: 309472 - DNA, 759 bp, Cannabis indica
atagtgattggtgggcctatgaagcaccaagtcaatccagctggtattggaggtgcttagtgaggctcaaagaccaattcaaagcaactcagcaccctagcaacatgctgcagcaatacaacatagcaatcggttacaaaattctggtgcaagctcccccaaaaatccaatggacaaggcaggtatggagtcatttcaatgctccaaaacacagttttatactttggcttgctatgcatcaaagactgaaaactaggaaccgattgtccaaaatgcaaattatcacagatacaaaatgtattctctgctatgataggagtgaaaccatagaacatttgttctttgaatgcccgaaatctatcatttgcttgcatgaaatcaagaggtggttagggtggagaacaaggcatacaagccttcctaacatcatcaaatggctaggaagatccaaagaaactaagttcaggggcctggtttttactgttgcaacagccagcttgttgtatagtatatgggggctgagaaacaaggtgctatggactaaagaagaacaatcgctcactgctatgatcattgatttgaaggctaacttgaagctaagaattgagatgttttggccaaaaagagtctcgaatatagacacacaatggtttcaaagtttgtaaatacatttacaatttgggtgtaaacaaacgtttttgagctaatacaatttctgattcataaaaaaaaaaaaataatgattttttcaaaaaaaaa

SEQ ID NO: 309473 - DNA, 693 bp, Cannabis indica
attaagctattatttacttctagaaaatacaaaaaataaaataaagaccaagacataaagtcaacatgttgcaatttcttttaaaaaaaatatatttgaattatgagctcacatgcgaaacacgttagaccccaactagtattattctttacaaagtgctgacccacatgcacaagaaaccttccccttttaatttttatgctcttcctaagggtattgttatgaggcacctagcaccacataaaatttcattctataattagttagtaattttttataatatttataaaaataaaacaagtgagaccaaatattaaatgtcaccaataataatattacatctcacaaaaatgttaagcgcaccatcagtgccctttaacatttctctataaataaggtatgcatgcaatatcttattcattcttcatatcatcaaacatagcttcacttttaatcctttttctttctctcaacattatcatcttcatcaatctccaaatatgagttgtgctcagccatcagtttcatgttatcccgccggagaagacccatatgtggctccaccaccggttggttaccccaccatggacacctctgccgctgttgggcaacccgaaaacagaattgaaacccaatccaagggagggtgtaatgctcttgaaagcattatggtaaatctatcttaactcaaaa

SEQ ID NO: 309474 - DNA, 1983 bp, Cannabis indica
tggtttatcgacattttgattaggatattttttttagaatttattagatataacaatatcttgtcgatgaaatgtcaatatgttgtcgataatagcactttgtttgagcataactgggtttttcaattttttttactttatatcgataggatgtcgacatgatatctatagtttatcgacaatttaggttaagatatactgtgctagaatatattaaagttgttgataatgttgacaatttgtcgacatgttgtcgacaccttttatgcattaattatctgatttattttgttgacaattttattgtattctgttattttttaagtgtgataatatcgacagatcgacattttgtcgataattttctgtgagggtatctgtaatatttttgttatatattttttaaatggctccacgactcatagttccagcatccgagcaatttactggttgcgtgacatatagaggcactggtgcttttgcaaaaattaagtctcagtttgaggggtacaatttgaataacacggcgaaagaaagtagtttcggcaacttttagaatgtcgtacctttgacattttccttactgttatttcaccaagccatgttgcacaagatgaaggttgatgttgaggaggatttgcacatgcatttttacattggtcggaaggagctcagatttggagtggttgagtttgcgctcattacaagcctgaacttctcctcggcgccaacaaaagaagagaaggctgtgcaggttgcctgcttggggtcagaccggttgatcaacaaatattacaaccggtctgatagtgtgaagacagaagcattccaagataggtgcacaaactgtcagaacccaaaagacttgtacaagcttggcttgtgattgtttgttgaggtagtgctactgggttgcgaggctaacgcgttgattacggctgacatacttcgatatgtcaaagatctcgagttcttcttccatattccttaagggaagcactcattcgctagacttatgcactcgcttcaaaagaacatattgaaatagaaggccaactacgagaagaatctgagtttagaagttcaacatgagtgcaaatacacattttatggcttcgcacctgcagtataatattgggcatatgaggccatttagagattgagaagaggtatggcacaaatcatgggattgggtgagataggggagaaggagcttagtgcattattttctagacgggtatgagtttctattatgtttagagtaactatttaagataaatgcttgtaataaatgctaaatcatttttctcttatactttttgaatcttaaacagcatcttgaagtgatgaaggagctatttccacacacagaagaggaggaatatgtgaggaccatctcttacgatggtgtggagaacctggttgagggcggtgtggatgccacataggctaaggaggacacttaatacccagctatttttagaagacaagcagaaaaagtagcagaatatgtcaaaaatgctcatttgcccaaggcagagactcaggtaccatttttttaacttttttttatgattattgattgtcattagttgcgattacttggttagttgtaatttacataggttgtcagtcattgttttatagtttattgtattatataatttttttatcgatgcattgtcgataggatctggatagcatgtcgatatttcgttcactcttacgtttaattgatattgtttatcattgaataattcattgtcttttttcacaaatttgtcgatatgatgtcgataggttgttgacaattatttatcgacattgttttttgcagtatgttgacttgtatttttttctttctgaagatattgtcgagtgtatatcgacaagttgttgataggttttcgacaactgatttgatggatgcatcttctatttcttggctttggacaaggccaagttgtaacagtgacgggcaga

SEQ ID NO: 309475 - DNA, 573 bp, Cannabis indica
tttactgtgagtagaatttttttaaaaatagtattttttttttaaaaaaaatactatatattttcatactgtgtattgtgttaaattttatttattattctactgttattttttagttgttgcactatagtttttaattattctgtttagtattttatgattgtttataaaaagatagttttttttaaaaaaaatcatgtgatagtatttttgtaaaaattaacctcaattctaatattttttgtaaattcctctatatttatttacactttttattgcatttttctaatcttttttatatagtatttggtttgtaataatttttaaacatttaatttaaaagttcgacactaagcaaatttcaaaaataaaagattattttcttaagattcttcagttttcttttataaaacaataaaaaaaataagaaatgataattgacaacttactataattaaaatacatacttttatcaagaatgccatttagtcgcataatttattgaattaaatttcactacaaaaaattttatttttagttacaacaaaatttatgattaaagataaaaaagtt

SEQ ID NO: 309476 - DNA, 734 bp, Cannabis indica
tgccctctttatctctcacttatttcctttgagtttctaccgacttcttctctcaatcccagtatcgtcacgaaccaaaccctcagcatcagaacttctcagtggggaattcttcgaaattttctgtcgtttaacaaataagtaagtgtattttcaccatttttcttttgactcttcattcttttcttattgttttctatatatttttgtatcgtcaatttcttgtatgggattatttttatatgggtttttagcaacttaaggctacaaatttagggttacatgcctcacaagtcctgagtttttatgttcagcgtttcttgattttgagatatttttcttgtaattaagacaatgcttcattttgataaagattatgaacacacagaccttgttgaatttgataatcttcaattacaagccattatttttaaacctcaaacccataaaccttaatccatactttgagataaatcataaaaaattaggaaacactcccttaaggctagttaagaagaaacattagcttgcaataggcgataggcatgttaaaacaatccatttagttggatcgggtcagagttctaataagacagatattctaatctgaaatattcagatacttataagatctcggatcaaatcaactccacctcgcctaattttctttcttatcaatctgattccatccaatttcatatattttaaaagttaattatgttgctaattcaatt

SEQ ID NO: 309477 - DNA, 2663 bp, Cannabis indica
aacattaaatgttatttctgatctaataagtaaatctgattatttggaaatgagttttatttagggcataaaacccaacagtatcaaaccttaagcgatatcttcacccagaagcgtgaaaaaataagaaaaaaatcaatgtattgtataagtacacgtgcttttgacaacaattatgtggtggactttgagtttcgtgaaggaaggatgaagtcatgctaaaattcaagcgatgatttcactttctaagactagaggtgaaaaccaagttgggtgttcaatagacttcaagtagttcctctttcagggagggagggttggagatgtattgaactccaagtgatgttttcagccaaaatcttggaaaaacaggaaaaatttaacacacagtaaaaggacatgcgcttgtaagaaccatgttgaattatgcggtggactttggcttctgtgaaggaaggctaaagtcacgctaaaattcaagcgatggtttcactttcaagactagaagtgaaaaccatgttaggcattcaatagacttcaagcatttcttccttttgggagggagggttggagacgtatcgaaccccaagtggtgtttttaaccaaaaccttggaaaaataggaaaaattcaacgcatggtaaaagtacacgcacttgtgagaaccatatggaattatgcagcagactttggcttctgtgaggaaggctaaagtcacgctaaaattcaagcaatggtttcactttcaagactataggtgaaaaccaagttgtgcgttcaatagacgtcaagtagttcctctttcagggagggagagttgaagacggatcgaaccccaagcagtgttttcagccaaaagcttggaaattttccaccggcgagataaaaacaataagctaggcgctcgagcatttttttggggcatacacggctaggtatactaccgcacaagtgagctaagaagttcggacgtctttaaattctcagtcacttgtttaaaacattacttgtgtcggcaacaaaaggtttgaactctttgagtaaactccttttgttttaatttctttgtattcgaagatttgcattaagagagaaactttaccaagaattacacacaactttgagaaatgttatgatttagacacccccagcctgttgataataccagaaaaggtctgtattccaggtgtgagggatctctatttcgctcatcaccctgagctatgatactccatttcttgctttatgctttattttgtaggatctttccctcttaagtcctaagatccccattcccagttcttgcaaagctgggaagactctactttaaacaaaacttccaacttcaaatattcggctttcgactttagaactaaaatgtttgacaatattttgtgggtatatcttcagttggatttataactgttcccagaactctttaactaaatctaacgattcctagaatttctggggaatcgtagacaagaccgtgatggcctttaccccctgtgcacaagttctcataatttccaagcgatctttagatgctacaccgtgttgaatgactttggtcgagggggaccaaatggatatatagtttactgccactaaaggtcataccctttgtggatgtaactgttaaagcttttgttcatggatgttgaattggtggacatttcattttgtccatgaaattttctttactactcttccgataattttttagttttttcagctgtgtgtacccttcttgaaggttgtggccacgtggccatctataggtggcaatgttagtcctagaggacagacgactccgggtctatcctgtgccagcagaatagggagtgtcgggagatgtatttagggagctcaagggttcaaaggtcttatggtaccctattgttagggagtaggcatcattctgacagaaatcccctgtctattgtataggaacgtagactcgctgtcttaaatgtcctgctctgactaatgccctaatcctgtctatcaaatgactacactttggacaaacgtccaactctacatagtattcgtttcgtttctttgagtctctttggggatatttccactacaacatctttcatctatttggtcttttggatctttctaaagctttttttcaactctagctcatctctcctcctatctccttttagtttctcaagttctgctcctgaacctcctctttgaaccacccgagaagcatctttcatgtggatcataccacatcgaaccaaaaaaaagggttttgcataggtgcacgtaccgatacagaatgtccacaaatagtcagaatgttattggaatatattttaccaggacctagatttactaacaagtacatttttttaccatcctaagcatgaacttctaagacgatgaaaattaaacacatataaagtatgagaaaccttacattggttgcagcaaaattaaatgactccttctgctcagatctctaacccttgtatcctttctatcgtagagtataatcaagatctgagcctgacactccttcagttgtctggattttttacagtcttacacactatgattgaggactaactcgctatgggtgggcatgcactcaatcactaaagcttgaattttaatggtgaaaaagactataggatttcaaattag

SEQ ID NO: 309478 - DNA, 1371 bp, Cannabis indica
gattactaatcagattgtaaagagttttatttagggcataaaacccaacatcaacaacctcttaaactttaaattgtaagaacgcaggctgagcttgaacatttgttgaattatgatcagcctccccctcactctgcacaacaactttcccacctccaatctgagctcaacagactgcttcttaaagaagaaatcttttggaaacaacggtccagagttgactggcttcgtgctggtgataaaaacaccaggttcttccatcaaaagcctctactcgtaagcgcaataattatattcgtggtctaactctccctgatgatctaccacccatgatactcagaccatattcactcaattccagacctactattctgatctcttttgctctcaaggagtttccccatcagctatctcatccattcttcagggtgttaccactaccctctctccttcccaatctgcttttcttgccgaggagttcactgcagatgggataaaaacagccatgttcagtctctctggtgacaaacctcctggtcctgacggcttaaactcctacttttatcaaaaaaattggcatattcttggaactaatctctttcagggtcttcttcaaattcttaacaatcagggggacatctctccaatcaacaacactattctggtcctcattcccaaaaagaagaactctaaaactgtgcgagattttagaccaattagcctttgcaatactctctataaatgcctttcaaaagtcttggctaatcggctcaaaagtgttcttcactctgttataagccccaatcaaagttcttttctcactggacgtcaaattactgataatattgtcattgccaatgaaatcatacatgctatccattctagaaagtctggcaaattaggttgggctgctatcaaactggatatggaaaaagcctttgacagagttgaatggtcttttatctctcactttcttcatcatattggggctcctctgagttttatatcccttatatccaaatgcctttccaaagttacctaccaactatctcttaatggaaaattgtctaatgttttttcctccactcgcggcattcgacaaggcgatcccctatcaccttatcttttccttattgttgctgaaagtttgtctgctgccatccgtctttatgaagatgctgccctgttttctagtcttaaaatttgtcgaggggctccctcgttttctcacctcctttttgcggatgacaatatgttatttgttcccatttcatctcaatcctccgaagctataaatgatattctgcttatgtatttccaagcttcaggtcaatctgtcaatagggataaatcttccatcctcttttcccc

SEQ ID NO: 309479 - DNA, 502 bp, Cannabis indica
taaaaaaataataataattaatactgcagaattcaaaaacatatttaattaattaataatacatcaactaatctacattcaaaggaattattataattattaattatcaatttattattatgggattctaatagtctaaaatttaacaatataaaactttaatgcactaagaatttatggttatcaaatttaattaattataattagttttgcatttatttgtttaatataactagagagccttattttgcagcaaaccctaaacaacttttttttgttacataatataaaaacatagtgaagtgtcataatttactaaattagaaagataaaaatattgaattggttaaaaaaaattaaggtatttttttaattttatacttcaaaaaagttttttttttttgttatctttacggaattccacacagaaactcctatagtaattaacgaagcaacttaagttgtaatcaaaatcggttcaacaactcacatagaaactact

SEQ ID NO: 309480 - DNA, 1993 bp, Cannabis indica
aattaaaaattaaaaaacaaaagtgttaccaaacggcaccttagtttctttccctcagttactggtcgtgaggtgacgcaatcaaggtgtgcaccgtaggccttcataaggaattcaacttaggaagtagagatcaattcttaaacttttagagttttaaaaagttggctaattaggattagctctctaaattttaacatgtatcgcatcatgcccattgaactttaaaggtcattaaaaattttcttttgaactattaagattgttggatttaaaaacttttttctaattttagtaaaaaaagtctaacatgaatggaacttcagggagggggcttgattcggtacatgacacatgtcaaagttgaggggcgtgatttggtagttttcaatgtttagggagcataatatagtacatgagcaatcacataattagtaaaattgaatgaaattggacaaatatatccttaactccaacaatctcaaaacaggaaaaaaagtttaagaatttggtacatgtcaaagttcagaaagtaaaaatcctaattagcctaaaaagttttatcattatagcagcatactaaaattgttattttagataggaactccaaaatgtaattttgtggccatgtatatatttatattttcaccgacactaaaaaaaaattaatattttgtgacaatattttaatcacaacataatttttttgtgactaaatgtgacttttaattacaacaaaaagttacttgtgactaaatgtgacttttaattacaacaaaaagttacttgtgactaaaatataatatttagatacaagttatcactaatttagttttagagaacaagtattgtggaaggatagaaaaagttggtggagttcatagttaatttggctcgtatatatcactcttgatcagtggaaaaaagctcaagaaaaaagtttgcttcctgcatttgatacttggtatctttcggatggggctgaactatggtctaaactaggttatgaaaaactcaaggtgaatattgatgctgcactgtttgacgatgagggaaggcatggtgttggtggggttgttcgggatcacaagggtcgggtctagctgggattacgggactgcagattgagcaagttcttcgtgagattgcttaagccatgactctcaaggaagtgttatcatggttgaagaataattttctgggtattagtgttatcgaatctgattgtctggtattggtacgtacaagctattagaaacttgaatgttttgtcatccacttttgatggtgtcgttgaggattgtaaataacttttatcttcttttagggatgtttctttgtgttttgtcaaatactcagctaaccaggctactcattttatgattggagcatcttgtttatatgctaattgtattttttcagagtataatctcccttttgatgttgctaatattgttgaggtcgagttggtctagttaaatatttatatttttttaaaaaaaacaaatttagtcacaacaaattgttatttttgtgactaatacctttagccatagaatttttagtcacatcataggaatgatgatttataatagtcacaacttgtttacttttagtcacaaattttattgtaacaaaaagtaagattttttatagggtggttttatttttgggtcaccaacttcgaattgatggtgacggtatagttgtagtagggttggacatctgtcccaatccaacttttttcttctaattcgatccaatccaataataactagatttgaaatcatcatccgatccaattcaattagatctcaaaatccaatccaattactaattgcattggatcgattttctaattagatattcaattacatactgaacttttaatatttacataaaaatatgaacaaaaatacgtaaaaattaaatatataccacccttcaattaagtttaatagtctataaaaatattatccttacaagtttaatg

SEQ ID NO: 309481 - DNA, 2052 bp, Cannabis indica
cctgtcttcctcatcagcaggaactagaacctgttgccagtctaaatattttaagactttgaagtctccagtagattgtctactgccaagaagagcacaagccttcaaattgttctcatgcaacaagaagtcagctgctcgcaacccaaaggggagaccaaggagaatcctgtgcctcttttcaatttctgaatttggaacaggtctcctcgtaactgctgtcagtacaacacaaacaaaattagtaaaggcctacatttattaaaattaacatttaaaacaaagtttttgagaaaggcaatacttacgtatgattccaaatgcaattatgctgatgggagagagacatgatgtccaaaagaattcatccttgaatttgttcttgttgggtaacctcacgataatcctttggtcattggtgtgggtcgtaaggtaataaaaaccacctgctccttgcttccttgtgggacaggccttcacaaaataaaaataaaggattttaagtggggctaggcactcccacttcagaatgtgatataaaacttttaaactggccaatattctgtacagattctgtaccaggtggaatggagcaacaccaaggtagttgcgaaattccttgaaataatccttaagagggagtactgccctggctcttatatgttcgaggccccaagtgcctatttgagatggctcgctagtgctatagccttcttcttgagccactctttcagaaggaaagtaactgaactctcccttgataacggacctaactcgacatccttgtttgtatttgatgccacatgattttaatacttcactgacgtatgatccaatggatctaactttagactcgatcagttttgcctcgaaggtagctgcagggtcttgagaggtctttgatttgcgtgctttctgggccataatctcaaagtctaagtcacctagcgaaaaagcaacattgactggaggtaaaaacaatggtctttttaaaggaacattaattaatttagaaagtttaggccaagctgcttctcgcaaataatgatgcttaccctcaattatctcttgcaaaaatttcctatagcgactagaagtttcatcttggttaatttttacgaggtgatccctaattttctcatcatttaccttaagaatggttttgggtatatgaattttgggtctaaactttaaggcaaaaatttgaggacaaactgattctaaggattttgggattgtgatttctgggacaaattggacatgattatgattaataatatcccaatttctagaataacagagcacaaatgaaacccataaatttatgaatcgtaaaacctaaaatattctagccctaaagtcatttagataaacaaaatcaaaattacccaaacattaaaataatgcagataaggaaaaaccaaccaaggaaaagaaattataaagacaaagaaaaatcaataaagaaaaaagagtatatcacttactgttttgatgggaatttctggatagagggaaacttgacgattgaagttctaaaggttgtaaaactgggttttgatggcctttggtacaagaaataaaatcaactgaaatgcacaggaaatatgtaagagataacgagggcatgcaagtttggaaaggaaacaatcgaagttttttgcaagaaagctcaaaggtttgaaaaacaaaaattgtgaaataagatgctcagtctcgaatttatactcaataaatgaacactgctttttttttgagagaaagtagtttattcaaataaagataacatagttgggaatcacaacaggggacccctccctaagtttaaagtcaagaaaaagatcattacttctaacagactttgctaacttatcagcttgcatattatctgttctattcaaatggacaaaggtacaattgagaaactcctactatcatactccatatcttgaccgttatcgccctcgttttccagcatggtggtaatttacgatttgccatagcttgcaccaaaaagcagtgcgtcaatagcaatggcaatggatcgaaaac

SEQ ID NO: 309482 - DNA, 1136 bp, Cannabis indica
acacacttttggagattaaaatttctaagaaacttttttattttgagcccaataatattactcctgcgaatgataatgtgatgagattaaaattcgtgaggtaattttacatcagtatagtattatagtcgtacccttcgttatatgagcattgctattgggtaccagtggtgtccaacactttttataggctgtagcatctcacgatcgatgttataagagacacgatacttaattacataataacaatataacacaaaaaaggtattaagcaccaataacattttttaacaattctttccttatatatacctaataaatttttagggtatattacttataagtaccttatagtaaaatgttacttgtaattgtattattaactattataaagtataatatcaaatagcacatattttaaaatagtattaattatcgttaactgctatgactcacttgtaacgtatgtaatgttaagacgcgccggatgaatctagtttgacatatatagtctagagacaattttactttttcttgttattattttaagaggaatttgcggcgaaattcttttatgttttaatttttatatatttaatctccttattttttttttgacaaaatccatttaagtttatttttctttgcaaatttaaggtgtcagttagatattactgttaaatagcaactggattactattgtatcgacttcaaggttttaatgttacaaatacacaggtgaatacaatggtcatccaatagatatttaacggtaatattgaactagcgtatcaaatatgtaaagaaaaataaatttaagaaagtttaggcacaaaaaataaatttaagaaagtttaggcacaaaaaataaaataaagagttaaatgtataaagttaaaatataagaaagtttcgccgcaaaatgctcttatttttaaggaacttaaatagaaatttgagaattagagtttctatattatattttgtattttttggaatttacgttggtcagagatctcaattctatcccaactaactacataattgaaatgctatttacaaaaatatgagaaaataaaaataaattttgatatatgtagcataaatatttaattatactaaatatgttttttttt

SEQ ID NO: 309483 - DNA, 1324 bp, Cannabis indica
cagcggaatatgttgaaaatgctcatttgcctaagacagagactcatgtaccattttttttaactttttttattgattatttattgtcattgtgatttattggttagttgtaatttacttgttagtttttgtaattacttggttagttgtgtttattgtgttatatattttagggtttaaggtttaggtttaacggtgttatatatttaccgataagatgtcgataggttgtcgacgattgttcatcagcattgtattaattgacttttttgcacatattttttgatatgatgtcgacaggttgtcgacaattgttcacccaaattttttcgtagtattgtaataattgtattctcttacaaatttgttgatggtatattgatatgatgtcaacaggttgtcaacaactttttatctaaatttttttttgtagtattgtattgagggttatcaatatgatatcgataagatgtcaatggattgtcgacaactattcatccaaatttttcgtagtgttgtattgatggttgtcgatatgatgttgacatgttgtcgacattatgtcgatacctatgtaatttatttgttatattaccgtttgcttactgtattttttttgggatatactttttcaagccactgcttcagaccctcagcctagtgcatcatcttcatcaagccttggtggtgccgagtacagagaattagtggggaggttggataggatcgaggctgagcagaagggtctgtatgcttctcatgctaagctgaaggaggcatatcagaatagccatatagagctgaagggtggtctgaacctcattatggagcagctcaaaactatattgagcatgctgcatcgtacgccaacgacagctccagcactgaagccccagcagatgcatcaccctcactagcagctgcatcaccctcaccatctgctatgggtggagatgatgaggtctttcctgatgggtatgatctttatgaggatgctctagctacccctatcggtgcaggtattatctacataggtgacagtgagtcatagggtgaaattttgactttagaggcaccaccttaaggggttgagtgtgggaagcggaaaagaaatccccctatatgttttaatgactatacggagaaaaaaaaacagaggcattcttcgacatttgatcccttgacgacaccagatgagcaattgttgcatactttttagaagttgtgttctggactcattcccaatcatcgacttcgggatttgaaaactagtaattatggtccatcgttcttttggaagttgttgacactgtaggaatggctt

SEQ ID NO: 309484 - DNA, 2312 bp, Cannabis indica
gtacttccttagttaagtttaagaatagtcaatataatttttatatctgaaattgtgttgatcgcctagctcatagatttgacagttggtatcccgagtatcatgtccaattaagttgtagcagttcttattttggaactgcccatcaatatagtaccaattctgatagggcgagcctttctgactgggacatgtctccactaaactcgtttgatctatacagctaggattactggttctagggagtttagtagtttttatagtttttccttatcattagatgattatggtaaatttctgagtgggagattatttctccacatttactttatttatttggtgtaagtgttgaccctgtcttttgcctcatagatatgaattttgaaagccttctctcaaggcctccaggttccaagaaaggtaagaagcgagttgttgcctcgaaaacttcttcgggaatgaaccttgaatcgttgaagagagcaaaaaagaccacatcaaacaagaaatgtgcctcgactcaaatggttattgagcctaatgatccctaaataatctccctagttccagctgctgcgagcaccgatgaacaggtcctaggatttgttcatcaggataagttcttgggttcacaacttgagatggtatttttggagccctcctaccccctaccaagttatgctggaattatgggctcgtaagcctattctaccacttcctattggcgccactaccggtcattccaacagggcgactaggattttatcaataatggagacttcgagagcctatctgagaggagtttaaatctctccttcttaataagtttttatctttatctcatttttaaatttcttaatctccctttatcatcctcttcctaaattatttttgtcttgtaggcatctctattttctcacttagctcatcaaagaggacttcagagaattaagcaactagagtccgaacttcgcacaaccattgagcaacatgaagttcttgcgaggcaatggaattcctctcgtactgaggtttctcgattatgtaaggaagctgaggaacaggtgaaagccataagtctgagctcgaaggtgcttaaaaagaggctaaggatctccgtgaagctcatcaaaaaattcgcaaaaagcttaatgaggccaacaagaaacttgaaggggacgagaaaaatgccatagccagagtaaactcaatgcccaaacggtctatttatggcgcctggatggccaattcaaacatggatggatctaagctttttgggtgaagaagtcacggagatgctggcttttttcaagcaaataaaaaaagacgaggctgtggatgtcgaggatgaagaagaagaagaagaactcaccaagtctccaaccatatagacttggttattttaattttaatttctgaaaaatggccttttggccgagacattggttgccccttgtggctttttgtaaaaaattttgctttgttggggccaacattgcttatttatataatttttttatgcctcttaccttgcttttttcgagttatttatgtttgtttgttgcgttataattcacaattaaacaatttattctctcaatttaccttaagatatttttgaggttatatgcattctaaatgtcaccgtcttgatttatatgagtagttaataatctactatgtttttcgcgagaagtttacaatctgctatgttatacgcgagcagtttataatctgctatgttatacacgagcaatttagaatctgacatgttatacgcgagcaatttataatctattatgttatacgcaaggtagtttataatctgctatgttatacgcgagcagtttataatctgctatgtgatacgcgagcaatttataatatgctatgttatacgtgagcagtttataatctgctatgtttttagagcaaactttaaatattctgaataatttactttaagaactattttgaatatctttcgattattcatatgaatagttaatcctctattcatatttttagcttaagtattatttctcaaggcactttgtatctcgtttatagcacatgctacaataatgcgagtcgttacttactcaactcacatatagctttctattattttatgagaaaaatctcacttacaactgctattttaattttttcttttaaagaaaagaattttcaattcttaatttcatactgtccgaagacaatttcaatcaattattcttttcgttgtgatttttttttattattattatttaggcttttgcaatacaatatatatttctaggtggaatcta

SEQ ID NO: 309485 - DNA, 1585 bp, Cannabis indica
taagaacttacacttttattttagtagtgttattcctgctgtgggtagtgctggctgtttaattttaggttggaaacctagtattagttttgaaagcatttttatatctaaaaaccaaattttgggcattgtgtactctgacccagtgcattatccttggttattatcttgtgtttacgggcccccttacttccatgagaagaaaaaattcttgttgaacattatggaaattggtaacaaatttggcaagccctggttgatcttggttgatgtgaattttgtgctgagtagctctgagcgtgtcagttcaagggggaaagaccaatttctcccttttattactaagctaattaacagtcatgcattgatcaacatgcccattaaaggggacaacttgacttggaataaccacagggatggtccggatcatattaaattagctcttgataaagccttggtcaatgtggattggttactttttttttctaaaaactttgatcgaatctctacatatttgcaattccgaccataggcccttgtttatctgtatagttgatcctaatgctagaacaaaacattcatttctttttgaggcttggtggacaagggaccctcagagttcacttggttattgaacatgcattgaatttaatttctcatggttgggccccagcaagagtgtttaagaaggttagggctactcgtctagcactgagtaggtgaaatagagagaaatttgataaattggatactttcataagccagttggaagagtaactctagaacattcaaaaattgtcgattagttttaggagtttggcaaatgaagtttgttaacgcagattttgttaaccaaatttgagcctcacggtagtgatttcacactgaaaaaaaaaggtgtaaaaataaaagtatgagcacagggttttttacgtagtttaacagttaaaattatgcatagtccacaagtcaatcttattcagatttctgtttgtttctcagggcctctcccgtatgaggtttttttttcgtcccccttttgatcttacttgccactatttataatttcatagtgggcagttaattacaaaattgactataatatgtttagaacaatcatccctaaaatcatgtgatttgattacatatcacgtagtgtaaatacggttatgatttgagaatcatatagctgtgattttcccgtttttacctggtcaaaataatcgtgatttaaacatgtctttaattattgtatctggaaatgccttgacagaagcttggatcgagtgatctcaatagcgagctggggccatttttccttctgagatcgatgatgcatgtcttgtgtcgatcgcggctcttatttacaaagagttcttcgaagctcatttaaatgttagcttcttgactttccaggattgtgagtctcactgacgttaactggatgaagttacaaagagcctttccatagcgagacaggcacctcgcttacttggtctcgagccgatccgagtgttacccttagtttgtacactaagggctttcacaattgatatatgtcgatttcgtcttcctatgtgtactg

SEQ ID NO: 309486 - DNA, 444 bp, Cannabis indica
aagtttaaattattacaagtttactttccttccatttgtaattaaagtttaatttctgcgttaattttattggtaatcccgtttagggcattagggtttcttaagtatcttgggtagcgtgccttatagttagggcattacacataccctgggtgaggttatgtccatggctagccatccttaggctgggcatctagctttggtcggccagccctgggtcaggtaactagccttggctggctagccccaatttaggctattagtcatggtcagccaactctatgctgggtagtgtttggccatttgttctgccctatcaattggtgcagcctgtgtgttaactgttagatttaccaccaagtatgtttcattaacatcctaatatgaattctgaaacaataaaataagcagatataaagtttagtaaatcttacattgggtgca

SEQ ID NO: 309487 - DNA, 514 bp, Cannabis indica
tagtggctcgaccactgaccaaaaaagaaaggcacccactgcatttggtggctcaagtcagaacaagaggttccaagggaacctaggatgagacaatcatcaaggtagctccgaaacccgatacaattaccgaaaatgccccagttttaaaaagcattatctggaagagtgtagagagcaggggtgcttccagtgtggcatgccaaggcattataaaagggagtgtccccaattcaagactgaagcacaaaagactgtgacgaaacccgctccagcaagggtgttcgtgataactcatgttgatgcagaagcgagcccttttgtggtaacaggtcagctccccgtcatcaactcttacttctctgagttatttgaatctggggcactcgttcttatgtggcagccaacatttttggtaacttgggtagatcgcatgatagttatgatatagggtttggaaccctactgcctggcggagagttagtcatctccaaaaggtggattaggtctatgc

SEQ ID NO: 309488 - DNA, 558 bp, Cannabis indica
gcatagtatacatttttgttatgagaactttgtttggcattaagcaatatttttttggtgttggtgtaaaattttctcaactatgggttgtttcaagtttgttatcatgtaaaggatctctagcttactttattattttttttttatgaattagttgtgaatagagaaatgttaaaattggtgcatattatattgttattagtagaattaaatatccaatctcacataatttaatttaataacaataataaaatatggctaaaacatttgtaagacgccacatcatagtagtgttaggcactgtacctaatagctatatatatttaagataaataaataaattatttggatgaaatattttccacgaattttaaatactctttgattattttaatatgtttattattaaattatatatgtatcgaacgtttttattaaaaaaaaataactataaacaataattttagaaatattaaaaaattgattgttacttaatgactaaataaaagagaattaatttgagtttatgcacttaatttatctacttaattaaaaaaa

SEQ ID NO: 309489 - DNA, 507 bp, Cannabis indica
gccctgatcagcgtcggtagtgaattttgccaaaaccgacgctgaaagggcttaaaaaccgcctctaaagggggtttttgtagtagtgcccaccctattccttatgaaaacaaaacttagtagtaattttatttcttgtttttgatagtctttaaatttcaataatggccttgaagcacctagagttggatggagtggaggacttctactcttgtggaggataattttttctttttgaaaagacttacactcaattgtagcttataagctagttcttccgttgcatccttcctcttgaaaaaaaaatccatctccaaccgtgaaagagattaaataaatgttacaacaacataatatacaatatatatacactatatatattatatataagaaatgtagaagaagataagaacacatgtaatataaaatatgtatatataacaagagaataatatatatacactcactcataaccttgagtgtagattagtggggatcaccatgact

SEQ ID NO: 309490 - DNA, 802 bp, Cannabis indica
gtacattcactcggaaatctctaactcatggttggtccactttctctttacccttacatgcaccacaaagaacccgtgagtcgcgaagactcaacaagaaattggggaaaagacaaaaatcaattataacataacattcttaaaaacaaggaacatactttaagcatataaccttaaaaaactattctcagtataatcaaatgttgataacaaattattggtctaataagacaagccagtctttatactttataatgtcactatcgatgactaatgaagcaactgataagtaagaaacataacagcagtttcaaaagagagtaataaatctttcttaataacggtaattacaatattttacttttgacatgttatacgatgtaattgacttttcttaccttaagtccaaagtcaggtgtgcgggccaacctgagtggaatgatgcttgacgatctccggccctgtgtcacaataatggaaattggtaaatatctaaatcaatctcgttataagacctaaactcaaaaccgagcaaacccctattgattaaacacaaaatctaatggctttaaacaccccaaaatggtcaaccatattccacggttctaccttgtaaaaacggtccaccgttgttactcgtgtttttgagctagagacacgtggcatgattagagaagaagatttgttaacctcttggattacaagagataactaccaaagctccttgcggaggcacctagataatctgggaggggtttaatgggtatttgtgttgggttttatgccctaaataaaactcttt

SEQ ID NO: 309491 - DNA, 592 bp, Cannabis indica
tgttcagatcatcagaaggaattgtcttttaaattagtcctcacacttccttgtctatcaattgagggtctggtgtgtttttttttaagtttgtgttcgagattgcatctatagttttttgtttttctctctcttaagttgagcttatgtggaatacatgtttttctttcaacaagttttgtctcaattagtggtttcatttttttctctatctgtatgttgtgggttgggttgaatgttgtgtgggcctgctttgttgggctagtgggccttgtacgaattcagaaacattcttcaactatttgttcagctggggcccagcagctatttgttataagtttgcatctcttcctccccattcatcacagcacactccacctacgaatcttcgtcgtttgttgtctagggaagcgtgcagactgttcctgaagaggtgtttgggtctccattaacgaatcgtctcacctctctgcccttccactttgtcaggtatgtcttcgaaccctaaacgtttcactcgttcatctttgtcttctccatctatctcactgctccacctgtgtcgactgaacctcctgggtccacttcaccc

SEQ ID NO: 309492 - DNA, 1475 bp, Cannabis indica
aaataatttccaacaaaaagatgtagagctgtttctttgtactgcttggcttgtttggttcaacaggaacaaagccctaaaaggtcaagctttcgacccatatcacgcaattctcaacttggctcaaagctttctggaagattaccaatcctcccagcagatttccacatcttcctcccgccacagtcagatagtggttcctccgtcttggtcccccccagccgtgggtctactcaagctaaatgtggatgcagcagtctccaaggccaacgggaaagcaggtttcggtggtatcattaggaacagcgaaggtctggtagtcgcagccctggcccagccacacttcggaggaggatcggtccctaccctggaagcaaaatccctcctcactatgctacattggtgcatcaatgaacactttttggtccatgaggtggaaacggattgtaaagccattacttatgctttgtcttgccataaagaagagatttcggtttttggtgaccttattcgtcaaatcaagaatactttgtctcagttccctgctgctcggctctctcatgtctatcgtgaggctaacaccctggctgataaactagcgcaccgagccctagggttagatgaagtagccatttggattgaagatgacccctgtaatctttttgagtttctttctttctagcgggctccctttcgttcaaaaaaaaaaaaaaaacgatgtggatacaatttttaaatgcagctcatcatcaaccccaagaacaaaaagatatctatatatatatattatataatattcatgtatttcaacaattggccaatatgtttgtgacaagtgatgacacttctagccacaataactagtgaagggtagcttcctttcccatagaaaagaaaagaaaaaagaaaactgagaaaagaaaaggtcttgaaagtctcccagcgttgcaatttgcaacaagtaccaataaatatataaggtggctatccacaaaatcccattgtctcagctggctatccacaaaataaatctcattaatttttaattattaatataagaatgtttacatatatatctattctatataaagtgtgcctatataacagaattcttggtttatgagaaattcatgggtgacttttatttatattaaaaataaaatagtttattaataaaaataaaatagtttatgagaaattcaagggtcgctttttatttatatataataaaatatatctcattaaatccaaaaaaaatacaattgagtttttcctttgtacatctactattggtttttctaaatatacttatgttatttagttggattttattctaaataagaatttactactatttatatattatatagattgctaaagaatttttctatttgtttttttggctcgatcaggttataattctttgcctccacatctgaatctgaatatataaaatgtggctatataaacgaatt

SEQ ID NO: 309493 - DNA, 665 bp, Cannabis indica
agactacttttggtgtaaacattattagacactcctattactttttttgttaggagacacacctatagcttaattttaattaaatagaaaaatgacattggtaacatttttctttcattaggaaggataatttctcccaatattattattgatatgcaccattattattttctctcaatattaatttatgtactcttttagtataaattattttaaatataaaagtcatgtttagtattaaatatgaaaatattgtatgaattcttctagtattaaatataaaaatatttagttttaaagaaattatttaatagaaaaaaaattgacatgaaaaaaaaattaatatttaatttaatttagataaatttaattattttgaaaaaacatcttaagaaagatagtttcgtgtttctgataacaacacagtcgttgtgtaaaaattaagttaattatcagattaattttttggaataatttagtggtgagaatatattttggcttagaagagaaaagtttatgataaagtagtaagcttttttagggctatttacaaaaatatgggaaaataaagataagttttgatatatatggcataaaaatttaattacactaaatatggcattttttaaaaaaacttacaaatatgggaaaaagtcttgagtaat

SEQ ID NO: 309494 - DNA, 4304 bp, Cannabis indica
gtgtataagagtcattattctatgggtgtaagggcccaatgaaggcttgaagcggagacattacagttaaataaatacattgtggttgaataagcatgaattgggaaagttcacatacagaaaatttatatatctttgtatgtgtatgttatgctcatgactttttggcgtttattggttggtgttgaataattaagggtaaaagtgcatcaaatacgataatacaactcgaaactcgcatgaacctttaaaggttacggtttgctgtaaatgaatttgagtaatttttgggttgacaaggctaatccagttaataaatgatcaatttttcgggttgtaatgcctaactcgaaattaatacgacaatgacctacgtaaagcatgcacctttatatttattatactttattatatataaattttattaagttcgttaaataggagataaacatattaaatgactattaaatgtttcataaaagttgttgctgcagaaattcggccaacactttctcgttagattgatgaaataagtaatgagttaagaaaatattaaagacacataatttatattagttcactcgccctgacgctatagtgatagagttacgtatacttcaagtttttattgctcactagaatacaagaaaattgactaagacaatagctcaattaggatgtccattaaaatattaataacataataaaaaaatatgaaaaaattgttctgagcaaattttgaccattgatggtgatctaatggttaaaatgactttgaatgatgatcgtaaatttttggcgctcgaatagcgtctatgggatcatttttaggctttttgcaaaaaaaattgcacttgacttggggacaaatttttgacattaaatctttcgaattgggatatgaatgtgagatatacataaaaagacttcgaaaatagctttcgaacccactttgaatcaagtgaactggagtaatattgagcgagttatgaccgttttactaaaagttgttcaacaaccggcacccaagttgagattctgacgtcaacctagtcgttgtatgagtaggaaattgtgactgacttgtattttttgaagtctaagtgatattgtgacatcagttagtaaatttcttaattctggtgaagttgttcaccagttctcgaaggttttgtatatttgcgaaatcgcgagactcaaaactactcgagttgcaacttttttgttgatatttcactttgccaaaaaggttatcaaagtgtgaattttacttttcacaagttgtagctctcaaatactatgaaaaatagttagatgctcgagacagaactagaatcggatagcagaatccaatgcaccatttcacatgtcaacctgggtgttgggtgctgggtgctcattgttgagcttttcgggattcattatgatacttttgtggcatctgatattgtgaagaaggtatcctaccctgttttagaccaagataagaagaatgccctgagtagtaatagtgtttgagtagtaaaaacattcgacctaggttgaacatctacctgggtgcaaggaccaccactagtgtcaatctggcgccgggtccttattttggcccacatatgctttcatttacttcttgagaacacttgtatctttattattgatgaaaaaagagaaaatgtataggagatttcttgggaaaaaaatgcttggaattgaccaggttgaaaaaaatgtcaatctgggtgttgggaccctagccctaagtcaacttgaacgttgggtcctctttttagccaccagatggctccatttgtttctcgaaaacactcgtatcttatttattgatgtaaatagagaatatgcccaaaaaacttcgttagaactattgttggaaatgacctaggttgataaaatgtcaacctgggcggtggcgaccaagcccggtgtcaatttgggtgctgggtcagttgtttggcctccaagtcgatcagcttgttttccaaaagaacttgtttcctcattttagatgaagatgaagaaaattcccaggaaacatctttagaaaggtggttggaagcgccctaggttgataatatgtcaaactgggcgttgggtgcatcactaggtcaacctgggcgttgggtgcgtagcagctgccttcaacgggaaatgttttgattctgatttcgatgcctccaacgtgtttgtaacaggtcttattcatgtcgaagtgcatgttttaagcaatgttcactaagataacctcaaaaactaaaactctagtccaaatgttagcctggggtgggtgaaaccctaggcgctcgggttggcttctaggatgtcatatcgacacctttcagttccaaggcttcggacttggagtcttcttgacttgttggttcagaaatactgaagaatggtgacttgaaaataacttgatgagatctaaaaatacccatttcagagctcctaaagttaacttgggtgtagggctaggggcccttcccagagttgactgctatgactcgaaacacttaactccatgaattttttccttcttgccatgtgtcaaacattgatgtccatgtcattagaatcgatttcccgataaacaaaagtgttgtaaacatgttaatgagttgataagttaactaaaattaagcatgatctgtgatatagaagagttacacaggttaggttaggttaacccgtttataaatgagttggattcgagttttagttttcaacacgattattagatgggttgaatttggtatttaaaaaatgtagtgacattatacatttataactgctactaattttccttgatgttacaaggtgattaatgttcaattattaatatccacattattaacaagatgaattattatttttcttttgctttgaagagagaactaacaagagtactaattacttatatagtcaaagtttgagattcttgttattattttatttctttttaataagagattcataattggttagctagtcaagtttgcctaacattcgttatataaaataattataactacaaaaaaattagacctgtaggttgtgataaggcggtggagaaaaacaagcatcatggctttagccatgtttattccaaggcatgtcctccctcccatcccaaaagctaagaagctataaggctttgattcatcctgattatggttatttaaaatcattattaattaataaatcctatattttgttttataaatatataatatatttatattaggatgaaattgacctcaaatcttgaagggttgaacttgcttggatcattgtacactgtaccatcaagatgcactgccctagcatcaatattaacattccatcctttttgtattttaaatcctgaaataaaaaacagatcagcttacactttgagaaatggaataattataaaatatgtgtttgtttatttaaataataatatgttatgttactggaaatactaatcaatttacatacaaaatatttggggaaaagaaaaaaaaaagaaaagaaaatgtagaccttctatctcacagtcatggagagccagtcttggaaaaaagggtactactgatgccattcttaaggattctttcacaacctgataggccaaatggattagagttctgtaatacttattatcctttggacatctcttcacttagactattatagggtaaataccattttagatcttgtattttgtaaaagttgtcaattggactctctatttttaacaaaatagaccttgtattttctaaaattgtacaaataaaatcctgaactgattttttgtcaaaataaaacttaataataatccgatctaaagatgttatgacaaaactagttacattgttttgtatctgtttgtgttagaaattgtcttaaagctggttatataaaaaaattgttaaaaattgagcttatgatcttatttttaccattttagaagggtctattttatcatttaacaaaatataaggtaaaattgataacttttgcaaaatataagatccaaaaggatatttttaataatttccaatatattaaatgttagaattatttatttgtggactaatataataccataatcacaatcattaactatgtgcccaatatttattcactaccataatgggatggttaataattaataaatgtattagaggcacatgggagcaccctaaaactataattggcccattaaattatagtccaccactaatgatactcattaccccaataagcctaatataaccccttagggttaagtattgtatata

SEQ ID NO: 309495 - DNA, 1044 bp, Cannabis indica
ttaactgatagagattacattgaaatagagttttatttagggcataaaacccaacaatatcttgttctattcacctctccatttgctattgatataaacattttacttcttctattttttttgttaacacttaccccagtccaaaagatttattttaagtgatctttttgactataagtgaactgccttctctgcttttacggtgcacctcatctggcattatgtctagaactacgcactgccgcattgatgtgattcttcaataaggtaggtggtcccatgtgatctttcatgggcatgcatatttgatcttaatcgttgatcttatttcgatcctacggtgatgaatcactcccccctcctataaatagccctctcttctttcatagcttggattcacctttatctttctgaattcgcttcaacattttagtctttatttccttcgagcacaacttacgtccttaggctttcgacacctgttctccttgagaattttgacgcaacaggcttaccttttcccacatctattccgacaggtaccttctcaacccatacaccttgtttcattccttatatctatatttttgctaaacttacaattattcatttatcttatatacatctgagtcttgctagtagctagttccccactagagcatttttctttcatcctcctacttatggaaaatcgtagatcaccttctgtccctgagggagttccttttatcgaacttttgtccaattcggatgaggaaggtcttggtccttgggtgcgataccaccaatcgatgttcgagtgcctcaagtgcttggaagcaattagagaatcccaagaacgtttggccatacttaaatgagagattaagcttttggagaatcaagggcatgtccacatgtatgccggtctttcccatctcaagcagctttatgctgacacagcgggtaacctcgctcacttagagcgcatgttccggcctgagccatcctcccccaattgtcttgggttttatgccctaaattaaactctatttcaatgtaatc

SEQ ID NO: 309496 - DNA, 604 bp, Cannabis indica
ccttggagttggcaatttcttggaggacatcacactctatgacactattgtctccccattgagtcccaaaggcacccaatggagagtaagctgttatatgaatacctttctcattacaaaactcccttaatttcttctgctgccaaattgggctcatctccacctatatacaattcatatcaaacatgaggtgaatctatttcaatgacattttagtcatggtaagtattccaccaatttttaaagaattcgttcaaacaatttattttacgttacgttagtataaaaaaaattgaaatatttgaaaacttttcaaatattagtgagatgacttttataattataatataactatataccatcataaaaaaataattatttattttccgtaccgaaaaacaataatactctaagtagaagcaaagttacatccctatatgagaattcttcaatatatgattgtaatttaatgagtaagtaagtaacatggtatattttatgatagtgtatagactctaagtattcatcaaagaaatgctaaatggtataagcttacgcaccacttaaagtgttatatcgttattagtataattaagtatcgagt

SEQ ID NO: 309497 - DNA, 723 bp, Cannabis indica
cttcaagaattaattctcctcctgcttttcatgtatgcatattttagatttacatattgttttgacaaattaaatggtgtactctataattgaaatataattatattttgaattggaatataatagcatgcacttgtttacacatctcatccaaccaagaaatgcaatggaggtatatttgtaagtttttactggctcacaatatactttcggtcaaataaaattacaaaatggacttgataccattcaagctggtggggagtaagtttttttttctcatgaatattcattagtgctaaaaatatataataaagttttttagataagctataattttttagaatatatttttacttattaatttgttgtgctattatccattaggtaaatcctagtgtatacggggataataaaactcggatcttcatatattttcaggttaccctaattttatgttattatttaaggtttttttcatatttgttgtgtagttatgtgtaactcatgtatcaatattttggtaggctggtgaattatcttgtttcattacagtgtgcccagtgtttgttttggttgaccctcaacctatgatccaaatgactgtaagagaaactcaccctggtaatttacctacatgggaacttccaattaatatgtatcgggtaaataaaattaaatatttcatttaaatatttttcctaccaagtttgttgaatatttttt

SEQ ID NO: 309498 - DNA, 1665 bp, Cannabis indica
ttgttcttaagtcaataaaaataacaaggattaggctattaccgaaatgcttggggataaacctctatataattcttgtgtctttacctactctataatatttcaatcctattgaactacttatcgcttacaaaattacactcactgtcgttggctaaaagcgaggttaacatttgggtgctttcattgagagtttatttcagggatcgctcttcattctaaatttaatcacaagtacgatggttgtacaaactcgtaggggcgcggttgatccaggaaatccataggcggtggatccaacactgcaaaatccaggaaacacaagggttccgcagctgtaaatccaagacaacaacaaactgcgagtcagggtgtgacaactcctgtggatgagattgtgccttctgtgcaagagactaggattaccagttcagcagttaaccagggcgttcatagcacacccgttccgcctgctaccaatgttcaaacgaccatggagatgacactgagatctagaacctccgtgccactcttggactcatgcagggtcataccaacaccctacatcatgatcaggaggaactccgtgctgcggtaaatctcgtgtttaaagagcagaggcacaagtttgctgaatggagggacaaagagatggaaccgttaagggctcatcatccagtcattgacaatcgtagtcagcaagccactatgctgatacaaaaagcctatcaatccgtcgggcagcgaccctcgaatgtcatcccccttgatgaaatagacgaagatctagcaatgaatacctcttagactataaatggtcagccgccaaatctctggtcataggttccacctgtgggccaagtggtaggtgggcagaccttgtctagtaattcatcaagagaagtcatacccaacaattccaaccaagttaatagtgtcggtcagcaaattagccaaaccaaccaatcactaagacagctaggcgcttccgtattcgataggttggggacgactcatgatctcagaaataatctgaataggaggagaggagtagacgatcagcttgacacgccgatcgtgcagcccggaacctgcgctcaaattcccgctcaaaaagatattgacgtgagtcagatcggcgaaaaggccaaacaggttaatagctagaggaactaaagaatatgttctatggcatggcgggtcagagaaacaatgatctcaagttggaccaagcacgtggaacccctttctcccccaagatcaatctcctggagttgtcccacaaatttaaaatgccaacctggaagatgtacactggaaaagaagatcctgtttcccacctcaagtatttcgagatgcaaatggatctgcagagagtacaaggaggcgtatgttgcagaatttttcttgccaccctcttggaagccgcccagcaatggtacttcaagctggcacctggaaagtttaactcatggaaagatttctcctcaaaattccatgcacaatatttctcctcttgccaacttccgttgcacctaggagacctgctcgaagtcaagcaaagacaaggcgagcctctctgggcctacatcagcaaattcatgacggaggcgactaaggtttcacgactaaccgaagatggaaagttgtccgcgatattggggg

SEQ ID NO: 309499 - DNA, 3007 bp, Cannabis indica
aaaattggaaaaattgtattattgagaaaataacgaaagattgtgataaaatggaaaaattccaagtggggcccaaacatcctatggccgaccactagggataagattttccatttaattcctttattattttaatgcctaataaatcctaacctaaaccaaggtggttccctgtaaatagatagtgatggatcacacttaaagatgataacaaattcaccttcagttaaattttccagagccttctattctattaatttcgaaccagccacttctctttcattcttcataatttcatatcttgagtgatagagtgagtgcctacacacatcaagtggtatctcaatcatagtgtgtaagactgtcaagaatccaatcaacaagaaggagcatcgggctcagatcttagtgataccctgctacagaaaggatacaagggttagagatctgaggggaaggagtcatttacttccgctgcacccactgtaaggtttctcaaacttttatgtgtttattttcattgtttcagaaattcatattaggatgttaaacaacatatatggtagtaaatctagatcctggtaaaataattccaacagttgctcgaagagaaagagagatagagaaagagtttctcttattttttttgtcttttttcttaattttctctaaaatgaatgaaggataatgaattaattcttttttgaataaacttaagctaggtgtcatcaccctagccttccacctaactccctatttaccaaattactaaaatgcctcgttacttacaacttaagcaaaataaagtctaggagtaaaatggtcaaaaacaataatctcgctcaaactcggtattctattttcaccaatatacatcccactgagaaataaggttctagacttacccatgtgattaaactggaaatcatcgcttttaatagttgtcgccgaccaaaaattgtaaaaataacataattcatatataattcaaataatacatcttgagtttaataaaatttccagaattaaaaaattgtagctctaatgcccacttttgataatgggacccacaattaaataaattcacaaatgactataaaaattgcaataattagtactaattgcctttactaatccatattataaatgcggtcattacagtggctttatgggtggtttctcttggaaactctatataaggcgaggtagtgagttcaatatagtcaattacacaacttaggacttactatatgtcttagtatgtgtacttaagaaagtacttggtcattgattgatcttctacattttgttttacctggaagctactcttgggtatgggttacttgaatatgtttgtagctttgtttggttgctgacctctccttatttcttccatacagatagtgccaggtgttgaataggggaggtgacaactgcgtaggtgttaggctaattttagtttaagtttcgggtcatacttttgagtagtttttgctctttatttctagttttaggactatgttacgcttgattcatttgtttcagattctcggatgtttaaagaaagtatttacaggacttgaggataagtggagaaagaattgagaagaaaaacaaacaagaaactttgctgtctaatcccacctcgtcagggaaaaaagcttcgccgcgacggtagttggcagaaagttttgccgttttatggaaattccttcgccgcggcgaagccgcaatgatggaatttttgtacaatttcataatttcacgaattttaaagagaagacttggttaaattagaaggagttcgtgaaaagtgaggatgatttagatttggagcgctagaaacaaaggaggagacttcaagaggggcttgtggcggcctggatcaattgcttcaaatagttcttttctgttctcttaatttttctatgctattttctgtgtcaatttgaattattgatttgattatggatgttaagaacttcactcctatttggggagatgatgaatgttgattgacattatctttagttaatgatgattgctatttctcatttcttgattgtgaaatttatccatatttgtgtttcattatatttttaagattgatcaccttttttatgccttatgatcccaattcaaaatctaaaaagtgagaattgggaatgctaaaatttgataaactaggttttgatgtggaatgaaagtatttgcatagcctttgtgacatttagattattgcttaatgatgattacatgttagtctaatttggagatgattagataacatgtggtttagggcctataagatctaaaaaaagttaggttaatttttataatcttcacattaagtaagagagtagtaattagcattaacaattgggtaattaaatcaacaagattcttttccctaatttgccatctttgattgaatctttttattgctgaattttattttcttgttaatctttatttttattttaatcataaaattattggtttgccaaatagaaacataagtctaatctagttgtttcggttcaattccttgtggttcgatctcactcgtgtgagtttattacttgaacaacgatacgtgcacttgcgtattatacatatttttcgtaacaagtttttggcgctgttgccggggactgttttaattaatatcaatatagttgaattcaattctaatttggtttttttttaattttactaatattttacttatgtgtttgacctgcaaggtaaatccaaatggtatgccttgttaattttgctcaacgacacaatgactcattctattctgctttggggagatttaaggaggtcagagagagatgttatgccaatttctcaagtgggtgttttattctattcttttacaatggacttgatgatgaaacaaaaagttgggtggattatggagcagacgtaactggagagcctttgttaaggagaagtcatgaagcaaaaatctgttgaatgatatggcagattttgatta

SEQ ID NO: 309500 - DNA, 2447 bp, Cannabis indica
ctttcttcaaagatctagacgaaatcgatctgttctcttgatgcacgatcttatgcatgatctagcattgtacatatctggtaagaattgcattgattctgatagttttaaagacttttacaagcctaatagcaggactcgccatctatcttacatgaaagacataaaagacagcataaaatttgaaaacttctctagagtggagtatttgcgtagcttgttggctttaccattgtcagctgtatacacattctccaaaacaagattaacacatgacattgttctcagagatggaggatgcttaagagctctttctttgtcagaatcttctatcaaagagttgcctaattcaattggaaatttaaaacatcttagatatttggatgtaagtcacacatcaatcaaagaattacctacttcaatttgtgcattgtacaatttggaaactttgttgttgaacaattgctctgaactcacacaattacctatcaccctttctaagttgatacacttgcgccatcttatgattggaggaacttcattaaaagagatgccaccgagaatttgcaatatggtaaatcttcagacattgagcgattttgttttgtgcgaaagtgatggatctaggatccaagagttgggtaagctagagaatctgcgcggaagcttgcatatttctggacttgaatatgtcaaggaagtgagtgatgctttggaagccaagttgaagaacaagaaacatctgagtgagcttattttaacttggaatggtgaagcagatgattcaataaaggaaagagaagtacttaatgcactccaaccacacgaaaatttgaagaaacttgaaatacgcgggtataaaggcacaaacttaccaggttggataacacatccatcgtactctaatttgaaaaaagtttatctgcaatgcaaaaattgttgcttgtcgttgttatcatttcaaccactgatttcactaagatatcttcatatttcctgtttggaaattcgtagcatttttctgaataagccatttccactcttggaaagattggagcttgttggaataactacattggattggtcatttaccaatacatatgaccaaaagtgtgagatttttccttgtttgaagaaattattcttacaaacttgtgggaatttaaatgtggcattgcccaggggtaattttccttctttggaagagatccacattttagattgtgatgaattggtgactatatttccatcaagtagtactcttgttgacattgcatatccctcccttgaaaagttaagaatacatcgtaattcaagattggagtcattttcaaaaatgggattattgcccttcactacaaaatttctaattatctcatcatgcaatatgctcatagagaatcgcatgaaatggaatttacaaagacttccattgttaaatcggttagatcttggaacttatgtaggagcagtggattcatttccagaagaatggttactcccacacagtttgactcatcttcttatcggtagatttgataagcttacagctctaaacggcaagggttttcaccaccttacctcacttcaacgattgtgtctgaatagcttgacaaacctacagtgcttgccagaagaaggactgcccaagaatcttattgctatgaccatcagatattgtccgctgttagttcctcggtgcaaggaaggaacaggagaagattggcccaacattcaacacataccgaacatacacatagaaacagaatagcaggtaatcactacaaaaaatcttacttttagtcacaataaaatttgtcacattatagaattggtataatgtaagactatttctttttaattttcctttctctcttgtctttagagagttcgttgaatgaggtgaggaggactgaggaaccgttggtgtcatttccgacttgtgtgacttttgatgctgctggtgttgatgagtcttctgttttgcatttcaagtgtaaaagttgtgtgtggattttgtttgttttgttgtgtgggatttgttaccactgtattcttccgccacaagtaaagttattcaatgtattcgggaagaggtcactcatggacatgtgatcttcttctcttcttaaaaatatgaagaaatgttgtttaataatattggtgaaagtgtactgaatttgagtgtgtctctatacttcagtagttgtttttcataatgtatagcagtatagcatagtatttgaggttttatactatggtgatgatcttcttctgttaaattactctgctcacttacaactttcaatgaaagtgagtaatttgttatggtacatctgttttgattaacttttaaattcttggcatctatgtgtttgtttgcttagaaaagttggtaatttaattagtctaatttcttagaaaattaagtgatatgatatccttat

SEQ ID NO: 309501 - DNA, 525 bp, Cannabis indica
gataactaatcagattgtaaagagttttatttagcgcataaaacccaacaaaaataaccacttattattattaagtcttttggggagaaaacatttcagaacctatataaggttcattcttcattttcctcattctacttcactctctctctctctccttcatattctctctataagaaaaagagaaaaaactcttcatttccttattcaagccaaacgccctcaagcacctctgtgcctcttggtttttaatttccttaaagatcaaatcattccctgagcatctacaactgtcttcatcagtgggtaagtcttgaaatctcattttattcattattttcttgaatctgccattgatgactttaagctttttcacgcttttaaacttcttaattctcacgttgtagtgtatttttttctacattataatctgttggatagctttaggacatataatgcatgagtttctgataaaaatatttgattttgaactccatttagattcttaatgttgggttttatgcc

SEQ ID NO: 309502 - DNA, 904 bp, Cannabis indica
gagtatcaaagagacaatgcaatttcaactgagaagatatttccttatcaagatttggattcttcaattggatgtagtggtggaaataatttctacccaaatttatccttcgaaaataatgagagatttcattaggtatatacggaataccgccttattttttctgattgatcctactttctggtttttctcatcagtccacctaacaaaaattctacaaacagatcccacccgttgatcttgaggactcaattagccacacaattatgtcaacaacttgtaaaagtaagggttattcctacatcaaaatatttgtttaatattaatatatattcataataacaaaataagtagtttactaatttgacctaattaaaccttttattatgataggtcaatcgcaaaatagggtcactcgattttgagaatcgctacaaaatgtgccatctgaagcaattttacttccatcggttcccatatgcataaattgtaaagcaaagaaatttatccgttaaacaaatggattttgttgtgcagatggaaaatttatctggccacaaatgaagttctaaatgaactttacacattattaacctccaacacaagtgattctacacatttttatacatatattcaaacttataacaaccaatttgctttcacatcgttgggcattaaatgtgatcaaaatctctgccaaataaataatggaatatacacttttaaagcccaaggacaaatctaccacaacatcatagatttgcttccttctgatggttatccctctaatctccaattatatttctatgacacggaaaatgagttagagaattgactatttaattcacaatacagaatgctcccaacagtcacaagtcaactcatcaatattcttcgcatcaat

SEQ ID NO: 309503 - DNA, 3980 bp, Cannabis indica
cataaaacctaacagatgagccttgccctacccttatgaacagagctgaaatggcagagagactccatcctcaagttggaactgacgtggctctatttctggctaatctgttagatcagagtgctaccacaagtttgtggctcggtgctgacaggttttccatgatggcgagcagggatccaatctacatagcatatgttatgaggacctaggctaatgttgtaagtttgacttttatttaacttaaataaatattatgctcctctcagttgtttaattcatttgcactttttttccataggtaagcttaatggcaaagaggaactgctccatggtcacccaactagcttatgaacttgagatgctgagggcagaacatgcaaatgctgaacaaatgagggagaaggctaccaaagctctagctgtagccaataccaggatggaggtcatcattaagtatagggtaaccgactctttggataaaaccataactcccgaaaagaaggctaccaaggctaagagggagggttgagataagtacaaggatctacattccactaccctcactaagaacaaagacctggaagctaacttgaagtaggcaaagatggacatccaagagaaagaaaaaaaagcttactgtcctatctcaagagtatgataaacaagttgaaattataaatgacaaaatcattaacaaaactactctggagagaaaggcgaagcatcatacggagttgcagcagaaggtagaggaagttgagaaaaaggctgtccaaaggcctgcagaggttgagactaagttggacttcatccgagaaagctcatgaatagtcctaaaataaaattaccgaactggaaggagaaaactcaagactgaagggacagctcaacaagtaataccaagagaagcaagagtaggaagttaagaccaccaaagctttagaacatgcctttgtgtattcagtatgcacaatctggaaacacaataagtttgtgatggaccttttggatgctgaagatagggatttattaatgcctcaaatccttgcatttgaggaagcggataaggctaaggaagcatcttagaatgtggaagtggtcgatcttggaactacccttcctatgggtgagaatttggatgactccactcttccagcttttgatgttcctttcgcaactaatgctcaaaggtctttcttgatgttcaacccgaagatactcaattgccaaaggattcactcctgttgtagccacatctatccactcttgtcttgctttaacaactttatatatatatttctttggggggatatgggtcccctttttatgtgtacaaagataatattgatattcttgtcggggagtttttaagtacatagtactatttgatttactctttagacatctagcttttaatctatagagtttactaagttttaatgcttttagcctcatgaggttcttgttctaaagacctaaaactttagatttttaataaaatgcttaggcttaaatatttttcttgttaacaagtcatttgtactccttggaatatgattccaataacatgaaccttggtatcaacttgttttgagaatatttgaaagtatttttacttaaaggatttttgaaacttaaataacgaattaacttgagctaattaattattttagaatttaaacctttcttggtaaataccacttgcttttaggatttttttgaacttaaatatttaattaacctgaattaattaatttatttaagtaaccagaatattttagttgtgttaacctgagttaaccatgatgcctggacttctatttttaagttaacctgaattaattgtgtaataaactaaattgattctaagtataataaggtagtggcttacttctagtcagggacggagccagcattaaatgtgaggggggccaaaaatatatttacacatgaggtttttttgttgaatttgcagtatttgattgttttgtatatttgtttttaagatattttgttctattttattagttagtagtgttgttttacttatttaaaatttttagttgtattaaacttgtaaggataatatctttataaagtattaaattattatgaattatgatatttagtttatatgtatttttctttatgtttttaagttaatattaaaattttcaagcaaatatctaattgaaaaattgatccaatccaattagtagttgggttgaatcagattagattttgaggtctaattcgattggatggaacgatgattttctaaatttaattactaattagattagattggattagaaaaaaaatattagattggatcggatgtccaaccgtagatattttgataccattttctaataaaaaaagaatttttattagtttttaatttccataaaaaaaataataaccataaactgttgtttaattagctagttctatatacatatatattattatttataaatttaataataaatgaaaaccaatgaatggcttacaaagaaaaactcactttttttttcgaaaaaagacactatttatatatatatagatataaatatattatggtctataaatatactctttttgtttcaatgttctttgattattttttttcattcactattataattgattaaggagtcacgtagtaactttccgtaaaaataaaactacatatataataagaacaaatattttgaactaggggggccagggccatcgtaaggtgctatatacctccgcccctgcttctagttctctgaggttctagttttgggcaatactccttacttttatacttggttaaatgctagattaatttcaaatgtaataaggtagtggctatttttggtttcctgaggttccagctttaggccatactccttacttttataattgtctttaaatttagttatttcttgtgaaagaggtataactttataatcgatataatgtatgttaccctcaagtgattaaaagttgagacttttgatacttgttaaatgataaaactttcaaagaccaaatatgaaatgaaaacttcctcttttattcagatacttcctgtcctgaggcgtacatggaaataaacactaaggtggcatttggttggaaggaatgaaaatataggaatgagaatgtgaataggaataggaatatgaatagaatggaataaaatttaaatgcataaaaaaattggtaaaaaaattattaaaacttttctcatcatgcattggaatggtcttttcttccattttaaaatggaatagtcattccactaaaatggtggaaagaccagtccattggaatgacattccaacacattaacatgcaactaaacaaaagaatggaatgaagattgtttcctttcctttccattccatttcattacctccaaccaaacgccacctaacataaaaagtaaagaaaaacaaaaaggaacctgaccagccctagtttactgatagtatcggtgcaggtgatcagtgttccatactcttggaattcttgttccatctagtcttttttaatggtaggttccatcaccaattttgtctataacttcatatgaaccttctcagtttagtcctatgacccccaccataggctccttactaaaaaaagaactttttaaagggcaattgttatacgcaaaattcggttggcacctcaatgaaggacacgtgtcaagataaagggaatgtaaattgatgccattgcttttatggaataactcattaatttcgtaagcatcagagtatatttataacctgctaactgtaaagtcttaggcgaggaatcaatgtataaactggaacttaatatattagcgaaaaaccatatgttgctaaatgcgaatagcgaggcaccaaagaaagcgactcgtatcaatcatggagatgcttagcgtacaataaacaaactaagtgtaaaagtcggatcggctcaagaacaagtaa

SEQ ID NO: 309504 - DNA, 657 bp, Cannabis indica
aaaataaattagagtgcatttcagaagcaataacttcaaaccgacatttgttagtctaaaaatctcccattttcttaataaaatttttgggattgatggcattagagagacaacgagctacgagaattttttttgtgttttggttagagtcattgagatcagcctcagtaaaagtatggaccatcttcttctccgacaaggctagggtggaactcatatcgttgataattgaatccataaacaaaaaaaatcagctagtgaaaaaatgaagcgaaggaacaaagcaaaaagactctgatcgtgagaataaataggcttcagaatgcacgaaagtaactgctacagagcactaaccccacttcggcatttcttatcttttaaaaaagaatttaaattcttatttattattattattattcttttttaatgaatattcttattttataagaaaatttacatggtgtactaacttttaccatttttttaaaaaatactgtcaggtggtatttttactttttactatgttttttataagtttcatacttcagtatactgtgttaagttttcacttgatgttctactgtatgttttttagtgttctactgttgttttaagttgttttgttttgtggtccactagtgttttataaaaatctaa

SEQ ID NO: 309505 - DNA, 928 bp, Cannabis indica
taaaattgcttggagaggtctccgctggacccattactcttagaagtctatcctcgataggcgactcgaagtgacagattaggaaccctgaggaataattactagaacagagcctaaacaaattccaaaaatcatgtccattcggagtcctaacaactccaaataggcgtatagaggatggacatcctaaaatttcatcttgcctggttcaaaccctaatttcaaaaccatacgtacgtggaaagttcataaagtttagatggacataccgtaactatttagacaataatagcactcccatgcaagaaattttttgacataatctagtccttgacatgtaaattctaaggacactgttttaccattcccatatattagatatttgagaccttgcttaaactaagcatttctatcctagatacaaaatagaaagattcaacagagcatcgagatacttacttggtatgtgagtgtaaaagaaaaggttattgtgaaaatttgcctagagctgtgtaccaagtcgatcacgcgattgaaattggcctgagcagcaaagtcctcatcaaacaaggggtggagtagttcaaggtttatcaacattatatctagaaattaagctgagcgaaggttcacgaaatattggattaaataatcaaaaacttcttacattcacctctggaaactgtcaccagatctagggttctttctcaaataagggatccggtttgaagtttgaaggaaaatggttcgaaaattccacaacagtgaaaaaaaagaaaaaatggatttgatgagtctatttatatttcagccaaattcttgcaatttgaaatgaacggtccatatcctctccaaaaagcataattcaatccaatggatgggaagttgaaaagatggcatttaaaacttgctcagggcattcattttt

SEQ ID NO: 309506 - DNA, 1963 bp, Cannabis indica
tggaggcatatacaactgtggccttttgcgtggtttatcttggaaactatgtataaggctaggtagtgagtccattatagtcaattatacagcttaggacttatgatgtgtcatattaagtgtacttaagacggtacttggtagttgatcgaccttgtacattgtgttttacctggaaggctaggtataaggctaggtagtgagtccaaggtgcaagtaaactatgttttggattatcatatctgttaaaccctgtatactaataaatctaggaatatatatttaatcacacaatcttgattactttccactgtgctgacgacacaataaacaagaacataaatgtgataaggatttggatgaatttagaaatcaaataaacaaataaatgataacatgaaccaaatgacacaataagtagtaaaaatacttctgtctctttattgatatttaaataatagagattacattgaaatggagttttatttagggcataaaaccgaaacactaagatcgtcatgacgcaaatggtaagccactgggtgagccttcagagcttgggctagatcatgtcctagaggagtcttctaagccaaagatactagatgcgagatcacagggagacagttgggtctcccttgcttttactctttttgatgaggcctttagcgagattcttgctagtggcttagtaggggatgtccactgtgagattccctacaggaattatcaggcgtacaggctccctataggtttgttaatgtggtcacattgagcatggggcagtgttaccgcttcatcagtattttctagacatcgctgcctacattgggatgtgcttgacacatttcacgtaaaaaagcatcaagtatcttttggtgatgttcttcctgtatagggagctaggctagtcttagtctaccccctacttgattggttactactttgatctaaagtcaacgccgaagcagaacacgacttgatatttttatttcagttaaatcagtctccaatggttgggtgacactaattgtacagccatgttgaaggtcagtgggagcgccagcctatggcctccgtaggatcgggcactacgaattctgggctattccattcttcaaacgttctatccatagggcaaactacatcccatctctttcagcagaatagagaaatataatatgtttgaccaatgtggtcatttctggaggtatggcttgtatcctcttgctcctagagttgtaagagcgctggttacagatggggcctgccctgaagatgggcaagctcctgtcttggatgataatgaggtacctttatctcacattgcacggaatttggagaagaaggaaaggcctctccgtcagtgactagccagcgggggtccagtaggtgatgcctctctccgtatcgggccaagaggctagccttctgagagacctactcgcctcgagcccatatctaggggcaagggcaaggctattgtcgaggactctgatagttcctcttctaatgacgatggtatttaatagttgataacaccatgcttttgtcttgtattgaatgtttaagattgctttatgactttgctactttctttttgcaagtatatctttcaggttgagaggttttactaggagaccttcagatgagcccacgagatgagtgagggccaaggtggccaagacttctcgtggtggagatgttgtcgggtcgtcattgcctccccctttaccagggcctgcactagttgggcaacctgtgatacgacctgcataccagggtactcggaggcctaacagaggagcagggtcaattgctaggcatatgctgaggcagtcaacaggcacattgagagaggtctccccttcatggatgaggatctgaaggaacttgacgatggtgagtcaaacaggctttactctattggtctaggttaatttcaaatttattaattatttaa

SEQ ID NO: 309507 - DNA, 1871 bp, Cannabis indica
tagtttttaaattattttatggttttttaatatgtttagatcaattatttttaaaaaagtaaaaaaatttaaaactatttcttctccttcattcaagtatcctacctgtctcacccccaacagtggaccaactgacctccgttcactagcgacacatccggtgactggcagttcaaacagaccatggatatgagatctccaccaccaaaactctaaaggatcgaacggattccaccgcaattggagatttagaaaccagtttactgaaaaatcgatttcataataaacaaatcttatatgagttttagtattcgtaactaacttattaatgttatgattacatggaagtaactgatttcttaattgattacctgaacagaattatttttaactgagttatttatcatgaaacgattttgataaattttgactacatagaaataaaatttatgtaattttttaagtgtttgatggtatttctttttatatgtatgataatttctctcatatttttaatatttttttaaatgttatatttagtagaattaagtttgtatattatagtagccataggcataatctaatagttctacaattaagtattaaattcaagattagttaggttagttaggactgttaaggatgttagttattttctgttattcaagttgttttactaaacaaccctttgtttactgctatatatagcagaccattgtatcccatttaatcaattctcaattgaataaaatcaaatagtttttcctctgtttaaatcctaatatggtatcagaagttcacctctgaagctccaagaaatcaaattgcagcttcatttttccaccgccattaaagcttcaagaactcaaattgcagcttctccaatggcaagaactcgggccaccttctctgctaccaccactgacaacgacactccagtggtcgatgcaccttccgctctgcaacacactgaattggcccctgaaactcaagttaatcctaatcctgttcctccaattaattcaatctctattcttctcattctttgcacgatcttcctgcatatgaggacattcgatccccatattaccttagcaatgcagatcaccctggtttagcattagccactcccgtcttaacagatcgcaatttctaaccatggaaacgcgactttaaactctccattggtgcaagaaataaaactccttttcttgatggcactttaccccaaccttccccaactgattctttgttcagttcttggaatcgatgtaaccaaatggttatgtcttcttggatattgcactctatttcaccagaaatcaaaagtagtatcatgtattttgatacagcttcagaaatgtggacaatgctcaataatcgtttcaatcaaggaaacagaccacgaatctttgagttaaatgaaactctcacataccttaaccaaggatctgaatctgtgagtgcttatttcactaagctcacgacaatatgggatgagattaatcaactcagaccccgaatcccttgcacctgtacagctgctacacaaaatcaagatcacttaaatcatgaccaagtccttcaatttcataaaggcctcaatgattcatatcatgccattcgagatcagatcttgttaattgatccttgtcctccattaaacaaggttttttctatggttattcatcaagaaagacaaaggacttaggcaatagaaccattccaccccttgctgcatcaacaaccactaatcccactgtttctgatccagcagcaaatcactcttccaaaaacaaaaggccacggcctcattgcacacattgccaaaaacctggtcactataaagataagtgctactttcttcatgg

SEQ ID NO: 309508 - DNA, 692 bp, Cannabis indica
tttttttggcaggtgaaactcatgtcatattcttttaggattttaaaatatatatagggagtcttttttagggtcggagtaatacttttatttttattaggcactgtgtatatttatctgggataaaaaaaataacagattttgggcaggtgaaactcatgccatattccctttttttttaaaaaatttaaatgatattatataatgttgttgtatttaaattttaaatgtttatataattttaaatattttacgtgttgaaaatagttgaaaataatttattatattcgtgtaattaaatatttgaattttatattcaccactttaaattaattaaaattttcctatttaatataactataaggtacatcatcatataaacaaaattattttataatttctctatatatcaaaaacaagaaatgctcataccgtaaaagtaaaactgattctctcattgtttaaaatagttctaatgattagggttcttcatataaatcgggaaactgcagtttaaattccgactactacaatctgaaccattgtaaaccgtaatcggggaaactgtttttagtagtttggtcaatccgaaccgtttacgtcgtaatggttcggttgcggttcgtaatatataattaacggttaaaccggaccggaccgtttataataaataattaatttatatatttttt

SEQ ID NO: 309509 - DNA, 3246 bp, Cannabis indica
taaaggttgtaaagttcttgggaacaataaaccaataatttgtgaaaaaggtgtgcatcaattgtgttttgaagtttggtgtcgcctgagtatggtggacttaatgaacaagatgaaggaagcaatgtggtgtttttggttgccttttagtaattttctagaagaaggttttgggagtagaagatccaaaagagagaaaacggtctcaaaaagaagaagccaaaaaaaaggtccccttcctagcctctacttgatgtatatataggctagagggtatgttagtgatccctcatacattaggataactcattaacaaatcccgtataccactcatttttatgaataaaatactacaaataaataaatatcaataacaatctccttgtatctaggtaaatatcccaccaatattggacaattggttattttcgattgacgatgcaccaatttgaaatggagtgctgaatacatgcattttggaatgctgattcttgcgcacaacgccaaatgggctgtggcagagtgctccaccaaccctcgcttagctacatttcccaattctcgagtaaaatgcattagctttccttgtaatctaattttggacccgataacttcaaaattgagtcatggttgacacactttgatccgtctcaaaattatcttttcaacacaagttgaaccaggtcgtttggataaaaagtaagggagctatgcctaattactgaaggtagtttatgctgtcttgtaccagttgcgagcactgccatggccaaatggcagatgtcggctatgcatgttctcggaccctttggggtgtgttttgacttttctttgacggtgagtcatattttggaggtttcgagacccaaaaacctcatttcgacgtccggaacccttcaaagtgaccactgccattagttgggtcaggataatggcacaggtcacccatggcttgtgggaagccatgggtgatgtctctcacttttatttggtacatggatcttgaaaatataatttggtcaataaattcctcttcctggtatggtaaccgacttgtgccacttcacaatggcattagtctctaattttgagagcactgccattctcttatggcacaagtcacccaaggcgattcctaggccaaaaatgactttccttacttgtttcttactccttgatatcgtgggaacccactcaaacaattttcctcccatagtttgcgatgagtcaccagtgccattctcttatggcacaggtcacctaaggcgactcctaggccggagatgacttctcaattgtcccttactccttgatgccgagggaacccgtttggacaattttcctcccatagtttgcgaggagtgacctgtgccattctaccatggcagaggtctccaaaattggagagcactgtcatttccttatggcacaggtcacctagggcgactcctaggacggaaatgacttttctcaattgtcacgtgctccttgatgtcaagggaacccattcaaacaaatttccttccatggttcgtgaggattgacctgcggcattctcatatggcataggtctccaaaactagagagcacaaccatttccttgtggcagtcgtcacttattcctcttttcttgttgttttagtgttattttgactttatagataaacccaagtcattttcatgcctaaacaagttccttattggttttctttgcagattgaggtctctagggcgaaaacactcgtgcgggcccatgaaccctagtttgggcacacttgggtgtgtgagtctctgtgccaaatggttggttgacgttttcgagccctctaaaagtgccatgggcccctcaaaaaggatgtcttgatttattttacatttatgagtcttggtcaaagtcttaaggttgactttagtgtcttcaaggtactcttggcatgtgggcccttgtacaataatagccattttttttttttttacgaaaattgggtataacagactatataagaagtgtacttcagctgatttaatcaagcaattcaaaaggaaatcaaaagcattaaatggagtacaaattttagagatcgaattcaatactggagaccttttttaaagggttttcaacattctttttgttaacgcaggtttttgttaactaaaattaatgagcctttacataataaatatatcacagaaataataataaatgattaaataactccaaatattttagtcaagaatcacaatgaaggcaaaaattgaatccttttcgtaaagaaatcacacattatgcattctacaactatcatacaaatcaaaataccataaagactaaaatctaacgtgagaatcaaaaactttctaaaaaggttaaaaagcttgaaacttatcattggtagattcaaagaagagacgtcgaagaaaataagatgaggcatatatggaaaaagaagatcaacaatctaaatcatgccatgcaaaaagccagtatttggctagacaaggttgcacgacaaaagatacaataggcaagatgagagctacaaagtccctatctgacaagatgttcaaacaaggacttgagggacaaatgttagcccaaatttttgtcacctgatgtggtacgtccacatcagccaagactgagaatgtgtggaatgcagccttgtcaatagcaggacaaagtctccttataaggcatggcaaaaccgtgagcaataagagaaaggattgaagcaagccattaaaaagctggacaaccatgtctatctggccaagggaagtacataggctggccaggagaaacttgtatggccggccaagctggccagccaaagagtgactgacagagccaaacaggcctgttcaaccaaggaagctaacctttgtaaggaaaactgtataaaggttggccaacacactttaaggctggccaacacatgctaaggctggccaacactttccaaagttggcaggcacttggcgtgcagcctggaggctaggaggcacgtagcgtgcagcttggaggctagcaagcacttggcgtgcagcctagagattggtaggaacttggcgtgcagtctgcaagctggcaggcacttggcgtgcagtctgcaagctggcaggaacttggcgtgtagcctgcaactggcaagcacttggcgtgtagcctacacctggcagtcacttggtgtgcagccttcattcatgacaacaagccaagatttgggcttcaacaacccataaaaa

SEQ ID NO: 309510 - DNA, 634 bp, Cannabis indica
acgatgcaaacctccatttttgctcttttttaattgcccaactcaaccaagtagtgtcatagaaatacaataaggatgccatcacttaagtctctcttatttttgctcttttttaattgcccacccgagttttcgtcccatgctacaacaggaggttgtgttgatggggttgtggttggggattgtgcattgtttattcttaataccaaacaacagttactatcatctccttccattctaaattctccaaacaattcttattttatagaagacttcaagtacaagtataagttttagggttatcatggcccaaaagttcacgttttagacaatcattcttttataataactttgtttgtttcagttggcgtggaagagagcccataagattggagggattgaaataagttggtaattaagaacattgccattgttgtgttggggcaatgacttatagacccatagatgggaacactgagcatatcccaaacactaactactacctttggttctgtttctcacctactattcaaccttcacattcctagggttcctcttccacgctgcaaacaaccattttttatatttttgtcccgtgtttcccgacaataaaagttggctggtaagtaagctc

SEQ ID NO: 309511 - DNA, 551 bp, Cannabis indica
aaggaaaaaacttgttgaaatataccctgaaaagaagaacattttcaaaatttaaattagggggcgattttaaccaatttgaacgcgaaatcaatcttcatattcatgtcttagtattatgaattcactataattaatgcgaaaaaatattttgggatgagtccgggctaaattccacaaataggtaccactatcagaaataagagatttttactatttcaattaaaataattgttagttctttaaaataatattttctctcaatataactaatagaaaagtgttggaaaacaatcttggcttgaaatttcataatttttttagatgtgtagggtgagatttcaagagaatactaacgagtgtaagagtatggaaaaaacttattgaaatttatcctaaagataaaaacattttcaatatttgaattagggggaaattttaactaaatttaacgtgaaactaatcttcatattcacgtcttagtattacaaatttattgtcaccaatgcggaaaaatattttgagatgggtccaggccacatttcacaaag

SEQ ID NO: 309512 - DNA, 2211 bp, Cannabis indica
ctctgtttgtgtatctcatgttaagcgagatgctaaccaagctgctcatggcttggctaaacaagctttggtgttggatgatgagtgtatctggtttgaggaaattccctctaccatctgctttgttgttgtaaatgactccctctaatttataataacagtttttttctaaaaaaaaaaaattaatattacatatatattccacctcattttatctcatatatctataaaattatttgtgataatattttatcaatatttgacagtattttaatttagcaaaaaaaaaattcatcttactattttatctttatgaatatatatatattttaaaataaataaaaaaaaatatttgcactgaaatttttttaatgtttataattattacacataattttaataaaagaaagtgatggcaaaagaaatttattttacaatatgttgcaatcctattttttttttgtttcattaagtgtcaattcaaaaaatatgtgataatatattattggattatatattaaataggttaaaaaaaatatgttattacgtatttttaagctagaacttaatgagtttaattgatacttaatagttaaaaaaatatatatgactgtaataaaatcgtaaattaaaatatttttactgttttttttattaaaattatgtataacaattataaatattaaaagagtttcgttgtacttcggttagaaaatcaaacttgttgagttggtaagaacagttacgagtacggcgattatataaaatttgtctgttagttgtttttttatattttattgttgttttatgtcttgttcaataaatagatgttacttttaaagttaactaacaattaacttcccctacaatttgaatcgagatccacgtaagaatttaatattataatatattttcgtaaaacacgactctcgtttcatattcacgaagacagttaaaaaaaataataataataataaaataatattataaagtgtcaataattattatcactgaaaatttcatcaccaataaaagacaaaaaaaagtaaagtataaccataaattggcgccaccgttcgcacctaatccaattaaacaccttcaacttcaatcaaccttccattttggataagtgagcgtatacaaagagctcactaacgccgtgtacgacggctccgtcatctaaacaacaaattcgaaattattaaaaaagaaaagcttttgtttggattttggatccaacaaccctctcgaacgcatcgccaactctaacggcaaagaaacgtaggacgtttatatagggtttaggtattgggagcaactcacgtgccaagtgtcaagacagaagcgccacgtaagcatgcataaatccatgaaacattatcagttgggttggtcacgcgtatgacttctttgctaacaccgcttcacaacactactacttctgtgggtactgttattaccaaattggccaaacctcgttttacacttttgcccttctttttcacacaaataacttttttaatattattattataaaattgttaaaaaatattattggttcttatcattttttcttgtgtcttactattataagtagtgtaatttctttcaaaaaaaaaaaagtagtgtaattaaaaaacgtgtctcatataattttagattataattatactcttattattaggccaattatattttgaagttttttttatttttatactttaaaatattcttttttgtattttatcaaattttacataaaaactcttattgcaactagcgccgcaacctaaatttcaacaaaaaatcgtatagaaacttttattccaactagcgctgcaactattttagaaactcaaattataaatttaaaaaaaaattaaaaaaaatagtatataaaataatttcctttatatttttatctttaaattttaatgtataaaaaaaacttatatctataaattattaaaattgttaaatttattttttaataaagaaagtgatgaaagttgaaagttgaatttagtacgtacaaaaatataatttattatataaacaatcacataaattaaatgaaacaaaacaaaaaagagaaatttataatgattagtacatgtcaaaattcacttgaaacattttaattagcctattattattgttgtcggaatatttataaaataaaatgaataatttttttatttattatta

SEQ ID NO: 309513 - DNA, 1746 bp, Cannabis indica
cttaattgtgaagaaagagttttagagtttatatgttaattgagaggctttgttaagtctaattaataaataagctaaatagaaattttatttgataattaattttaattattaaataaatagttagacatttaaagggttaaaattggaaattatgacattagtgaaagaaaagataaattataaaattggaaaattctaactaatggggcccaacctatggtcgaccacctaaggagaatttttagccaatttcatcttttttaattccatataatttaaatctaaccctaagagaaatcctatataaggaataagatggttctaattctcatccaacctaacattctaggtttctaactttgtcaaacaactacaaaattgagagcctccttctatagatttcgaattctcatctctttctcttcatatatttcgaatagtgaaagagtacatgcctacccatagcaagtcaattgtactcaatcagtctgaaatactgtgatgaatccaacacctgaaggaaaaccagactcagatcttgttaatactctctgacaaaaagaaacaagagttagagatctgagtggaaggaaacatattattccgctgccaccaatgtaagattttctaaactttatacgtgtttaattctattattttagagaattcatatttaaagtgttaatcaacatacatgttagtaaatctagatcttggtaaaataatccctaacatttgcgagatcgcactgatcctgcttgataaaaaggtatcctagccttttcataaatgtttgaataacgcaagagttctgatagaaaaattagatgtccatatgtgaaatgcatcaaccttaaatgacacattccaaaggatgtgtgtggacacatattctgatggggttttcaaactagttaccagtagtggactttccttggagaagcagaagttactatagtagatgatgtaatcaatgtgaatgatacagatgagaagcgtgatgtcatcgatgatgtcttttctccagcacgcgatgaaaatatacctatgttgagggaaattgtatgtgcaagtattagaacgagttgtttaaggagattaaaacggagttgtttccaggttacaactggatatcttcactcaacttcattgctaagtagatgcatttgaaagttgttggtgaaatatgaaacaacatattcgataaattattgagtttgttaaaattttcatttcaaaaagggaatacaattcttagaacccattacaaagttaaaaagaagcttagcaaattgggttttgaattccagtcaatccatgtgtgttactatgattgtaacgtcctacttgcttaggaaagctacagtgattttctagttattgtgtacacctttgttagtcaaaatgtttctcaaaaaatgtggcaaattaaaatattttaattaaaatttaactttaataaatacataactttacataataattggaatcccgtataaaagtttacaatagtgtccaaaatatgcttttacataagtgtcgctctgcgactacaaaacgtaagcccatgttgtcccaaaactgaacattccaagcttaatcgtcctaatatgtacaaacatcctcaagttctgcactcattgatgcttaaccttcgcctttcctttacctatatatgcaaatatatatgtgagtcaacacactcagtaagaaatgcataaaacatatattaccaacttgtat

SEQ ID NO: 309514 - DNA, 877 bp, Cannabis indica
tttttttttttttttttttttaattttagcaaaatggccaaatagaataaattagataatgaaaattatgaaattgcttttatttcatgttaacttttaaaaaatttatatattgataaaattagaggagttattttatatattattttttaatttttattttatttttacagtttgggttgttctgttggtttttatataagttatgtggatttgagttgtgatttaggctgtttcgttgctatgtggatttttataatgtaaaaatttgttttgaaatgtaaaaataaaaaaatctttaaaattatgttagataaatttggtagtatagtatattaatttattgtaattacaaaataaatatattatattaaatttatacaatatacaatgtagtaataaaattatatactaaaaaaaataaattctaacaaaaataaaattattatattaatacttaaaaattatatacatagctaaaaaaattatatatattggtattaaaatgtataccatgccaaaaacaattgttagtaaggaatcatgttttttttattagacaaaatttgaagctcctacaaaagagaaaatacaataaaaaaaaaaaatgagatgtcatttatcacttttaaagtctcatttatataaatatattaattgactgattttaagattctaaaattgaaagtttttttaaaaaagttcatacatatatatactagtaaaataaaacagtaaatgagatcataacacttttttgtggacatgacacttcaggataaatagatagagcaagtgaatgagggacgtggttaattttattttaataagccgttgtaaaataaatagcttaaaataagcagctgtaaaataagta

SEQ ID NO: 309515 - DNA, 555 bp, Cannabis indica
ggacagggacagggggagggccccgtgttggaatagctaatctcatctcaccatatttaagaaagctgtacctattatgtaatgaccgaccatgaggtctagtttgtttatttaatggtacgaatacgtttaattaaaaaaaaaaagaaaagaaagaaagctagtacctaaaaaaccaatcaaatcttctccttctttttttactttaaaaaaccacttgcattgcaatgcatgcaaacccatctcacctaataaagtccaaaaacattgaaactacacatgcacaacagtttcctttttctttttttgtttcgttttgagattatatattattttgcaaagcaaaggttggaaatttgagcaattgggttgaagtcaatatcagtgtcggtgaaggtgaaggtgtcgcattcatttgttttccaaacatcgtcgactcctcgcattgaaatttagagaaaagaacaggccccaatttgaagataggacatgatcccaaagaaatatctggaagaactatatatatatatataagcaacttatctacttgcaatg

SEQ ID NO: 309516 - DNA, 2283 bp, Cannabis indica
aataatttccaacataactttcagaacccatttagagcttattacccttttgttgacaggtcttggaaccataatccatgttttatttctgatgaaggagttcatttcctcactcatggctttgttccattttgatgcctccttgcttgacattgcttctgcatatgtcttaagttttgttccatttggatgttctcttctctctatctcttgttagtaggtagtcctgaacaccagtcataacttcccgatctagttcatcatgttccacttgatcttgactcaccatttgttccacctgaacctgatcttgttcttgttagtttgcagtgttatcttctgcattactctcacttgtttgaatttgattttcaatgcttcctgcagggttagtattctttgcaaaattttcaacatttatagatttcaaacaatgaaattcatcttctttaaaaataacatctctattatttattgttttaaaaccaggttcattactaagccaaattctatacctttcacaccttggggatagcccaagaatataccttttacagatattggttgtaattttccttcactttggtgtgcatatgcaatgcaaaactcttagatttgataggtttggatgatgtccaggtgttagtagcttgattgttgtagaaaagcttctattcaccaaataagcagttgtcataagtgcttctcccaagaatggtttagcaagacctgagctaagtaacatgcatctcattttgtttagcaaagttctattcattctctcagctaccccctttgttggggagtaattcttactgttttgtgtctctgtacaccatgatttttacaaaatccatcaaactctccactacaaaactcaagaccattgtcaatcctcaaagttttaatttttttttctgtcaaattttctattaacattttccattgtttgaatttttctaaagctcgattttagtttttaataaaaatacccaaacctttctagaaaaatcatcaacaactgagagaaagtatgagttatctccatgtgtaggtattttttcttgtccccataggtcagcatgtatgtagtctaggattccctttgaacaatgctttccaatactgaagctcaatctgtgttgttttcccaaaatgcaactttcacaaaatttcactttgctgattttgtccattccaagtagtccttgatcatgaattacattaagtccattgctactgatgtgtcccatcctcctatgccacagtattgcatttgcatcccactgtttgctgctagagagagttcacgtgtcacagtctcttcaatcaaatagtacatgccatttcttttctctccttttatcatcaccatattgaacctttgctaatcttcataactccattttcaaaatactctacatcatcaagtgtaccaacataaattaagtttttagttaggttaggtacatacttgacattctttagaattctaatagctccattaatcattctgaaatggatatctcccaagccttcaactgcacatgtgctgttgtcaccaagaattactttcccaccatgtgtagttctgaattcccttagcaattctttgttgtaggtcatgtgaaatgtacaactcaaatccaagatccaatgttcatttggagctgatgctgcagcaagtaggacttcccctgaatcatagccatcaccatagttggctgagtcttgtgattctgatatgttattggattgattttagtagtctttcttgtatttctaactttgatttctgttcttgttgaagtaacaatccattttataatgccctacttttccacatgtataacatccttttccatctttgtttgagtcatttgagtttgatctcctattcttgtaatttcatggagagttggaacaggccagtttcttagtcggtaaaagataatgaagatggcaacgattttatagccatttgggtttatttggtaaggacagactccaaaaaaattagctatggatatgaaccatggatgcaagggtaagtaagcactcacattcatatggaatcttgaccaagcactacaacaaagcaagtgttctaggagccattgggaccaccatatcgtggcttactgatgacatttccaggaagacataatcatatcgtattaattgagcgtcatattcagcaagagtgctaacacaagaggtcttacctgttggagatattttaccaagatttagatttactaacaagtatgtttcattaacatc

SEQ ID NO: 309517 - DNA, 1371 bp, Cannabis indica
ttgccattgccaaaatttaaaaataatgatacataatgaaatatcatttacggaaaggccgcaccttatgaagatttccagcatggaaacttgcgatttgcgcaagcttgatcaacagggaatagagcccctttacagacaatgcaagtgaaggtaccaatggcctcaaagtttgaaaagcatccctaattctcaaataataagactgatatatagcttgtccatggataggagatatttccatcttggtgtctccttcccttgccagagcatcggtcattgcagctacatctttagacagcactgtttcaaggggaagaagtattgtatttgcctgcgaaataataaaatatatggtcacaaggagattaacaatacatatttgatcagtgctatcaagctcagcacattaccgcagaaccatttaaactgaaaccttcaaatcaataagacatatatatatatatagagagagagagagagagagagaaacctttgaaagattttccataagagaatggtgtactccagctgcgtcctttcccagattatgaacatcatgaagatcttccgttattgccaagacctataaatatttatcaaaacaaaaaaggttacccaacatagagagcaccaataaaacttataatagtactgaaaatattgctagtaataaacagaacattaagagatgtttaaaaatacaaaaacaaaatacaatagacaatggaaaatgaaagctttaatagagaagcagttcttcaatgaccttgtggggtaccccaaaatagaaaaggaaatcgaaatggtaaacaatagaaaggatattatagaaaattaaagagaaatacaataataactgggtattcgagaggctcagcactctcccaagagccaaggctcgcttacaatattatcatatcccaccattcttctaccccaaaaattataccatcttacaatgacctatacaccctttttatttactatattcaataatctcagggtctatctcgttgttttatagataccctcacttacaatataattcttatcatatcccacactcattcttctaccccaatatttatactatcttacaatgacccatataccctttttatttactatgatctataatcccagggtctatcaccttttatagagaatttggccctaaaaccagcagcaaggcaaataaataactaagatgtaattgttgctttaagattattcttataaagaaaagtaaacctgaatgtgatgttcaaaaattattgaatgcaaaataaaataaaccttgaatcaattggtaaatggaaaaaagtgagatatcaagagatagatattgaatttgtagacatcaaaagc

SEQ ID NO: 309518 - DNA, 4572 bp, Cannabis indica
aaaaaattagtaaaaatagaaagaaaaaaaagttaaaaataatatatgggatgatattttctttttttttttctattatttgaaattatcccatgtacaatattttttttgggtgcttctaaaatactctccactggaaatggtacactggtgcaattcctaactattttggtatctagaagattttcttagttcaagtttttttcacaatcgtgtacatagttatttaagacattctacaaaaattgagaaattcagaataatttacaatataagaatcaatgttcaaacagtttatttcacatgcgtataaaataaaataaaaatgtaaaaaaagtcatgcgtgcaacaggctctttaaaccttattttcgacgtgttaaatttttctcaatttcttaaaattttgtcagatttcttaattaactacaacgtgaccataaaaaaaaatttggaataattattttttttagataccgaaattgataagggtgcatcggtaaacccatttcatggaaggtattgtagaatttttcatttttttatcagcaaaaacaaaaacataaaatatttatttttgggtgtttctatagtgcacactcctgaaaagagagaattacttcacaaatatacaaacataataaaaaaaataaaaaaaaaatatatggttgtacggaattttaaataattttacgatttttatgattttatttacaaaaaatgcggtatttttatgttgtactcttgttaatttgttgttgattttttgttatttgtatgttattttatgttgttattttcctgttatttttatgtagctttcttgttattttagtgttgtttttatagagcaccgtaagaaatgtaaaaaaaaaaaaaaatcattgaacgtaaaaatataaaaaaatttacaaaaaatagtgcattatataattatccctaaaaagagtatgtcaatgtgtatgtaattagttcaaaaaaaagatatcgatgcaccccttatttattttaacatcggaaaaaaaaaattaatctaatttttttatagtcatatacgttataattatttagaacatcacgtaaaattttaagaaattcgaaataatttacaatatagaaagtaatgttcaagtagtctatttcacacgcgtataaaataaaatagtcatgcgtgcaacagactgtttaattaaaccctatttttggtgtattaaacttctctaaaaatcttaaaattttgcaagatattttaaataactataacatataactatgtaacaaatttgactaaaaaattctcttaggtgccaaaataaatagtgatacatcaatatatattttttagaagagtgtatggtaaaatctccttttactttttggtatggaaaatatacaatattttcaacaaaagaaaatttaaatataagtacaaattttaaaaatatttaatatatttacgatcaaaataaaatacatatattttttattttaaaatattgtattttaatgcgtaatcaaaaaaaaaatgtctaactctatgcatgaacttggcataaaaacttattttatagttaataagaataaataaatgatatttgaatgatggttcattaaaatttgttttgaaacaaatagtgtgtaatgatagttttgtgatgatttacgattaaatttgattaaaacttggttttgtgatgatttacgattaaatttgattaaaacttggtgtctttaaaagtttttattttagctgaataataaaaagaaaatactattatattttagcatcaaaatagtattttttttaagggaaatttgtggtataaataccatatgttttcaattttatacacttaaatataattttttttggtggatttaataccaaacgttgtattttaagtctctctgttactactattatgttagttgtgattaagtgtagacccaaattaaatccctatttttttaaatgcttagttaaaattaaaaacttaactttttaatccaatatatttaacttaaatttaattttcataaaattattttaataaattaaaataaaaaaaaaaacaggaatacaaatcaatcatccaaataatcctaaatctcatcctttcttcttcttctttcttcttgctgccttacaggcagtcaagtacaataggaaaatcaaataatgactctgctacttttcttcttttcttctttctttctatatattttgcagagaatgggagcctaagattcttaaaggaaaaaacaagaagaagaagatgaagctcagtctgaaggctttccttgagctttcactatggttattgtcggtttggtctgggtgaaaacgtaacgtggcagcgaagagtgcgaaatcggcggctgagagggcgaagagggtatggcggagaaggtcgtgattgcggcggagatcggagaagataggggagaggaggagacgggtccagcgacggcagacgagggagagattgggtatggaggagggtgggacacgagagaggcaatcgatgaagatgtcatctgggagggaagagatattggaagagaggcagttgttttattttagttgttttatttttgtacttgactgcttgtaatttttttgtattttttttggttgaagatggaagcatgaagaagaagaagagatgagatttaggattatttgagatgattgattggtattcctatttgctttttaattttaattcattaaaataattttacgaaaattaaatttaagttagatatattagattaaaaagttaagttttttattttaactaaacatttaaaaaaaaatagagatttaatctgggtcttacacgtgtacacttagtcacaattaacagaatagtggtaacggagaggcctaaaaacaacgtttggtattaaatccgctaaaaaaaaaatatagtatttaagtgtataaaattgaaaacatatggtatttatgccgcaaatttttctttttttttttattagttttgggttttctccattaaaaattaacatttagttagagttatattataaaaattgtaactatagagtatacccaatagttataatcgtagttttttttagttgtggctaaggaaaaggaactgcattaaagtcctatagcgtcatttatttcataataattgccgtcatagatgcacataatgtttgatgcatgtcatctatgggggcaattattttgaagtaactgacgcgataagactttataacctcgactgtcgtcacttctcttcatcgtcttcatttttcatttcagcaaaccacagtccaaaatccacgaaaccctcatcgaacaaccctctttaagccattttggctcattttttttttttaaaaaaatctcattttcaatacctaaaaacacattgccggtattagattgtttttttttagtgttttagtataaaagaagcttttgaggtggcggttgtggtggttgtagctctagcaaccagtattaaaggagaaaacgttgaatctcaatgtccattaaagtaaaaatctaatctttagtaattttattaaagtagattgcattattttttattttgtaaaattttttatggctatagtttgtggaagattgtgagttcattgggttgtggtagtggtcaaatttgtggttggtattagtggtagattttggtaataagataaaaatataatctttaatagttttgttataatttttttttggattggaatgattttttgattagtgaatgtgtttgtgttaaactaacagtttgttataaatgtatgatttttctttaatattagtatgttaaatattgtgattaaaaaaggaaaagagagattgtgaataagataagagggtattaaaacaaaagtttagaaattaatttctaaaaaatatatgagtaagatataatattaatatgttattttttgttccttacaaaatatatgtaaaggtattttataatataagatgaggaagccctcagatgggcaaaggagaagaaatggattagcctaaagggcaaatctcatagcatgctcattattcaatcaatccgtagtgatcaacaaatgttatctatttttggttttgattattactgattgtaaaattttactttcctctctacttaatgttcagttaagtttcattagacgatcaacaaatcaagttgctcattatgtggctagacactctcgatttctctctggtcgtagtcgtagcattcctgattataatgttccaagttattttaagtatccttttgtattttagaatgctagatttcaatgaagttgatattttatttttaaattatatatatatatatatatatatatatataagatgagaaaaataagttaattcttctatcaatttttctttgtgcatattagacttaattccatttttcttccttttttatattatttttattcatatgtttttaatttttatttttttactagctagtaactagtttttttttttttttcttgaatagctagtatttagtaattaattttcattcatattggtgtgttttat

SEQ ID NO: 309519 - DNA, 1125 bp, Cannabis indica
aggagtatagtgatgttactccagattttaatcatataatcattatggattgcaattaataaagatgttgattttatttcaaaaaaaaaatggtattaaccctttattttaggctaatttataattatgtattgatgagtgctactattaacccactattataacttcttggtcaatctttgtgcttgaaaacatatgctgagatattttttttaaaatttttatggcggtgttcgttatagttataacatcatccttgaaattttttgaaaaattctgaataatttatggtggtcaaaataggtttgaagtttttcgaacacacatagtaaaatactactatgaaaaaaaaaatattttagcatatgatttctggtgtagaggttaactaaaaagttgtaataggagattgtatttagtattatttttaagtatttttctttattttttctctgaactttgatacgtactaattgtaccttccaattttttttttatttttttttgtttttaaattgttgaataatttttcgaattattgagattgttagattcaaaatttttttatctaattctgttaaattttacaaagagaaatatgacgtgaatagaaatttaagaacacgattttatacacgtcaaagttaagggcgtaattttgtacatgaatagtcatcatgttaggcatctgttagtaaaataagactaaaatgttcgaattcaacaatctcaatagtttggataaatttttaatgatctcaaagttttgcagtacactattaaatgtcaaaattcagaaaaaaaaatttaattaccgagggtcttgtcattttcaagaagtgttattctagtaattatactgttaattctaaacaattccttaataataattattaaaaattattaatcatttataaaaggtcatttataataatattggtctatttatttcttagagtaattggcggcaaaacctccccaactatcaatttacttgcaaaaaaccatccaacctcatattttggtggtaaaaccctccaaagtgcacttccgtttacatttttaaggtaccgtcagtctgacctcgttaagccctaattttgcccacgtggcaatgacagatca

SEQ ID NO: 309520 - DNA, 1369 bp, Cannabis indica
ttctgtctttctgcaagtgttttcagacaagtcgacagggtatagtcacaattaggtattttgggccgaaccgggttcggggcccaaaatacatttttgagatttatttatggcatttatatgataagtgagaaaatgtgataaatgtgatatgtatgtttgagctaaatgtcaaaattatcctttttatatgtatatggcaatatatgggccttaggggcattttggtcttttgaccaattagttaatttttaacaaaatagcttttcagcaaaaattagattcatcttttaggttttagcaaccccaaaccgcctctctcttccttccttcccattttgtgataactttgttgaatttggaggaaagagctcttgcttggtactagaggactttgagtaacttgttttgacctattttattagtttctaattctgattttcaaagcttgttagttgttgttcatggtgttcttgaggttgttaattattatggatgcatgtttatgaaaattaagtaaataaatggtgcttttagtttgtttatgctttagtgttatacttgatgcatcttgaatgttttgtgggagtttggagtggaattttgatgttcaaattctagaaaaatacttaaatttctaggtatttgctttgaatatttgagttgtgctttgaatgtttgaagtttcaaagcttatgagatttttgtgcaaggtgtggttgtgtaacatgctttagatatgttttggtattgtcttgagcttgttttaagcttaaaatttgttgtgattattggataggtatgatgtggttttgaatttaagattgggtttggttaagttttgggtatgaaattggttgaaaatcgaatgtatgaaaatttgacatttttggggttccagggcccgtcgctgcggccacggcttggctcgccgtggcaaggcctagcaggttggggccgcggccgcgaggccctgtttctcctagggattttttgttttctcgtttttgccataacttttcactcgaaacttcgtttttgacgttcttgatatcgttggaaagcttgtttcaggctttatatgctaatctattaatggaattcaaattatgcatatgtgtaaaattaaatttgggattaatcctatttgtaaaatcccaagaacatgtgactaggattaccaatgcttgcttaggaagactcgggatttgaaatctccacatacttggattactaggtgagatagtgaaatagcacatacagattagcgcggtggcacctatgtatgttattttgtgtatgttaagggaaaaaccagatttagggttattaccctaaaagttagcggttattgttgggttttgtgccc

SEQ ID NO: 309521 - DNA, 1798 bp, Cannabis indica
aatataacccttagggttaagtattgtatataaaaagggtaatatgtgtttagtatgaaaatagagagggtgtgtggtgaaaagaaaagggttgctctcataggttctcttctaccaatttggtgttcattctcattgaaggttttggtgtcttagcaataaaatggagaatagcaatatgggaggtatgtgttttacatttgtgatgctctaaataaagtattgattttggttttaatgattatgaacaatgatgtttaatgtatatttagatagttcataatctatgtgaagtttaacaatacttatatgtgacttaatagaagtgttggggattaattattttatttatttagcatgaataaccaagcagtttaggtggcactagaggatggacttgggcaattgatgtgaaattatataatagttaataaaaagtgtcttatgaattggtcaaacacgtgtgctaagctaacaattaaaatacatattttatttaggatatttaatttaagatgtacctgtgaatatctaaggtagttactaaatttatggtgattaagagaataaattattaaattagtcacaggtgttgtgtatgatggtggaattgataatggaaattacgttcatcgtgtctagtcactattttagattattaaaaagagtataacaatattataaattatgatagcataagagttgagttaccaagtcgtccttttaggttttatttttttgaaaaagactacagagaccaagagagaggagaatgagaaaacgaggagagccttgaatcgctagagtgatcagctaggattggataaacataaacaaatttggagatagcaaacttgaagatggtacgtacatggagtaattttgggtttttaagggcatagacgcaatcacaatactcactagaagaaaacattatttaaagactcaaggtaaggaaattaggtaattttattatcaactgcatgattaatggatttgattatatcattaatagcatatatttgattgtaaatttgaatatgattattgaatgtactcattgtttgttgattgatttcaatacaaccatggttggtaatggccattggatagattgtggcccaaatattggccattggatagaccgtggtccaagtagtgatcattgaatagaccatcgttcaagaaatgaccattggatagacctcgcgtatgagaatatatgtgtggggtgtgttgtatgtgactataattttctctatatggattgtggtataaaactaactttacatgaagtaaagtatgtatatgtataattatgtgttaaataggaattctttctgcgtaatcatttgactatgaattaaagaggcatgtatcatattactagccttctggtatattgtatttactgtgtgtgatactatagtattgtcatgatattaatctgatatgttgtacttgttggtgttgtaccaattctatagcattaatctgatatgttgcacttgttggtgttgtagcatttctatagcattgatatgatatgttgtgtttattatctaatgttgtcgcattgttgtggcactaatttatttggttgttttgttgaaatagatgttatagtattttatgtagtatctgtgttgttggtttgtagtattgtaacacatagaattatatggaacatatttgggtgaaatgaaattaaaaaggaaatatctcatgatttggcatgtaaaatttaactacaagattataaataacattcctcttctcatttgttaaaaaaaaaaaa

SEQ ID NO: 309522 - DNA, 1115 bp, Cannabis indica
aaagaaaaaatgtcatattctacgttcccacaacatatcccataaagatcaaggtagcctattacacagagactgagcttgtctcttcctcagggcaaattcagtttaagtcattaagcaaggccctttatactgaaatatattctttttatcatcatttatatatataaaaaatatttctttttataatgtttagtatacgtaatatatttcataatagcaaatatgcatttacaagaaaaataaaataacttcattgtgatctcaatacacattattttaaaaggaataattagatgagatactattttttttgtaaaaaaattatatttttatgtttaaagaatttttttctttacatttttatagtttttcataaaaataacacaaaaacaacaagaaaactacataaacgcaacatgaaaataacatcaaaacaacaataaaaaataatatacaaataataaaaaatcaacaataaattaacaatagtataacatgaaaagactgcattttctgtaaataaaattaaaaaaattgtaaaaatatttaaaattcggtaaactcgtatttttgtaattcttttgttatttttgtgtatttgtgaaataatctcattctaaaattcttatatattttaaaattaataaagtatttttttattttttaaaaattaaatttgtgaaatattgattaattttttataaaataaaaaacaattttaattttttggcgaagactccaaactgcttggcggccctgcttttccaaacggaagaagccatccaaatctgcaattggtcataagtctaaggtgacggacctaccccaccatgatttgggtataaacaagaaagattaacaaatggtaaaagagagaaaagagaagagaaatgtaagtaaatgaccctatttttaattttatagatagttattgttcattttttaaaataataaaagaaatgttcttttttactttttaatacctaaaatacccttcattatataaaatgtattatatgttttattcctttaatagaaattatgaaaaacaataaatcaaaacttctttactgaatttttgtgaattattttttcattatataaaaggtatt

SEQ ID NO: 309523 - DNA, 1566 bp, Cannabis indica
gatagttggtaccctaaacaccacgtccagttgagctgtaatagttcttattttgggatcactagtcaatacaacactaactttgatagggctagatgttcttattgggacatgactccacttaatccatttgaccttttcacgactactagttctagggaatttattaattattatagcacttcttcctcgtctgatgattatggtaatatgcttaagtgggagattaactcaccctatttttttttctgttttatttatacaagtgttgatgtttcatgtcttgtctcgcagatatggacttcaaagatctcttttgcagcccttcaggttctaataagaaaagcaagaaacgtactgccacgtcggaaactgcctctgggtcaaacccagaacatttgaagaggataaaaaagtctgccagcaagaaatgtgcctcgactcaacttgtaattgagcaagagaagaccccagacacttcctcgacacgtgttgctgcaagcactggtgaacaagctttagggtgagttcatcaagttaaattctctggatctcaaaccaagatggtactcttggagccctcttgccccctaccaacctttgcatgtattgagggttcgcaaatatgctcgtagtacgctaccacttgtttgcgccactataagtcctttcaataggatgattaagagccgatcaacagaggcaacttctaaagtcttacaccgaggagtgttgatctcttacttttggttagtcggcctccctttttcttgtttttttttacttggaatttgcttatcttacatatatccttctcttatataccctctcttttgacttcgttcttcgcatgcttcttttctatcccacgcggctcaacaaaggggcctctagactgtcaaccaacttagcatcaaactttgcaggtctaatgaacaacgcgaagcttttgcaaagcaatggaatgactcccagtcagagatttctttgttgaaaaagaaggctgaagaacaagagaaagctcataaggctaaacttgaggctacctagaataaagccaaggatctcctcgagactaaccagaagacccaagaagcgcttgatgaagctaacaagaaactcaaagaagtcgaggctaatgctaaggctagagtaaacttgattgccaagcaatcaatttatcgagcttggatgacaaatcctaatatgaatttaagcttcttgggtgctggagccgatgagatgcttgctttctgagagcaaataaaaaaggatgaagttgaggatgctgaagaggttgaagtcgaagaagaagaagtactcactaagtctccaaccatgtaggcttagtttttatcattttaacttacaatcaatggccattaggccgagacaatattttgccccttgtggcagttttgtaatataaatttaaacttgctttgttggatggccaacatagctatatatatatattttcttttatgccattttatcgtgcttttcttgagttgccaatgtttatttattgtgtttttttttttcacaacaaaacatttttctcga

SEQ ID NO: 309524 - DNA, 1869 bp, Cannabis indica
ctcttcatcttcttcttctttcttctcatctactttatattattttatattattttataataaatgggtatttatagttgctagccttcaaacatttgaagttagaattattttctctagatctttctagttcaagaattttatccatatatttctacatatttattaaacatgcataactagaaatctctagactaaagttttctaaaaatgtctatgttctattatatttttcacatgtctagaaaattctaaattattttacaattatctaaaagtttagagtaagtttttctacaaatgtgtagaaaattctaaacttaattgagtattgtagaaatgtgtaacaattttttatatttgaaaccaactattctcctatagctataggtgcagactgagattacctcttccattctctttaatatcatttttcattgaaaagttttttttgtaaaacttagattgtttatctctatggctttgtcttttgatattgttttccttttttgttcttaataaattggagaagcattctgaacgtttaaatgatcttcgaaagaagatcactctaaagtttgggagtaagagagcatgcttcaacatagcaacgtctcaagaagttagattacaaaagtgtggactaggaataatgcaataatattgagagggagtcatactttgtaggagtcaagtggttttataattgttcaaactctactaataaattttagaagaatttcaaaaatactttttcatgttttatttacaattttatatcccaattttttttatttataaatatacttgtattatacccatatttcgaataattaatgtggtaatgattaggagtgttcatcaaaccgctcaaagtgtccgcaccgcaccacaccacaaaaaaaatgcagtttaaaattctttgcggtggggtcgcggtttgaattttttagtaaaccgcgcggtgcggtacggtttgcggttttaaattgttaatatgcggttcaacccgcaccgcaccgcacatgataaaaataccaattttatatttatttaggtccaatatgtgaatgttcaactcaaagtccactaattattatattgttgacaattaattttttttttcatatttatattcaagccttatggtattttgacaagttttgctcgaagtttgttgtatttgtgatagtttgattaattagtgatagtccaaaccgcataaaccacaaaaactgcaccgcaccacactattttttgcggtgcggtttttgcggatttttagttttgcggtgcgggtgcggtttgggaaattggaaaaactgcatgtgcgggttggtttgaaaaaatggtccgaaaccgcaccacccgcaccgcgaacacccctagtaatgacatgtattaaaaagctaaaaaatgaaccagctcgtgttaaaaagcaaaaaatatgttcaataaactcgcatcgaaaaatacaattagtagaagtatacgaactaacccttttaaagataagggcgagccgtgaataataactaccgctttataagaccagcgagatgaacaactaatgtaaaatgtctatctcgagatacacaaactacatagcagaacgatagtgcttagaaaggggtagatgatgaattcattaaagagcttgtagctcattgacacacttactcgtgagtatattgaaaaactaagggaagcactcctagtacaattcatcttggaattgtcacactataatagtatctcgtgtttgcttctctcaacatttatagaagaacgcgagaggtactacccagaatgtacttatgttgggttttatgccctaaataaaactcatttcaatagaatcagatttac

SEQ ID NO: 309525 - DNA, 1373 bp, Cannabis indica
ccactttatttgtctgcatcatggatgagttaaccaattcacaatctgttgctctcaacctcacagagaccgaatgtactatccaaacccttcacgagcctgcccccacaaacactcccgattctgagattcaacccattcctctcttccttgtagtcaaagttcacacggttaaatcctttaaccgcaagaactttatagagaaaatgaccaaaaattggaacaatatctctcggaatcctgtgatcatcactgatcgctccaatggtctcttcctagttgagtttggttgtgacggagataggcgtcgggttttgctgcagcaaccttggacttatctcaaccaagcaatcctcatggaaattccaaattccttggatgtccttaatggggatagcttgctcaaaatacctctctggattcaagtgttcaacacacctttccttaaacgctccgaagagttggcagttcttgtctcatcctccctcgatcatctcctggaaatttaccggccttcgttccgtgaaacttggggaccctactttcggcttagggtcatgtttgacgtggcccaacctcttccgcgaggattacctatccacttctccggtataaacaaagtggtctggctcgagctgaaatatgagaatctcccagatatctgcttcttctgcggtagaatgggacatagctacaataaagggtgcatggattacatgaaagcttgtgatgaagcaccgtttccctcggagctaaggtatgatatcaaaactatcacgggtaaagttaaggttacaactaatgctttgttgtgccctgaacagcttaactttgcaaacccccggtggcatcattcatgacctctaatccggctagtgcagtttgtgttgctccctcggagacctccccaccattccccacttatggctccctagatcattgtcccccccacggccaaacccaacaagtgggcttatacaagtcccgccccacaacctacacacaagaacctcctccaatggtccaagccgacacctatgcaaacacaaacaccaccatcccacccattggcacccaacccgagaccattaccccctcatacactcctctccttaatgccacaatgagtaacaccagtgtccaaaaagcctcacctatctccaacccgagtcatactatcacaccccaaaactctagcagctcccactccaccagctcaaaatactgtcatgttcctctaccagaaaacctccccctcttggacactagcaaaagactcaaagccatgaatctcacttaccaaccaagtagttgccaccccctcaggctacgaaagcttcaaggaaaagaaacaagcctgactccaaagacaa

SEQ ID NO: 309526 - DNA, 755 bp, Cannabis indica
aaacaagagagacaagataaaatttgatccaccaagtctgagaaaacagagttatccttccaacaatgcttcactcttttcactagaagtaaacagtcacttgcaatgcaatctaagggaaaccttactgccatgcaccaactcacagcccaaagcaaggcctttgcttcagccagtaatggaggtagaataccgtcaaagaaagatgacatggctgccacaatttcccctttacttttagtaactgctactccaattccaactttgcgcaaatggtcactcaaagcagcatcaacatttagtttaaaggatcccggcttaggcataatagatgttgaattaccactactacaggaagagagaagttgaggaccagtgcgatcatgaaaaatctgtgcatcatcaaagtcttgcagcaaacatgaaacctgaaaatcagcagaagataaagaatacttatttttgttaattaaactgatattacgacggttccaaatttcccagatgattccaagaaagagacggagttcttccttagaaaaatcttggaaacccttcaacaagaactcacaaatgtcaccactcctattaagcaaataaaagtttttgaacctagaatccttccattctcttgaagctctggaacactctattagagcatgggtaacagattcagaaaacctagagcaacaagaacacacagggctttgaacaatttttttatggaaaagatttaaggctgtaggaagactatg

SEQ ID NO: 309527 - DNA, 1601 bp, Cannabis indica
tacatttagaggtccatagacatctaaatgcactaacccaagaggttctttggcacgctctccctctgcaaagaaagaacacttagtcatttttccttttaggcaagattcagaaactggtaattcacctaagattacatttttcaatggaccatcattagttacctaggaagtctgtcatagcctatatgacctagtcgtaaatgtcgtagatatgtctcatcattattatcaatctcttttcttttattgtatctaggtttagcaatattgcaaagtttgttattaagcgcaatttgtatatacggtctcaaaacataaagccattgttccatgtgagcaccacataattgaaatccattacgagaaatagtgtaaataaaactaaaaaaattcaattgataaaattgtgtttgtaaacatgaaacactaaccaactttctactaaattcggaataaacaaaacattttctaaaactataaatttcttttggcacttgacgcgagcttttcccttatcttggaccaatactaattcgtcattaccaaatttgagctttaactcccgtggatctagataatgccaagtttcaagcaactacaatgaagagtaaacatggttagtagatccaaaaacaacaattcaaatggatttgtcattctcgaaaacacatgattcaaaaacaaaagcgttaccttcgttccaattgtctagaagtctgggacatctttcttcttgatgtccattctcatcacaatacgaacattgaagagtacgactgtccattgtttcaatatttgaacttgaagaagcaacaatgttagaagcatcctactcaattactcgattcctttttcgcaagtctacaaaatttgagggaggcctccttataggcaaagtctgcacgtaagcatgcaatttttcatccatcttgtctatatcggatgagttaaaatttttgatcatgtaagatacaaaaaatgtattatactcaggtggaagactattgagtacgaattgaacccattgttgctttgataaagaaattcccagcaaatttactttctggaacttcagatccaacacaatcatatgtcacttaatgctctttctaggagacatcttcacatgatagagttcatttgcaaaggcgtgtaaaaagtgagaggagggaggagggttacttctacttctactttagctaggtcggccaccagtggttgggtgatcccaatagcgctactattttaaaagttggtgggtatgccaagaagtactttatttcttgtggtgttcaaatgattggacactatgagtactggtgggtgtcgttcttcaaacgctctatccccacattgtagatgagggatagggcaaaccacattgtaatacgctaagattaatgaaatggattagtaaaccataactattttaatacgaattattatataattatattattatgcaattcattatatgtgaattaatttgataaaagacatgttaagagcccgatggtgagccacatgtattttcgtaattttgacctcaggagggtaatactgtgaatttaatttaaatgcgtgcttatggactatat

SEQ ID NO: 309528 - DNA, 1038 bp, Cannabis indica
tcagtttggttgttttgcacataacaacacaggtgggattgttcttccttatgaggaattcaatctccctcttcaaattttgacactcattggtgtcaactgtgatatgtgtacaatagggttgccagtgccaagcgagaagaaagatagagacgactcagaaggggcattatgatttcctgattgtctctcggagaaggatccaaatatctttgttttcaattaggtggacaaggacaattgattggctaagttattttgggcagatggaaactaactggactatgtgtggcttttagggatgtactagggtctaatacaacctacatgacaaatgaatacgataagcctctcactgttgtcattggcgtcaaccaccatttcaacacattcatttttgggtttgttctcctcctccacgagaagcttgcatcctattcttggctacttaaaaaagttcttgaatgccgacataagccgccaaatgttgtagataatgacccagatgtggccatgaaacaagccatcatggaacacatgccagatgttacacatcttctatgctcctggcatctcaatacaaattctacaaaaaaggttaaagatccgattttcttataacttttaaagatttgatgtacaactactacatggaggaagaatttaaagaaaaatggttagatgtcatcgataggcttcaactaacaaataatgaatggtgtcaaacaacatttgatacaagaaattagtgggcagaaacttatttaaggggttcactcgtctcaggaatgaagactacacaacgttgagaatggattaacccctttgtaaaaaaaattagagaagaataatttgtttgcgttaatttttcgcaaccatagatatgacagcctcaaagctccaacacagtgagacgaaaaatcacttcaaaagcaaatgcacgtgacctcaccaacctaatcctgcatgattgaccacaaactataaccaatatcctaaattctaaaaaagaaatatgtaccacaatgttgctgagca

SEQ ID NO: 309529 - DNA, 513 bp, Cannabis indica
ttgtttttaagttttaaatgtgtttttttagggtttttgttctcatttttgcctgtaggaaggttttgtgtttcttaagatttttttcttgtttttaaatcgttttttgattgttctttcagtgttctattggcttttttaaacagtttttttaatgtaattttttagttgttttagtgttgtttaattttattttacagttaacactttttctaataatttcatgtcttgcagattgttgtttacatgttttttttttctagttgttcaacttttatgctgtttctgtctgggtgtttataaaatgttgttttgtggttggtttttggatttttcaggaagatcagataatgttgttgtttcatatttttttttaaaattatatatttagttgtttgatttttttgcttctgattttttctattataactattttctaggttcctcctaagagttcggacaagtttgaagacttcgatattcccaaaaaaatcctcctaaggtgtgtatttt

SEQ ID NO: 309530 - DNA, 1485 bp, Cannabis indica
aacttgttgtggaattttcaacacgcaagtatatgtatcgttaacaagtaatagactcacaaatagttaggtcattcccacaaggattgtaattaagtactttaaaattaaaattttatttggttatttgaatttaagaaggaattagaactagaatttaaagcaataaaaatataaaaaaaaacaagcaagtaaattgatatgtaaattaacaatgattgaagattagggttattgatttcaattgtatctatctattatggtctaaaatgattcaattcctattaccaatttctatgcaatagtaggtttacttaagtaatttatagtcttctcaaatatataaatctcaattacatgcaaattttctactgacgttataaattaaacatgtaaaaggcattaaacacaaaaaccctataagctatccaaaccacataagtactctcgtcttacataaaattttgttcttattttactatagcataattgacactcacttttcagattttgtattaaaatcatagacaattaattgatggtcgagcaattaaaagaaataagtacgaatgaaatagaatacatagaaaattgggagataattaaatcacgttaaaactataaattgatgtcaaactatatccatcaatattctaatagactatttagctacttttgctcatcgtagcacttcacacatattaattaagaatcaaagaagaaaagaatattgaaaacttcgtcgaaaaagccttctatgttgttttttctctctaattttcgtactcctagattgtttgctaaaaaatatcgaactcccactctttttatggccaaaaaaagataaaaagatatcataagaaaattaaaggggcaggccgcagcactgaaatcctatgtcacggcccgtgtttccgaaaatccacgctttcagtgattcctagacacaggcctaggcatagaatttctatgcctaggaaaaactccccattgtttgggcagtgagcattctatgaattcctgcctaggcatagggatccaatgcctaggtatgcccatgccttggtccaatacgaccttctctgccagtttttaagcctttcatgccttggcatgggtttttaatgttgaggcgctcctccaaattatttattttctttgcctcaaaagctccaatcgcaccatcacttttaatttttttgttgaattaatttctaggtcctcttgccccgagaattgatttgtttagccattttttatatttcttcaattttctatttttctattttaaacctgcaaaataaaagctaccaaaaagcgtaaaattacaccaaacaagagtaaaacttattgaaaaagacactaaaattaatctaaaaataatactaataaaaacctaacacaaaatgaccagacttaggcacaaggtgcccagaacggagatccaatgccaccactagcggtaggacacttaggggtcatcat

SEQ ID NO: 309531 - DNA, 1181 bp, Cannabis indica
ttttatatctgccgtaaatttatgacatttttggaagaaatcaataaataaaatatatcattatcagtggtaacattaacatactaggcgatttgtgataattcgtagtaacaaagtaaataatacgagcaaataaaagagagtagaaggtttttaaaaaaaatagtggggtgataggcatagttttgtggtttcatacttcttctcgtaaaaagaaggttacaacttacaagtttgaatcctctcatcccaaatctaatatcaaaaagaaaaaaaaaagaataaaataaaaaataacaattactaagttgttttaactctcatattccagtacctttgcggaataaaaactcccgtatttcagtaaaggaactggatatagtagctatatcaactcataaataaattatcttaacattttgaattagttaaatattattttgaactttatattttgtaaaaattattaattggatcatctattttgttaaatgataaattggatcatgtattttttaaaattgtacaaataggactctaaacggattttttatcaaaataaaatttaataataatctcatctagagatattatgataaaaataattacattttctgtatctattcgtattaaaaattgtcttaaagttggttatattaaaaaataaaagtattgaaaattgagttcagagtcttatttttatcattttaggaaatatagggtctattttgtcatttaacaaaatagaggatctaatttataacttttgcaaaatagagagtccaaaataatatttatccttttgaacaatctctagctctttatttttatttgaaatatttgcggtgaaacttttttaatatttacaattattatgcatatgactaagaaaaaaaaagtataagtaaaatactttattttacaattttattgtagtcatacttatttttttgacaataagtattaactcaaaaatatatggtaatatattattgaactatgcattaaattaaaaaaataataactaaaatttgtaattaattgccactgttgctgaattaattagcacatatactgttccttcaactttattgtaacaggtataccaataacaaagaggaaattacactctataccctttttatattgtctttttttatttttaccctcttttctaaagt

SEQ ID NO: 309532 - DNA, 943 bp, Cannabis indica
tagggcataaaatcccaatagcacgatagaaaaaaaacgtcaaaaaatgactcttggaactcccacacgtgctgaggctgagagtgggcttcgcggagtggcagcttcttcaacctccagccaggttggaggtgggtaacacgactcgatttcagatcgactgggtttaggtgtttttttagccaaaaaatgcgacgaaaacaacaagagttcgaggggttttgttcgacattggatttataatagattatggtatcattttcggttataaataactaaaacaaggtaaatatgatagatccaccccaaaaatatgaagaaaaaaaattggaatcaatcaatttaaacagatttgattcaaaattttatggtgaatgatatcttaaaataattgaaaagttttatacataatcaattaagaattattaacaaaaaaaatttgaaaaaccacaaaattaattttaaaattcaatcacataaaccctaaatttttaaaacttaaaactttctcaatttactcaatgatttcatacacataatatatcaacagaaagaaaatttaacgaggaataaaacccctaaagttttaagattaaagaacgaaaaattcaacataaaataataaaaaaattaatatgtaattaagggtaattaatatatacatattaattgttacacaaattataggccctaaatcatatacaatagacaatctaataccacctgttagaaacatgattaacccaagatactaatttgtatataatatagaacacaataataatagataataattaggtatgcgtacctgattgatccataacaattatctcaatttgatagtgtaatactatcaactaagtctttttccctaggtctctaaatcagaagcggttttatttatctaattatcaaatggtatacaattgtgatgagacaatat

SEQ ID NO: 309533 - DNA, 1645 bp, Cannabis indica
atctgtattttttttttctcttttttttttacattctcgacggtttaaaaccattgcctatacctgttataggcgacgattttaaaccgtcaggaagtccacattagcgacggtttttaaccgtcgactattttgcccattttgcgacggtcgtataggcgacgattatagaaaccgacggtaatactttaaatgactatttaaaaatgtcaggaaaaatcatttttgtagtagtgttatctattttgttaaatgacaaattgaacctcgtaatttttaaaatagtactctgagctgattttttgtcaaaataaaacttcataatcacccgatttagatgtattataacaagtttggatacagtttttacatatgttcgtgttaaatattattttcaaatttattatattaacaaaaattatcaaaaattaagcttagctattattttacactaatttaaaaaatacaaatttcaattcattatttactaaattaaaaatctattcaataatttttacaaaatacaatggccaaaataatattaacctataaacaaataatcaccattaaataatgaaactaatgatatgtagaaattaattatgggataatgatgttaggccctatgatgaccaaatttgtctcttattaatcaggtgatgggtgtggagtagttttcttgggtggaccagtctctctaaattccaaccccagcaaagcaagcagcaataataatattaatatagtaacatgaaaagaaaaccaacctacctgcctcaccattttcccaatctttccaacttccaaagttaccatcaaaacttcaatctacctcttcgcaccacatatttattatatatgtaatgtaaagcaaaaataaaacattaacattgttgtaaatttgtataatgaataatgatatgatcttggttggtttataattatattgctaagtatacttttcatgcacgaccatattcaaacataagactttgtccctctcctgagtatatagatttgtcttttagcaacaaaaatgttaatagaatgagaatatatatgaaataagcaaaagccaaatcaagtaatgtgctaattaataattcaaagttattgatataaagagatgtaaccacgttttcctcttgtgaactaataattaatagtacttggaaagacaactttccctggctaatgaatttgacgttgacttagttcatgttgatgacaagtgtactttctataatttaaggctaaatgaaaagggaagaaataaatagatcaaagttaatatggtgtttatccaatctataatacgcattattgcaatattttaatgcatctacactaaagacagtaaggctatctccaacctttaacactaatatttattttagttcgaagtacaacgctaaaaattatttaaaataatattatttattattatattattttacttataaaattatcataatatttattagggaaattactttaaatattattttttttaacttatttttcaaatttacggtttaagtttctaaaatagttgcagcgctagttgtaataagggtttctatacgattttttgttgcaatttaggttgcagggatttttatgtgaaattctgtaaaaatgcaaa

SEQ ID NO: 309534 - DNA, 3767 bp, Cannabis indica
aatagcttgtctatttgatttataaattcatcttaaacccttattagcaataattcattaggagtggacacaatgagggggtttgggaatcttgaatgattggtgtctaagcgaattaaatatgtagaaactatctctttttccgtttattagcaataattcattaggagtggactcaactttgttgattgtcgtagagaatgttagatgtaatttttttttattgtttctatgaggtaagaatcatccttatgtaattttatcaaaagtgaatacaagacttgtcgttgctgcatatgatgacgagttactatgcgcttgaaatgttgagagttaatcaagtctcaccaacacttacaaaccattccacactgaaaactgagaagcagagagaaacagagacaaggaaacaagagaaacacaaggaatgctttgaactcttacctcagaaaatgaggataagcactttatttatagtagcagactttgtacaaatttacataacagtaattctgttatataacagaaaacagtaagaacagaaagaaagcaagaaacaaacaactaactaactgttacatttaacacagccaaccaagttaactaatcttggttatcatcccccctcaaacgaaacggggtagaaaccactttgagtttggattttagatactggaaccggtcttttggtaggctttttgtaaagatgtcagctacttgatcaattgtaggaacatagcacacttcgagttcttagtttaggagttgatcacgaacaaagtgttggtcaatctcaatatgtttgcagtgagcatgaaagatgggatttgcagctagagaagctgctccttgattatcaacccaaatgatgggaatatcagtcaaagcaatttgcatttcagtaaacagagatcgaagccacttaatttctgcagcagtgttggccaaagcacgaaattcgaactctgttgaagacctgacaacaacctactgcttcttagcagaccaggaaatgagattagaaccaataaacacagcatagtcccctgtagattttcggtcatcaatgcaacaggcccagtctgcatcagagtaggcaacaagtgacattcgatgaactggtttgagtagaataccatcagaaatagtccctttcagatatctgagaagtcgtttgcaagcctcccagtgaacatgagttggggcatgaataaactgggacagtttgtttatgatataagcaacatcaggtcgggtgatagtaagatattgcagagatcctaaggtgcttcgatacagtgagacatcttcaaatggagacccttcatgaagagacagtttgtgagcagtggaggtgggacttacagaacttttggctccctctagatgaactctagtgagtaaatctgtgatgtatttggtctgagacaggtagaggccttcattatttctgtgaatctcaacacctaagaagtagtgcaggggccctaaatctttgagagaaaaggcagagttgagatccataatcaacttttgaattagttgggagttgggacttgtgacaagaatgtcatccacatagactaggagaataatcaatgtagatccagtgccatgaatcaatagagaagtatcagcctttgatgcaatgaaaccccagttgaaaagtgtagtcttgagtttgtcattccatgctcgaggagcctgcttgaggccatacaatgccttgtgaagtttgcacacatgatgaggtttagaagggtcctagaagccaggtggttgatgcatatgtacagtttcttggagagtgcaattaagaaatgcatttgccacatctaacagtcgaatttcccaattgtaagagacagctagagtaagtacaagtctcactgtcaccggctttatgacatggctaaatgtatcttcataatcaattcctggtttttgaagataccctttagctacaagtctggatttcagcctatccaaagttccattagcattaagtttgacctgatggacccatttgttacctatgagatgaatgtgaggctcatagggaacaagtgtccaagttccttgagacttgagagcagtgaattcattattcatcgaagcaaaccatccaggatggttgatagcagatctgagagtctttggttcagtaggcaataatgattcaggcaacctctgctttgtggctaaataagatttgggtttgtaaattccatgttgagacctagtgaccatagaatgagtcctcatagaacctgttgtggcattgatgggaacactagctgggttatcattagtagttgctggtgcaggatcctgacagttaggattcgaattctctggtggagaatgcacaggtaaatttgcaataccaggagcaacaactgtaggagtatgatctccagtagagagggtgtcattcagaagctcagatgaagttgttggtgatgcagaatcaggtataacaggagaatgaatagcacaaaagttagttataccagtagcagattctgtagagaaagtagctgcaggacaagagatagattcaagtgttacctgagaatgactctgagcttgagttgcaagaaaggcatgttcattaaaaacaacatttcttgcaatgaacattcggccagccttgttttcacagagataccctttgtgcttgggagaataacccaagaaaatgcattcttcagatctgtagtctattttgtgatgatggtaaggccttaggtgaggaaaacaggcataaccaaacacctttagaatgctataatgaggagcttgctgaaatagacactcataatggctgaggtgatgtagaaccggggtgggcattctgttaatagagtaggttacacattgaaaagcatgccactaagacatgtcaagaccagattttgcaagaagtgtaagccctgtcttagtaatgtgtgtatgtttcctttccactatcccattttgctcatgtgtatgaggacagaatgttgaaaccaaataccttgttatttcaagaacctttcaaaagcacgatattcacccctaccatcggcctgaacctttttaattggcaaattaaactgcttttccactaggctcttgaactgaatgaaaatatcaaaagattgggacttgacagacatgggaaagacccaagaaaacctactaaaatcatcaacaaaaacaatgtgatacctatagttatctttagaagcaatgtgtgggggcccccatacatcagtatgaataagggccaaaggctgactagcacgagtattagataaggagaaggggagcctatggctctttccttgttgacaggcattgcaaaattgcaagcctttcatactatgaggtatatttgcttgagttaagattttaatgagtatagggggtgatggatggccaagtttacaatgcaataagttgatatcagtggaaaaattcgaattatacacagcagcactaggttgaaaacacaaagtagaatctatagttttattaatatgaggagaattacatgaatcctgaacacaggtttgagtacaatactgacagatacattgctgagattgtaaagaaccactagactcaataagatgacattggatggaagtgctagacaaattcgagccttcatctccaagaagatatagaccatctttaaatgtccctttgacaagaactgctcctgtttgcttgtccttaacaaaacaacacgttttatgaaattcaagaaagacattgtt

SEQ ID NO: 309535 - DNA, 2360 bp, Cannabis indica
gcactaatgacatgctccgagacagctagataaaggtataaaatttctccagttattggtttggccaaatttagaggcgttgataaatgcttcttcatgcctttaaaaacttcctcccattcttctgtccattcaaattttttattgactcgcaatatattaaaaaacggaaagcatttgtcaattgacttcgagacgaatctgtttagtgttgtcattctctctatcaaagcttgaacttctttcggattcgttggtgagggcacctcgatcagggccttgatgtttcctaaattggcttcaattcctctcgcatttactataaagtcgagaaattttcctgagaaaaccccaaaagagtgtttcttcgaattaagcttcatattatactttttaggtatctaaaagcatttcgcgagatccttagtgtgatctttactttttattgactttatcagcatatcatcgacatatatttcgtccgatctggttctcaaacattctattcaccaatcgttgatacgttgctccaacatttttaaaaccaaacggcatgactttataacaataaagtcccatgtttgtcacaaaacttgtatgttcttggtcacgaatatacattttaatctagttatattcataatatgcaacgcagattattcgagacgttataaaatgatgaaaaaacttgtcgaaccagctgctcgcgtctccagttaatgaggtcgggaataagatgcaacgcagattattcgagatattgttggctcgtattataataatgaagttgttcaaatgagagactggatcaatcgtcccatcatactgcgaaacatgtgggtttttaaatccctgaggaaattcagaattcaaaatatcaggatgaaacgactcggcttcttcatccaaatcgtaaccaggcaattttccatgttctccatcctgatcttttttgatcaagaaagcatgagcaacactatcgtctcatgctttcttgatcagcataacgtcaaggtctacttccctccctctcgcgttggtctacccaatcgactatgtcctcgagaccttgagtgtcctgaactagaacttgcttcatcttgtatcagtcttctccttcgaaagaggttagacacacgccctctatttaaatacgtgtatgcaacctctctctgatcgagaaggaagttgagggtgtcttggaggtagctcacttgtcctgggttggcttccaagttctctcgttgccacgagggattccctggttcccaagtcgagtctatctcacgtcctcattcctgcgagaagcttccggtacatcattttgttcgttcccttggttcgtaaatccttgggatccttaaggagcatctcacctttgctcttgattttttgtttgattatccattggaacatcctttgtaccatcaagttgctcttcttgggtattttggagatttccttagtttgtttcctgtctcctggttctagagccttgtggtcttcttaccgcaagatcaggttgattctgaggatttgttccttgtgccaccctagctgttgtagcctctcttaccaacttagagtttcgtcggttagatttggctaagcgttgtcggagttgtctattctctaactctaccaatggtacatacctagttgggtcataagcatcttcacttctagccacgtatctggtaaaattattggcatctccatttcttctttttgaattttgatcaccaccaccatcatttctccttgaacgtgatgttccagtggtatggggtctctgagatcccattggatcttttccagggcgacgtgtgattttttcaatgatattttcgtcgtttcgattgttatctgtcattgaatattgatagatttttgtttgtaaagaagaatttttctaagttttaccactaagactctcaatgaaagcactaaactgttaacgcagataaccaaaattaaatagtttttcagtaataactattctgtagaaattaataagtaataaaagatataataactccagatatttttacgtgattttatagttaaaatctacatactccacgagtctttcttattatggatatttttaaagtacaaaatataatatctgatttttaataataatgattatttatcaaacttgtcgtctcttttctcatggagtctgcctctatttataggaatataggttggcaattatcttttttgggattaattcaagtacaattgttcatgaaacgtaggcaattctcatgtttcatttaaattacatgtgggataatattaaataactacccaaccgttctttagttttctcctttagatggttattactgacg

SEQ ID NO: 309536 - DNA, 1732 bp, Cannabis indica
gggttccgggacacaaagtctttaatcaagatagttgtagggtatccgtgtcactatttcgtaacgaaatcactaaccgctttcgaatagtagtctctaattagtggggccgatgtacaatcggtagtgacaaaagtgtccaaagtggtactcataaaaataaaaaaatattatccttcagttgctacattttggattttatcattacatgtgaaacacatatttggatatttcttgatgttttgggaaaataatatttaacatatttacattttgaatttttcaattcaaatttaaccaaaccgtccattttattgggtttgttaaaattacgtttttcaagggattgaaaatatcaacttaattcaagatctacctttaagtcatatcaagtttatttaatattattttttatattgtgacaagaccacacatcacaatcagattcacaagtactatatatatatccctctacccctccttcctccttcacacgttaatttagtatttttttcttgcctacagaagttagtcgctatctatagattatgtataggataaaatataaaatattaaaatatgtattgttgttgtagtgaagtaaatagttgtaaaaagaaggattggtatgtactactttcgtgttttgtagctggaacatgtaattttgacaatccaataaatcatctcataaacatttcagtgttaactcaactctttatatctttttagttgaacgctctattattagtttttatttgataaaaattgtaggaatgtcctatctattttaatttcagttaattttgttagtggctttgaatgggtggactgggtaaggatgaactacttccaacacggtcacacctaccacccaactgaggctcgacctctcgtggtccacaatgccatcgtgggatgagtattcttatatttgaggtaccgaccatgggcgcgccagacacttgaacaaaatcgggtcgcgagggagaagatcataagaattgagttccatttaatggtgcctagttgtaatgttgtaatgttgtttgcttgtttgcttttcatttttaaaactttgtaatgttgattacattgttaaaaaataactattttgccctttcttgtcacttttatttaaatttaaaatattaaaagtattaaaagtgaggatattttcgtaaatatacaagttactttatttcattacaatctatattacagtgtcaaataaaacatcataatactattacctcaacgcaaacatcacataaatttgtacccttgattagacaaaaaaaaaggtttatcatttaaataaatgtttcattgaaattaataaagaaataatatagatttattttttctaatgacgtatttcaaggtaagtcttcacctgctccttccatatttcaataagttgaaagtttttaaattacgtactttaaggtttgtacaaagtacgtcacatctaaatttcagtaaggcatgacctgtttacggcatatttgggtattatgagattagattttaaatttacactttatttttaaacatgtttctgtttacggttttgtgtttatatttaatattaatataatattttttaggttatgaaattagatagtacaacttactgatttgaccttatatgaattgatgggaaaatagtattaacatgattcttttatgaaaaaataaacaagtagtaacatttatttaaaatcgtact

SEQ ID NO: 309537 - DNA, 889 bp, Cannabis indica
aagactctagctcgagattgatttgaaaatagctggatcagaacattccatagttttgatgaaaaagcacacctcgcaacgtgtcctaacatagcttctgagatggagttgaagagccaactcatcaagaattgatccaagcgcatccagtcagcaagatttggattagggatgaatcttgaagcatctgtaggatctggaacagtggctgggggctgcgctctagcaccagtgaggaatctttcgagttgatgggcgcaaactgtcgaaagaacttgagatctccagtagaagtaattagcacgatcaagacagagattcggaggaacaatatagtttggtataacttgagctgcagcaggaagatcagtgataccagtagcaaaggtggaaccagcagctctaggagcagagtttgaagtggacgccattgatgaatgcttgaagaagaaggagaggaagaaagaaaaaaaatgaacttgagcctccgataccaagttggaaagatgagatatggtgaatgagtgagttaacttctgaatagctaaagctcactaagtattatttatataaacttgaataaaatacaattatggttacaattgaaagttgttacaaagaagtaaagtagcaaatattatatgtggatgttagcaaataactaacttataactaacccaatacagttatacacattcactaacattttcttttgatcaagtttttcagcaagtttaatgagatagtttttatgaacatctaagggagagtgttatgaaatattatatatgtatgtccaaatcactaaatcaattatcaccattaatgtttgattgtatttttttttattatattgatttagcttccattcttttagtcatattttcat

SEQ ID NO: 309538 - DNA, 656 bp, Cannabis indica
ttttataattagtggtatttttttacttttttagagttattttcaagcctatgtaatttacatattgtagtcaagtgtattttcataccatatttttattaataaaaaagtttgaaaatagtatatttaaaattaataaataatataaatatttatttttgtttgtagtagtataaatattcatttaaaagtaatattaactcaaaataggaaaaactccaaaataaaaattggaccactactacttgcctaatctattaatggtggtgaattggtgatgttgagtagtctcattcactcatcatgacaaagtttgatactctatttatgtaaatgtgcataaaacgtgcatatatatatatataataattctaatatagagacatcatttttgtcactatggtagagatactttttttgtcccttgatctgtgatccaatggtattaaatatgtaggggatacgatagtggtgctaaagtttattttccccataaactgtcacaaagtttatgaaatttgcataaaacgtgcatctatatctttatactagtaaaaagctacgtgcgaggcacgcatactaaattttatgctagttttttctatgttattttaaagtgatataattaaaaattaaagaaaaaatattattagtta

SEQ ID NO: 309539 - DNA, 1074 bp, Cannabis indica
tatttagggcacagaacccaacagcaacttatagcccttcaggtgggaatctccactgatccattaaccaccgaaggcgagtttgggatgatctacaaggacgccccgtaagaaacatcattgagttcaacgagagagctcaggtgtttgtccagaaggaaaaagcctgaaaggaaatgaacttgttgaaaatagtctcgggaggtaaacccagcaatgtctcaacagggactgcttccacgagaatcgataacttgcggcacgcttgggtccaaaaagaaaggacggaattagggaaccttcgtaggatagaaataaacaaaagaagcatgataaatacgtgccagtgtatactatttatactgagctgaatgaaactcgggaaaaaatttacctcgcacatgagcagaaggtagccttcggtaagccgaaccctatgaggaattcgaggagcaatagagatcctaacaaatattgtaaatttcataaagatattaggcatacaatcaacgaatgtcgccaattgaaagatgagatagagagtcttatcgctcgaggccatattaagcagtatgtgaatagacaggccctgcgatacaaccagccccgttagcttgataacccaaataaccacaggttacaacctattcctgtggaaggagagaccatcctagtcatttccggagggccgcatattgtatgggaaagcaataacgctcataagagatatgtgaaggagataaagaacgagcagtctgtctttgccccaaaaccttccaagaaggtgaaaatcgaggaaccccccattacgttcacggaggaagacgataagaacgtgagataccctcacgtcgatccgctggtcataacaaatcaactcaccaataagaggatcaagagagtgttaataggtaatgggagctcggcgaatatcatttataaggagactctaaagaaaattgggctaggaaaggctaagataaggccttgtatggtgaatctttgcagattcaccgagcatagcatcactagccttgtcataattgagcttgcattaactataggagagtcacc

SEQ ID NO: 309540 - DNA, 3084 bp, Cannabis indica
tacagccccgtaaacctccattctgccataccctcaattgaaacttttacattaatataattaagtgagaatcctaggaccgaaacctcctcttcaaccttccaaagtaacacaatgcctctacttcttccttgcacatccaccaccatcatcccttcaaaccctaaggaaacccgaaccctctcaagctgagctcgattattgagagtttcacactggaaaattaaattgggttgcgtttggatcacaagattcttaaggaattgaacagcccatgggttctcaagcccatggcaattccatgataagattttcataatgggcagtgggcctggataccagcacccatcaagcatgtgttatttgaaccctcctcaacttggttcatatccacctcatccccactcccttctcattctctttgaatcaaccaccaataaacagtcctcttcattttgagtaatcattgatctttctaactgtccacatttgtctccttgttgacccttgttttcctccacaatcatagtgatttttatgctgccacctgtagccgattctttccttgcctttgaatgatgaaccaatccgacagccatggtagcatcattaccagtatcatcttccatagccatcatgaattgcttcagccacttagctccaattgtatgattcttacgtacaggcttgaccctcatccattccccatatggtttaacaatccttccatctaggacatcaaagcgtcaagggaaaaaattatccgtatggcccattagcccacatatgaaacagaatgtaggaaggtgttcattttaatttatgttaattaataaacaagtatcaatgtataggagtattttttatatatggtataaaattaattttatacgactgtaacaaaatgataccatagatttattatatttgatcacaattatacaatcagattgattaaccaaatattcattactcgatttaattttctaaattaattgttaaaatattctaaaaattaatatggcgcaaatactgatggagtatcttacatataaatatatggtctctgtttcttagcttttcactcattctgcgcaaatagaaaatttcatctaaagagagttgggagagctttgaagcacgattttctatactaaagctattgttggggattgaagctcaaatatcaatggctgaagatatttcggttctttcaccgtatgtacgacttcaatatttttatctgctttgcatatcaattttatatgctttattttttatatcaaaattaatctaacagttggtatcagagcatatttttatctctaccttaatttaaattttgagtttttatatatgtatatatatttatatatatatacatgatcattttggattttcgttaatggctgatcatcgtaaatttttattttaattattttaatttatgttgttgttaattttattttttatatattttttttgtatcaaattgaatattttcatagtatatgtttatatatatattttacattggttccataattttattgtatataattgattattataatctattctatatatataccatattttatgtggtataataattatatatgagtatatgtatacataaaaagttttagtttacggttgtttttgctctaaatctttagttttatttttcggatttatttcgattcttgtatgcatcaatacattcatataatgctataaatttttttatgcatgaaatcgatttgaaaactatgaaactatgaaagctgagggagttggtgggtctcgagatggttacgttggtagagtatctgtaggagaaatcatatccaaagggcagtcagccttaaccactttgaaaagttctgttgagaatggagacaaaaggaatttaaatgaggtggatccaagtcaacataaagagggacaggtggataaaatgaagctgagtcatcatagggagggtgaagttgaaagttttgaacgacatgtcgttgagggaaaaagagtggaaatcgcatctgttttctctgatgtttctgagtttgctacccagaagaaagtcactccctccataggtaaatcaaaggagaagggagagaagaaagaagggagaagtgtgattctaagaagcaaccatcttagtaaggagagagatgagaaagcatcggcagaccattctaagaaatggtcgacgaaggaaagggaggcagcaagcgatatggagatcgatgatgaaccgggggaaaaagggccaattgcgagaatgagattgagagaactatggaaattcaggagtttagactcccagaaacggtgacgggttttgcaaagggctggattgatgaaaagaaaaaggtggtgaacagtgtgaatggtcgaaagcttaaatcggcaaaagttttggctcgaagtaaagcttctcttttggttaataaggggagagaagatgggcatgatgacatcagtggtgatgatgggtagttagtggggtcggatatttctggaaaggaagatttattggccttaaacaaagatgataaagtggcgaaccttgagatccaaggtcgccgatcacaatgttaatactatggtgaaatgtctagggactcggcaaccctgaaacattcaatgcgctccatttgagagttgtggagatgaagccgaacttgatctttatttctgagtcgaaattactgaatagtcaagcggaggtagtggcgaggagattgggtttcaatgatttttttctggcagaaagggtggggcttagcggtggtttaatgctgttgtgggaagctggtcttaaggtaaaaattctatctcattccagatttcatatacattcttttgtctgtgatttgaattcgatggtgtggaattttactggggtgtatggcgatccagttagaagccaaagacataatttctaggctatgcttcatcgtattagagattaagctaatggcacgtggctaatcgggggtgattttaatgaagttcttcatgcgaaagaaaagcagggggtagggagaagaacttgaattctatggatgggttcag

SEQ ID NO: 309541 - DNA, 3290 bp, Cannabis indica
ataagaaaagcattatatatattatatggggtgggccatagcacttcacggcggcgccggcgacatccctgtctctcttccagcggagcgtcgacagccacgtgaggatgcccttcattattgcctccagatcggcgttgaagctctcaaagcaggaaacccggtcttggacgttgttgaacttgtggtatacatatacaaattccctaacctcaacctcttttttggtctttattttgggctttcttcttctcaactcatactcagttacttccccaattttcaaatttagactatgctttgatctggtataattcctttaaaagtattagatggtaaaaaggggtctttcagtatgtttaatacattgaaattgagaactcttatctcctgagaacatgatctatgatctatgtatgtaggttcgtgaattggaaaacaatccacactttaatgccggtagaggctctgttctaacttgcaatggcgaagttgaaatggaagcaagtattatggatggaaacacaaagaactgtggagctgtttctggcctcaaaactgttgttaatgctatatcattggctcgtttggttatggaaaaaactcctcatatttaccttgcatttgatggagcagaagcctttgcaagagaacaagtgagtactgtaactcttcctagatttccctgaaatttctctcttttacacatagtaataactcactaaatgcaacatgaggacaaactcaagactttgtatgaccttgaataatggcaatacaagtttgagaggaacggcctatgttctttcttatatcaaaaacaaatttaaatgacacctaccagatttgcttgtcaatgttagtatggtctccacttgttcttattgtaaatgtttgtgtgcgtatatatttgttaatttttttgcttcttttgttcctagaattataattatttatcctttttctatggtttttgtgcaactctcagggagttgagactgtagactcaagctattttgttactccagaaaatatcgaacgactaaagcaagcaaaagaagccaataaaacgcaggtatatttgttgtttaaattcaatcatagtacttatatcatgtttacatgtgcatcattaaagctctagtagattagtaagtacagttagtttcattattctaactcgagtgatgtggtaacttgtgtcattgatttacacagcttgattatactgaaccaacttccaaagctgtgaacaataagaacttaacttcaaatggggatagccaagggacagttggatgtgtggccgttgacaatgatgggaatttagcttctgcaacatctactggtggatttgtaaacaagatgaggggaaggattggggacactcctgtaataggtgcaggaacttatgcaaacaagctctgtgcggtctctgctacgggcagaggcgaggccataattaaaggcacagtggccagggatgttgcagctctcatggaatttaaagggctttctcttaaggatgctgcagcttatgcggtggacagtgttccaaaagggactgctggccttattgctgtctctgccacaggagaagtgacaatgccttttaatacaatgggcatgttccgagcttgtgctactgaagatggctatgaagaaattggaatatggccagacatctagaatcgatgataatttgactattaataaatcttgcatttttaataattatgttactacagtattacctatgatgtgtagatagattaagctgaaaaaaatagattagaaaagaaaataggacataaatttagcgtgctttaacgccttggtccatgaagtatttttataagctttaataatagagtttttatagctctagtatttctttcaagatcctaaactctttaatggaggagataatgccttatttataaggataaatgggtcagacagatcttaaacttgtactcaagagattattgttaatctcgaaaattagtaaggcaagctttccgaattagccaagtaaaacgccccgttaacagaatattgtcgagaaaattaaggtggtttggccctgaatgcaagctatgaggtttaatgcgtgaagacttgaagcctcaagcctgaagagagggtgttggtgacattctccgcatgtgagcatctcgacaacctcttgcttaaggcctcttgtcagctccttgctcgaggccttttagcagccacttgctcgaggcgtctcgcagctcatctactcgaggtgtcttgtcagcttcacactcaagcatgttgataagttgatatttgtctataaatatgacatttatatattaatattttaaattaattttttaaattattgattagtgtgattttaatttgttaagatatttagaagactagtcatgcatttggagtcatttggagagattttagcacattttagtgaaaaatagtagaagccggcaagttcagttttacaagacagaatttaaatgcaaattttgacgaccttagaagcagaattgaacttggagctacacatgaaagttttaaatctcgttctcaacttttcgaaacatcttgaattatctaatttgagttgtattgaaaaagttacgaccaaaatattaatctgaacacgcggtagaattttttcgacagcaagtcatggctgtggcaagcctcaaccttcgctgcggcgagaggacgtgattatagtttttcttattatagtttttcttcaatttttatcttttttttaaaaaaaaaaatcataaatttttatgggggcataaaaggacttttagggttcgtttttagcaacttttagtacgtttttgagagagaaacttagagggagaaagagaagaagaacaagatcacgtcatcaattgttcatcattatagtttcttttctccttcttaatattttactttttattatgactttcattacaatgattagtttggagtatttttttatagttaagggttattttaaaaccctaaaacatgaattttgatttgtgattgttattcttgatttctctcatattaaattgtttctatttttctatttgaatgctaaatattgtgaattcttgttaggggtacaactaattaaagttttgcattattctattaacatcttagaattttttctcatctaatagtttaggattctaagtagagtgatagtttgaaattaatagtaatgtcaaatgtattattgattgtgatgaaaaatagaatttaagttaaatgaattatatgct

SEQ ID NO: 309542 - DNA, 884 bp, Cannabis indica
tgttaccaaacgacaccttaactcagttttttttttttttgtaagatatatatattgcaaccacaaagaaagaaatacaaaaagagtacaagttacaatataatcagttaagctttggaacttcgccattccaaagaacctctctctcaagccttatagtaactttagccaaattgtgagacatgacattgtgacaccttggtacatgaagaacaactgcagaaggaaaaaaagagagacagggtagtatttgttcaaccatatcagataaaactaacttatctttccaatgatgtttcactctatgcacaagaagctgacaatcactttcaatgcaatccaaagggaacctgacagccatacaccagcgaagggcccaaagcaaagcttttgcttcagccaataagggggacataataccatcaaaaggagaggacatagcagccacaatatcgcccttactattggtaactgctgctccaattcgaaccttatgcatttgatcattcaaggcagcatcaacatttaatttaaaataacctgatttgggagttactggagtagaactgccatggctgcaatttgataacgctttgggaagagtgtgagcatggaaatcctgggcatcatcataagcttgtagaagacctgaaacctgaaaatcagccgaggaaaaggaaatcttgcttttgttaaacaggctgatattacgacagttccaaatttcccaaataattccgaggaagaatctgagatcatttttagacaagtcttgaaaacctcttaaaaaaaactcacaaatatcacaattcctattaagcaaatataagcctttaaatctagagtctttccactctcttgaagctctggaacactctaataga

SEQ ID NO: 309543 - DNA, 1034 bp, Cannabis indica
agaagatgaagctcagtctgaagcttgcagcgatgtcagaaagaagaaatggaagtttggtttttgccattaatggccagaggttcgagcttccaactcttgacccttcaactactttgcttcatttcttgcggactcagactcgtttcaagagtgttaagctcggttgtggcgaaggttttcattcttcactttctctctagttttcaatctcttaacgtttgtaaaattaagtatattatttgagagtctaattaagtatatgtctttctctgtagcacgtaggatgtgttggatttgtagtttatgagctttgttagaaaaagtaggcaaattccacgttttctcgcagtttgaactggactcttgtgtattttgttacacaagtcttgattttgaatttgttagtattggaacctaagataacaaaattattgggaaatctggtaaatatcgattcaagtcctgtgaaattttatgtttttttttttcaggtggttgtggtgcttgtactgtgctgctatccaagtatgatccagtaaatgacacagttgaggatatgactgcaagttcatgtcttactctgttgagcagtataggtgggtgttcaatcacaacatctgaaggacttggaaatagcaaagatggtttacactcaattcaccagagaatgagtggtttccatgcttctcaatgtggcttttgtactcctggaatgtgtgtttcaatcttttcagctcttgtcaatgctgagaaaacagatcgagtggaccctcctccggggttctctaagatcactgtttctgaagctgaaaaggctattgtaggaaatctgtgtcgctgtaccggatatcgatccattgctgatgtttgcaagagctttgcagctgatgttgatattgaggatttggggctcaactccttttggaaaaaggaagatagtaaggaagtaaaggtaagtagtttaccttcttatgaccgcaacaatgagatttgtacatttcctgaattcctgaaagaggaaatcaggtctg

SEQ ID NO: 309544 - DNA, 601 bp, Cannabis indica
tttttttttataaatatattattattttactgttttttttgtctttattaaattaaataattcattctctttttaaatttttatatactttataatttctacgtattataattttgtgttatttttttatgaaacaattttgtgttaaatctcaatcgttgggtattttaactctttagtatatttgctattattattagtttaaaaattatttgtgtttatttcaatatgtaacttatttttattttattttatatatttttaattatataggttgatgacacacatataaatagcagcttgtaaacatttattctacttttcttttcaaatgacactaacataacatttatccaaatccaaaaagttagagttatagcttagtatattatactttttctttttaacatatatttgatttttctaaatatatatacatataagtaggaaataagctgtgattcaagttcggttgtattttatttaataatcaatatatatatataaaggaatgcacaagaagagtttaggtggcattttacaattttttcttcctatttttcctattttttggtatgttctcttattttatttaaaaaat

SEQ ID NO: 309545 - DNA, 2161 bp, Cannabis indica
ccagcgtacatttgcagtggctaaaatctaacttttaccatcacatttatgtactgggaaaagtcttttttgccagcacttttcattttatgccggcaaaagttctaataccaacattgatttgccaacccccttttgccaacacatcataagtaaattctattttaccagcgtaataccaacttttgccagcacaaaaatgtgctggcaaaagtgacatttcttgtagtgatcccattagatattcgagttgagttatttttcttactcaagtttggcacctgaatagagttagagtcttttactcaaaaactcttttacgttggcctaaggtggggtctttcctgctttgacttttaccgtcgctcaagccctcgtataagttccaacagatttaaagtgtcagtaaaagtggcattcatgatatatttatgcgctagtaaaatttttaacaataaaaatttatattttttcataactttatttttaacattttcgactacaatcaaaccatctattatctctaaaacattaaattatacgaatatgataaatagaaaatttataactgaataaatgaacatagataatatcaaataatcttattatttctttttggtgaatcaaaaagtttgtattacctgaaaacaattaaaagctacaacacctatttaattaagacccgaaatacttttaattacatcaatcatatagttttattataatcctctataccaatcactatcgatttggctcactttcaaaggccaatgactcataattctagtttttgcactttctttaatttacttccgatcttgattccacaaaatatcatttctcactaaccaaatttgataaatcatagatgccaacataactgagtatactaattttcgaaacttaattacttaacttggcactttctataccataagcacactataacttatcaagtaccacaattatttaatatcccaaaatttaccaattatcaaatgattgagaagcttactactatgtctccaacaccacttttattcacataattattacttttttttggaagaaaaaatattcttttttctttttttattgattcttctttttatattattctctttttggtaatactcgaaaacactattcattttacaatcttttctgaatcactcacttttccaaaagaatcactcacaaacatttcgctccccactacaaaaaattattactttttagtgacaactttttatagtcacaatataatttttttgtgactaaatgtgacttttagtcacaacaaaatgttacttgtaactaaaatatagtctttagttacaagttgctactaatttagttttagtcacaacgaattgtaatttttgtaactaatacctttagttacagactttttagtcacaacttaagaataataatttataattagtcataatttttttacttttagtcacaatttttgttgtgactaaaagtaagattttttgtagtgctctgaaacttattactatgcttatgacataatgtaatgcacaacatgaagaaaaatagtgaatagacacatttcaggctttatttagtggctatagattttaaaataggctcaagctcaaacttggtaaactagggatgacagaataagggtaggacatgaaatgttcaaacggtccaaagaaaatttctcaaatcatattccaaacaagtattgccaagaatcgcctcaagaaaataaatcatgcaaggtctatcctattcaaccaattattctccaaaccaaagtagaacaattatgatacaatatttcaaatattgacaatttatatcgatgcacagttttcaacaagcatccaaattaattctaaagagttaaaaaaatcaagcacatagttcacaattttcaatcaatctcataaatacaacaacagcttaatcaatctattatactgtcgacttaattaacaacacaataaataggcacaaaaccacaaaaatgcatgcatccatgaatgagcgcacgtggaaagattggcctctttacgtatttacaataattataggctaattaacaatttttctctaaaactttgacatgtactaaatcatgcctcctgaattttttttggccgttaaaaattacccctga

SEQ ID NO: 309546 - DNA, 1826 bp, Cannabis indica
gcacgacttgacttacaagatttgaaaattcgtaagcaattgcaaatgaagaaacgggggaacaagtgggtgaaacctacggcttgttatacattatcgatgaaggaacgacaaactatttgtaagttcttggagtctgttaaatttccagatggatatgcagcaaacttgtctcgaaatataattatgaaagatgggaagattactggtttaaaaagtcacgattgtcatatattattacagatattgctacctatttgtgtaaggccatacttgaaaaaaaaagtgatgagtgtaattgctgaattatccttattttttcaaaaactatgtgcgaagacattgtatgtgaaagacttaaatgatttggaagaaggcatcgtgttcacactttgtaagatggaaagtattttcccccctgcctttttcgatgtgatgattcatctagcggtccacttgccaaaggaagccaagttaggtggtcctgtccaaatgcgatggatgtattcaattgaaaggtaacaaaatttttgttaccttaacaaataatgaattttaaaaatgtgcactaatgtatatattaattatataaccttttatagggaaatgggtcatttgaaaaaatatgtaaagaacaaagctcggcctgaaggttccattgctaaaggatatataattagtgaggcattaaatttttgttctatgtatcttcatgggatagaaactcgtttcaatcgtccagatcgaaatccagatgatgtcggagtaagaagagaatcaacattatccatattcaacttaccaactagaccatttgggaaacaatcatcaatcagaataagtgaagatgaacgaaatatggttcattggtacattctgaataattgtcctgaattggagccatatttggagtaagttttctttaattcatcttaaatatatcctaaaaaatttatgttgtcgtaaataaaataattcttatctgagagttacttactttgaatcagagaacacagattgtttttacaatctaaaggtgttttggatattgacgaatcacagaaaaaaaaatttccatcttggtttgaaaataaagtaagttcgtaaatttgtatatctttcaaatggaatatgcatatttattctcattttaactatacaaattattatctcaggttaaaagaatgaatgaatgctcatattctacagcccaagatgatttatatgccattgcaattcagcctaattttttaatttgcaagtatgctggttgtatggttaatggtgttagatatcacacaaaaactcgagatgaaaaacgagtcactcaaaattatggaattcgagttgaggcagaatataatgggaacctttgtgatttttatggtgtcatcgatgaaatatgggaagtacattacatctatttcaataaggtgatattgttcaaatgttcttggtataacaccagtgagagtccacgtagaatctatacggaatatcatatgactagtataaatattagctcatattggtttgaagacgacccgtttcttcttgcaaatcaagttaatccagtattctatttagatgacattaaaaaaggagaaaattggaaagtggtgcaaaaggtaaaccatcgtcatatttgggaaataccatcagagcctgaagttgatgatggagaacgagttgtccagaatcgtgaagcatatcaagaagattcctcaaacaacattaatctcacattggattcttcaaacaacatggacgacgttcttattcgaaaagatattgatgaagttgaaactgatgagttattgattgac

SEQ ID NO: 309547 - DNA, 1115 bp, Cannabis indica
aataaaaataatattgatgtttttagttgtttattttttaattaatttttttatttaaaattatttttaagtaaaattataatttggactaataatgcttgaacatgatattcttgcctgcacttaacgaagctgttaaattaggtatcgaatgacacaaaaaatatgactttaaggactattactgttatttcttgaaattaaagactaatctacgtaaaagtaaacttgttgaaaactttttccacaaatttttttattattgttgttgttaagttttgtttttttttttgtttttggtcaatcaaataagtgtattgattccacaacaagttttacaactctagcatcaccaattgtagtgggcctatgcctatcactttctttacaaatttttcaactattctatatcttttttggctacattatcatacataatgctctttactctttacaacaagtttaattttttttacaataaaatttattgggtatatcttcatacttcatgttctatagagctttattcttagtccaccaaatatgatatatagtttagctataaatacttggcatatgaacttatttgttttagtatttaagatctatctcatcacatcatgaatactattgggaccaataatttactttatctaaatcttgatactagccaatgcctaattattcaagtaacatttgaaaaatagatgttctcctatttttttgttcagctcacatattggacattttttttcttctcatatttaaacaagatcccaatttcaaattatctaaaatcacaagccaaaaaataatttgattttaatatatatataatataatataatattattacctcatcaaccataagtttggtggagaactttgtatatattgtacaatactttttttttttcaaagttatggccaaaatcattaaataattgtggctgcctaatattttacatattctcaattagaggtgtctataaatcgatccaatccaatgacaaccgaccgatccaatcacaaccgaccgccaaacattagatatccaattgtgatcggatcggattggatgttatttttgaatatccaattggatcggatcggat

SEQ ID NO: 309548 - DNA, 606 bp, Cannabis indica
aaaaatcaaatttcccaaaaataattggatttataccacttacaaacctaaaactttgggtatttacccaaaaataaaatatatgtatatttatacacgttaagacctggcaattattgttattactactattatgatattattatatcaaaaagataattgatatatattcattcatatatagtttagtacgtataattttttaaaataaggtacatttctaagcgtggaaacgttttcaaatttagtatttagtgaaatactatactgaaataaaagaaataaaataatttactatactgaaatataatttaaacactcagttagaaataataaataaaagaatttgtataaacccgtacaatttgttttaaataaactaataatatatatgtttatcaaagtcccaatacaactacataaaaagaaaagttactcgtacaaaaaatgaatgctctaatgatattaataatgttgaaatttaaagacaattattaatgtgtacatataataaaaaataatatttaaaagacaatggtatgtaaaataaaatcaaaaataaaaataaaaataaactttatacaatacacttttgttttctgtttt

SEQ ID NO: 309549 - DNA, 3653 bp, Cannabis indica
ccacgagggatagaaggcctcgcatatgaagtcgttaattaacaacttgtcaacttcttctttaagtgttccttgtctctcagagtctaatggacatcctttttgccttttttctagatagctggggtcaatgtttaagtgatgaaaaattatattagggtttatccctatcatatctgagtgtctctaggaaaattgatcatgacttgcctttaaaaaatcaattaattgctatttagtttttcatccaaaattcttcccaatgtatacatattttgtgggattattaggatctaataaccttttccatctcttcaataggtttgagctggttatttttgtcgtagattctaggatctagatcctcctcttcatgtttgccttcttctgttataattaccatcaattgatgagtggctctcctgttctaaagttctattcgataacactcccgagccaataattggtcgcctcagactactcctactcctacttgtgttagaaactttagggacatgtgtttgattgagcttactgcccctaatccaattaatgatgggcaacccatcaatacattgtatattgatggaagatcaacaactaagaattcctacatcaacatcgttgataagggtggctctcctacagtcaatgggagttcgatgatgcctaggcttgcaatgctatctcctgtaaatccacataggctcaccatgcaaggcttcaactttgcatcctctaaccccatttttttcaatgtatccttgtaaaggatgttgactaaactcctgttgtccaccaataccctttttaccttcttattggcgagctggactattaccacgaggggatcaacatgtggatattgtacgtgttttgtgtcttcctctaagaagataattagaggtcatttgaatttgccttttttaatggttgtggagcaaacgccaattttccattttttatttcattgatatactctcttttgggcattattgctatttcaagtgaggtgtggtcctcccaaaaatgaccaggatatccttgctctcaactgggggagattgcattctctagttatttaggttattagggtaatttggctggtttagctcgtttccttgatgtcttacatattttttgaaaaatcctcacaaaatcaaattttctatctcgtctttcagttgttgacattcttcaagagtatgccctatgtctgtgaaatcggcaatactttgtggaatcacgcttatgtcttgcgttcctcatgggcttaggtttgcaaaattcaatcctatttttatttgcaaaaaatatgttttcacgagtttcattcaacttggtgtatactgaataaatcgaaacatacttgttgtgctttttctgtttctttttattcttagatgattctttcgaatcatcttttctttttgtgtttaaaccactagaattatcttctttagtcaagaccatactcgctgttgctgtactcgtgcttggtttacttcccgagccagttttcaatagcttcatctcattttttgcttattctttgcacacaaatacttgtgctctttcattaaattcattgatgttcctcactgggcgaccttgtaggtcatcgcacaattttgctccagccgtggataggtcagctgtgacccctacctgaagtgcagtgagttgaatactatcattcaagttttttacctttgtagcggcaatgctaaagcgacttaagtaagccttaagtgactcgcctagttgctgcttttaaggacgatgcttcaggtcgcctatctctagcgacttgaaattactttttaaagtcactggacaactattcccacaacgttatagaatgataagtaaatttgtcaaaccagctacttgcagctcctgttaaagaagtcgggaataaaatgcaacgcaaattattcgtgacattgctggctcgcataatagtgttaaagttcaagtgagcgactgggtttgtgctcccatcatactacaaaacatatgggtttttaaatccctggggaaattcaaaatttaggatatctggattgaatgactcagtttcctaatccgaatcgtagcttggaaatttaccatgctctccatcttgatacttcctaaacttatcttctagttcatttatttgcagttggattggatccacttgctgttgattcgcattttggttaagctgatggcacaaattaggtacattttgattcagacgctcgtgaagatctggttgtcttcgatttaagtgttctcgaaggtcaagctaccttcgctcataattactcatatatcttgcctccgaataactttcagattgataactttgtgaatggctaatactttcttggtcagcataacatcgaggtctacttccttctcccgtttgcctactcgatcgactatgtcctcgagacctttaacgtcttgaacttgaacttgccttatcttgtatcggaggccttcttcttcaaaagaggttaaatacatgtcctctattcaagtatgtgtatacatcctctctctgctcgagaaggacgttgatggtgtcttggaggtagcccacttgaccttggttagtttctagggtttctctcgtttccatgagggattccctggttccttggtcgaggctgtctcacatcctcattcctgcgagacgcttctagtatatcattttgttcgttcccttagtttataaatccttgggatccttgaggaatgtctcaccatttctcttgattattatttgtttgattatccattggaacatcccttgtacccttaggttgttcttcctgggtgttttggggttttccctagtttgtttcccgtctcctggttctaaagcctcgaggttgaccttgtggtcttctcaccgtaggatcaggttaattctgaggatttcttccttgtgtcgccgtggccgttgtagcctctctttccaacttagcatttcgtcggttaaatttggctaagcgttgtcggagttgtctattctctaacaccacaaatggtacatatctagttgggtcattagcatcctcactcctaggcacgtatctggaagaattattagcatcttcatttattctttcaggaatttgatcaccaccaccatcgctcctccttaaatcaagatgtttcagtggtatggggtctttaagatcccattggctcctttccagggcaatgagttgtttctccaaggcaatttccatcattttgattgtcagtagccattgaatgtgattagatcaaatttataaggagggattttttctgagttttattaccaaggctctcaatgaaagcaacaaactactaatgtagatttttgttaactaagttaaaatagcctttacgtaatgaattctatacaaaaatatatataagtaataaatgataagatcacaccagatatttttacgtagttttgtagttaaattctacatactccacgagtccttcttattagggatatttttttggatatagaatacaatctcaaaaatttaatcgtaataattctctctcaaatctttcgtcccttatcccatggaatctgcccctatttataggaatataggttggcagttacacttttttgggactgattcaaatac

SEQ ID NO: 309550 - DNA, 1421 bp, Cannabis indica
aaaagaaagaaaaaaactaacaactcaacgcagtggtgtgagttacccaacgttgtcgattcgctacaagctaagctacaataggaagaatacattacatggccagcctcttcgctaccgttaatacattgataggattaggagtccccgtactccctcgcaaaacggcatgggcctccgtttattgggttttggtcgtcgcgtaaataggcctaatactattcactgaaaaatagctgtccttggtgaggtatcgattcttaatcttttaaggggaaattttaaatatacccaaattcagtatattaaaaaaatataaattttatttacacaagtacagattacgagttgttaaacaagttttacatgttcgtaaataatattgagaaatgttacgatattgagaaatgttaaagggcatcctgaatgatcttatcaatacaagttgaagaaaaactaagcttgcaaaagatacaaggcttagtgatgcaatcctttatttataggagaaaagatttacaggtacaaaaggaaaaactgtaaagaacaactaacaaccttgtaacaaaaagttagttatgtacaagaacctgacaactatacacaagaagctaactaacaaaacaactagttttatcacaccttcctatgtgtcaatatcgttattggtagagaaagtgttaggcactattaatgtctaataacaatgtaaaaaatattatatcactattaatgtaattaagtacttaatcttacataattatatataataatttttttaaaaaataccattaactattcacaaagtattattttatagtagtgaaacccctaaacctaaagtttgcatactctaataactaaccttgagacattttttcaagtggaaatctcccaaacttatattttgttaggtcaaaattatattgattcacatattttaatcatttaaaaaatcttttaaatcgaaaaagttacaaaattttcaagttaaatttttactaagtaaataaaaagtaaaaataaaaactaaaaaaagaaacccctaatttccctaaaccatctctttgacccctccctcactctccttctcaatttatggaaaatttattaacaacccccttgtagaaattagacacgatgaaaatatgcatgtcaaatttataggcgatcgtatctacttttcttaccgaattcaataatttgcatcatacaacgagactcgatagaaaagacaaaggcatgaccgcatgggtaccattatgtctccatcaattgtaatttgtaatatttatattttaatatgaaaaaataaatggtgtttaattattccttttttattaatttttgtttttaaaataaaaaataaaataaaaatatatatttttttttgtaaagaagtgttctttattaaatcgagc

SEQ ID NO: 309551 - DNA, 843 bp, Cannabis indica
aaataggaaacattttaatatatagaaccttgtgcaatgatctatatactacctaacacttgagagaacaatgcttatagttatagttatagttatagataatagattggtaaaaggagttataagtaagaagtacattattactttttcttttaccaatattttttttatgataatataaatgtgattattattttaacacgttgtctacaaaattagggttcacattgacatctaattccaaatgtatagatttaggaccacactaattttatcatgaaacaaaatttatttgaagggattataaaaattaaagaagtaggcaatttgagaacaatgcttatagataataataataggtaggtaaggactaataattaaggggtgcattagtttttgcaccaatatgttttacaataataaatgagattattatttttaacacgttgttagaataacacccaaccagatgtatagatttaggaccatacttaattacatgtatataatgtgcattgctaatttgttattagtgatgtttagtgtcatttaaagatggcatattacaattaattcataatattttttaaaaaattatttaattaatttatataaaatttgatatttaattgtaccaataacaatataacacctagagatgacactggcatatttttagcattaatttgtacacttaacttctgaattttgcttttggtggtaattaccctttaattaacttcaaatctcactacaaaaatttttatttttagtcttaacaaaatttgtaactaaaagtaaaatagttgtgtctaattacaaatcatcattcttatgttgtga

SEQ ID NO: 309552 - DNA, 1679 bp, Cannabis indica
attaaaattaaaaaaaatccttaaatccaataatctcaatagtttaaggagtatttttggcgaccttaaaagtttacgggacatgatttaatttatgtcaaagtttaaaatataaaaatcctaattaatcttaaaaaatttaaactaaaaatttctccttcgtaccgaactaggaatcgaaaaaccccttcaaaggggtgtacaactttctcaaaattatatacctcaaaagtctattttcccaaggctcctataaattattaaattatggaaataattagtatacctaataaataatgatatagcatgtttctccattgcattcttcacccttctaaaaactccccaatctcctttattattcttaccaaacattattattaatattgaaagtcttaccgaacattatttaagagttagttaaagaagagattttttttttcttttaattaaaaacattcaaaatgaagaaagacaaactttgagtttggactttggagaattacaaggaaaaaaaaatgattgtcaaaagaaaaggcaaacactgcaaactctaatataatctggcgtggacccaactaaggctaagggtgggcagctgcccctaaatttttgcattttagtccatcttttacaaatttaacaaacatatccttgtaaaataatttcaaattaagttttctatgtaatattttttattttgactctcatttatgtattcatagtaagtgtgtttattcgattaagttcttattaatttactcatagtgcatttgatttgcactaagtgtacatttcatattttagatctgatcgaattcgcatagtaactcaaatccaattcaattttcaaaaatttaaattagatctgttattttcaattgattacttttaatattgacttatttaatatttattaacttttttttacataactaacaacagaataaaacactccaacaacaaattaaaataaataaagcaaaaaataaattctaagaagaaaaaaattgtatgtataaaaaaatatttaattttattttaaattatctattccttataaataagaatcgaatatacatttaatctaccattattgaaatatatttgaatcatatttattagacttttaaattactcttttttacactaacatatctattgtatatatatttgaaatatatataatatatggattggattgaattaattacttttacatgtcaataaatattcaatccgcacaagtacaaattttagattttttaatccaatccaatctgtacaagtgtagatatccgcactttgtggatttgattgtgcagattagattggatttagtattttataaacatccctaatccatggtaataactttttaactctcgatatttacaagtaatgcaattattcttacattttagttctttttaagagtgttcataaaatattcaatcaaattcgcacgatccaatccaattcaatccacaaagtgcagaaatatgaacttgtgtggattgaattggattagaaaatttaaaatccgcacttatgctgataggatgttgattgatatataaaagtaaccgatccaatcgaatccacacatatatatatatatattaaaaaatacatatacaattaatatattaatataaaaaaataatttaacaatctaa

SEQ ID NO: 309553 - DNA, 3963 bp, Cannabis indica
aatatgattttattagtcactaacaaagaattacttgtgactaaaacataatattaaatacatctcactaatttagtttagtcacaataaatgttgtaactaaaaatacatgtaatcaataaattgtaattttgtgactaatactttagtcaaggacctttagccacaacataagaataataattataatagccataactttttactttaattgtaaattttgttgtgagaagatgatgagcaaagtcggctggcctttatagatttatgaaatgtctttaataccttagagaagggacttcctagaaaaaatgatggaagctttggatatttcatcagggtgtgtgttactactccttgattctcttttatgatcaatggagcactcatggatatcttccatcttagaaagggctaagacaaggggacttaatattacctttactatttgtaataaggatggagtattctcacatatattctaaccaaaatagtctaaagagatgatttccaattctatatccgatatgtgagagcctccaacttacatacatgtgttttgctgagatgaccttttaatgttcaacaaaggagattggtagaattatggacatatcttgatttattaaaagttttttgcctttcaaatatctaggaatattgtgttaaacggaacaatcaatgatttacgattcagtttatagtaccaacaaacgcgcaagctttccgtataagtacatggcttccttctagatgaaccttcaagactgacagtaaggtgtctaggagtgtacctccggattaataacaagttatttgggagagacattccatacacggtacaagtttatctggaagtaccttcgagattttacaagaccttctgcataggacttttcggatccacactaagcttccgttatctgctctccaaattcacagcttctactcccggatgacaaaacttgtaaccacaaccagcaaatctccaccttgctttcaagttgaagtcgcttgataaatcattatttcaaatattgttgtcctttaagcccctccgagctcagctgactctgatcagcttcaggcaatgctcaaacttattgcttggcactatcttggttatcatattagaatgattgtctttagttggaacttggcaatcttcacaccttctttctccacaacctctcgtaggaaatgaagcttgatatcaaagtgcttagtacacgtccatggtgcacacaattcttggttaattgaattgcactcagattatcacaataagtagtaataatcttttgattgagctttagctcatccatcaacccagttaaccacagtgcttctttgatcgcttccgtcaaggccatatattcaacttttgttgtcgatagcgccacaaccttttgaaggtttgctttccaactaatggttattccaaacatagtaaacacatatccagtcaaagactttcatgtatcaatacaccctccgcataatcagagtccacatagccattgataacatccaggtcttgattccggttattcatgccaaatactagtcccttctcagcaattccgttcaaataatgtagaatctatttcagggcttcctaatgctcctttgcgagatttcccaatatactcaccatgctcaatgcatatgctatgtccggtctaatacagaccatacatacatcaaggagccaacaacgctagcatatggaactcttgacatctctgacttctcagtctcatctttcgacatctgagtagcactcaatttgaagtattgtgcaagcagagtactcactgccttacagttactcatttcaaaggtatctagaacttttttgatgtagcttgtttgattcaagtacagtagtcatttatgcctttcctttcttatatccataccgaagatcttactagccggacccaaatccttcatttcaaactccgtctttagctggagcttcaagtagctaatctcttgtacacttttgctggcgatcaaaatatcatctacgtacaacaatatataccaagtatctccatttctctctcaaaaataaatacaaggatcaaatgtacttctcttcagacctatcttggtgacataatcatcaaatttactgttctactgtctcagagattatttcaagctatacagagacttctgcaacaagcacaccctgtgttcttttctagcctcttcaaatccttcaggctatttcattagaattctttcatctagatgtccatacatgaagggagtcttgacatctaattgttctagtttgaggtcttgacatgcaacaagttccaacaaaattctaatcgatttgtgcttaacaaccggacaaaatacctcattataattaactccttcagcttgagagaatcccttcgcaaccaacattgctttatattacctcttgtactcctagaatgtcgtcattccatttgtacacccatttatatcggatgactttaccatcttttggcatcggtattacatcccaaggctggttcttctttagggagtgcatctcttccgacatagctccattccatttcttccggtctttgcttttcatggcttgtgcatagctggtaggctcttcatgcacaatctgattaacaacatgaaatgcaaatacaattaaatcagcaagtccatacctatccagagtctttacttctctccgtattttgtctcttgccagtttatagctttttagattatcacttccggaatcatctttcaaatcattgcttatgtgatctataggtgtttcagtgtccaccctccctagaggctccacctcaatctcatcagagcttcgatttcttctcagtcaggattgattttacttctagcagctttgtcaatgaatcacataacagattcattaaaggtcacatcccaactaattacatatttttctcattttaggctacaaaaaccacagtctatatccaatgactccttccaaataccccaataaaataaactttaaggccctagcctcaagtttatcttgcttgatgtgtgcatagcagacacattgatcgaaaaccttcaagtgttcataacttgttggcttccctgaccacaaatcatctgatgtcttgaaatccagtgttgttgactgacatttgtttatcaaatatgctgcggtggacacagcttctgcctaaaacattttaggcaatccaacactcaatagcatgcacctgaccctttctaggatggtcatgttgaacctctctgcaagtccgttttgctgaggagtcttcctcacggtcttgtgcctttctattcattctttcttacataacacttcaaactcatccaaacagtactccataccattatcggttctcaacagtttcactttccctccagtttaattctcaatcattatcttctagtgcttaaatctcaccagaacttccgtcttattcttcaaaataaacacccataactttcttaagtaatcatcaactattgaaagaaaatacctgctcttggagtgtgatggtgttctcgagggtccccataagtcattgtgaacataatccagtgtcccttggtatcccttttgctggttccaaacttaactctacaagctttaccaagtacacaatagtcatcgaagtcaaactgctcaagccttacttttccaagtaatccatgcttatttagttcatgcaaccctctttcactaacatggccaagtctcttgtgccatacttcagtttcattcacgtgcttgcttgaaacacatgtcttcgtgttttttaccgtgttaccttccagaggataaatcccatttgattttcttcccctcatcaccaccattgaacctctacaaactttcataactcctttctcaaatttaacaagaaatcattgatcatttaacataccaatagagatcaaatttctttt

SEQ ID NO: 309554 - DNA, 2034 bp, Cannabis indica
gaagatcctttatcacacctaaaaaatattttgagatgtagatggatctgcaagcggtaaggggtgatgtacggtggagaatctttcctgccacactagcagaggccgcccttgcttttaggaaggtttaactcatggaatgccttctcatcagagttccatgcacaattttcctcctctcgtcaacttccctcacacctagaagacctgatagaagtaaagaaaatgccaggagaacccctcagagcttatattggaaaatttatgatcgaagctacaaaggttaaggggctgactaaagaaggaagactagctgcaatactgggggcattgagcctcttggagagttgtggaatgatattaaaaggctaactataggatcaatgcctaaatttttggattgagcaaatggatttattaagctcgaagaagctatatgacacattgatactgtcgggcaaaataaaaatcaacaacgcaccatggcggtagggatgtccatccagaatccacaatatcctagcagttcgaattcaaatgggaagaggtctagcaatgataacagacagggtagtggaaagaaagacaaattcactggcaatgccaagcagcaccctagagaaaatgcctctaaatttactgctttctcagtcctaacagatgacatagagacaatctatgcaacaactcagtctatggtgtcgtataagaaaccgtctcccatgaaaaaggatgtaagcaaaagagatacaaccaagttttgccgctttcatgcgaactacagccatgacacaaatgaatgtaataatttaaagtgggaaattgagtttttgattagaaaaaataacctgcttctgtaggtcaaggctgatcaagattaaagggtcacctagacagaaaataatgagaacaaattgatgcctccaccaatggacatgcatttggaggttattattgggggtccgcatcttgctggagactaaggcaaagctagggaaaagtatgctcgagctttgcagtatgaacaaaatgaagcaatcttggtcgtagaagaaaggaaacctataataccacgtatgggggagccaacaataacatttactaaagcagatgccaaccacatcatcttctcgcacaacgaccccctggtcgtagaagtgcaaattacaaataagatggtggcacggactatgatagacaatggagcttccttgaatattctgttcaaaacaacttatgagaagatgggactccaacttaaagacttaatcccttgcactcaaattgtatatggtttctccagccagattgttgcaccccttggacaaatccgcctacttcttactgttggacaagctccgaggagcataactgtaatggcacaatttctgataattggtgtcccttcaactttcaatgtcatgttaggctgattggccctatatgacttaaaagctgtcacatcagtttttcatctatgcgtcaagtttccaacaaaaagtggagtgggatgtctcaaaggaaatcaaagaattgcacgggaatgctataaccttgttctaactaaggttaagaaggaaaatacctttggctagagtttagataaggggaaaggcattgtccaataagaaatcgcccaaggcggggacgaagacatgaatctctgacttggggaaacaaatacaaatgttgggccaatagaagaactggaagaagtggaaatcaatccagatatcccgaccagaaaactcaaaatcaataaaggcttgctgctcaaaataaaattagttttaataaaatttttgagagaaaacctggacgtttttgcctggtcacatgaggatatggtcagtattgaccccactgttatatctcaaaccctaaacattaacccaagcttttgtctcgtccagtcgaaaacaagactactcgataaagaactggcacaagaactgaaagaagaggtagagagactacccataaacaagttcatcattgaagctttctacccggcttgggtggctaaccccgtac

SEQ ID NO: 309555 - DNA, 2341 bp, Cannabis indica
caaggctgaaattacttcttctagagtaatttttgtcctaccatatttaatggcattcttcacttctttgtaggatccgggtaatgagtttaagatgatgatggcttggttctcatcacttaatgcctcattttcatcagagttagccaattcaatatgtaaccttagaaattcatctaggttttcatcaagagtcttgttagtgctcatcttgaaaccaaagattatttctttaagaaagatcttattaatccaagatttctttcgaaaccgatcttcaagatttttccatatttttactggagtatcttttttgtcaactaacttgataatagaatcagacaaattgaaaatgattaaaccagtagcagttttaagtaattcttcttgtgtagatttagaagtattttctggccattctataggttcactaagaaccctaactaatttgttatgagcaagaatagttataatcttcttcctccaaatcctataatccctcgatccatcaaacttctcaacatccactctaatattactcatgttaattaattgaacaagataataaaagaaagaacgtaacaagataaagtttaggttagagttttcctgtttatcaatttcttgatagtttcatattttgcttcttcaatgtgttgatgatctttcttgtttcttgactttgtttccaggtgttgttgaatcttcttgcttccccaagctctgataccactgtaggatataaatcactacccgaaattcccctacaccaacaccacaaagtacgaaaaaccaaggtcaatgttgacctttctctcttgtgttccccctcaaaactctgctgtttaaggtagtataagacctcccttatgcaacacaaaaccctagctgcataaacactccttcctctaaccttagccagccaaagccccctttctcttcttctcttcttctagcttgaaaccctagcagccactcctcatcatctccttctcttcttcttttccaagctcagattcaagagcttctaaaactaaaccattgctgcgtttttgttcctccttaagcctttctaatcttcttcttcaagctctatgagagctttctaacccaagcctactgctgctccttcgtacctccaacacacacaacaagcaacccgaaatgagagaaaaactaaagaaaaaccagtagaaaaataaaatgaagaacacaagaattgatttcggagttccttctaaatcagtggcacatctccgtcaagcgaccctcaaagttgcttgaatcttcactatcaaaatcaatatcgggttacaaggaattttgagattccaagctacaaagttagctggtaatctctatggctctttctctcttttctttcttttattttctggtttgtattaaaatatatatctctaactctctctctatttttctctcttgactgaggttatttctgcatgacaaagaggctgctaccactctccttggctgggccaaaaaaacacattgtcaaaatggataggttgctcccttatatattgttgttgttgactgtgatttttgctgtgttttgagctaagaaaaacagttagaaaactgttattgtttattccttgtgttgctgaaagtttgttggaatcttgaaagtttttatttattttcttgtatagtagatagataaaagatttaagcctatgaaacagaaccgactactccaagagttataatggtctgttgaggcttgtaaaaaagaatattactttattttccttgtaacttatttaaagtattttcccatgtgacagttagtatagagatttatccaacaaaaagattacctgaataaaacccactgaatgacctaagaagcaatgaatatgacctattttactaactttgagcttgataatcatttgattaccattgtaagctacaagtaaaaacaagaccaattaaacataaattaatttcgtaataatccattcgaaaaaaaaaagagtatatgcacataacaatcttagtaactcgaaaaattgtttaattttttagaaagcaaccaaaccaaatagaaattaatagtattgtaaatagaaatatctcaatcgcaaacttgcaaatggaagattgaacttatggaccaataaaagaaaaacaaaagtagcattaggttgtttttcaaaataagtcatataagatgcagtactccatatagttacatgttattaatgtgatcctcattccattcaaaaaaagctacaacagtacaagagaaggatataagaaataccatttactaatataacaagaacaaaatattgttggattttgtgcccta

SEQ ID NO: 309556 - DNA, 2252 bp, Cannabis indica
cattgactttcaataagatatatgttatcccaatttttgcactcttacgtggcatcacacgatggtgacacgtagaatcgactccgggtacctgctcgcaagacgcaggccgaacagggcatctcatacattttctcggacaaagtcctcctgaccgagtagtgagcaatccacgcagagcgccaacaattagcaaattcagctttcgcatcgtgattcattaaagaaatccctataactttgggatcagattacagagatatggcaagctgtccaaatccaaagattagtgtattctgtatttattatgcaattgtaactagaagggaaatacttccactccaagcttatagccctataaatagtgactcatactcactgggtaaggagtcgaaagattttgtctaagaattcatattcagagatactattgtaagagctctaagaaaaggaacaatttttctttttcttaagtcaatacaaataacgaggattatgctattaccgaactgctcgcggctgaagctctaaaaaattcttgtgtctttatttgatttattatatttcattcatattaaactacttgtcgcttacaaaattagacttactgtcgttggctaaaagcaaggtcaactttatatttatagtatattaaaataatataaatataattaattattttgtatatttttaatgagcattaatggtaacattgactttataactaatttgcacattctgcaatggagcaaaaatataaaaactagttataaaagtaattttattgtgttgttaaaaaaaaacaattattgtcaaacttctatgatagatttaaccattactttaataatgaaagggtttaaaaaaagcaatatccaatataatctaattttgatgaactagttaatccaattcacaaaatacggatatttacatttattaacggtgaaagtggttagaagttgctcgttagattggcgagatgaaacaagagatgagtacaataaatagagacaaaaaaattatagtagttcactcctcatgtcataatgataatggagttacatgtactttgagtttttatttctcacgagaattaaaagagaattgactaagtgtaaaagctctaaagttttagagatagaaactagagacagattctctaaccttatgataacttttctgaatgtgaaaatgagctaaaggagcacttttttttataggaaaggaggtcttattaatataattataaaatattaaaaaaatgtgaaaaaatacatgtaagctatttttgaccgttaatgatgatctaacagtaaaatttactctggaggtcggtcgtcaatttttgtagatttgaatcgcgtccacaggactttcatcaggtaagttgtagttgaaattcataactctcttcaggatgaaatatgggcttgatatcttcagatttgcaattggaataatgtgagatatgacttgatatagaattgaaataaattcaaaactcaagttgaatcgtgtcaatcagatcattattgaataagttatggtcattttactaaaggtgactctcataccagttcccaggttcacataagatgtcaacttaaacgctgggtgagtggaaaatcgtgctaggaatatattttttgttgcctaagtaatatcttgacatcacttagttaattttttcattctagtgaagtcgttccccgattctcagatatgttgctcttttgctgaatcaggagactagaaactgtctgattttcaattaagggactttgccaaaaaagtaaaaatataaagttgtgaatttgacttgtctaagttcatagatcttgtttgatttgaaaaactagatgaacgctcaagacataatcaaaatcatataagcagaacacagtgcacaaggccatatgtgaacctggccactgggtgctcttttcaaagcttccaggatgtcattttaatatttctaaggtcttaaaaataaaggatgaggtctcctacctagtttttgaccatgatagagcgaatgcccaaagcaaaattggcattttgagtgatagaaaccaacacactaggttgaatgtgaacctatgcactgggctcagtccttagcccttcgggattcttgttttctcctcaagtttacctatatctttgttatttttaatggaaaaaaaattacctagatcacattttttaggaaaatgattagaaatggcctagattgacaaaatgtcaac

SEQ ID NO: 309557 - DNA, 1212 bp, Cannabis indica
aaacccctaatggataagtgaaaatggatatcgtgaggttaaaatcaaggtgcagttagtatcagacgtcgtggttaagcataatcaagatttctaaatttaaacctaggatttctatggttatcctagaacagttcaagaacagtcaagattcgcagatagaaaccgagaaaattaagcatgcaagtgtataaaagaaagaaataaagaacttactcactggtttgaagatttttgttctgctcggatggtgttgacaagagttttcctgggaattctctggtttttcaagaataagaatgactaaaagagttacttagggtttccaatattattcataagtagttcgaaaaaggaaataatcatttaaaaaaatttaattccttgaattccctccaaaagtatacattatatactcattacaggcagagtaaccgtcatcacgcgcgaacatcaagtcgtgatttgaggcagaactgtaaatcaacattaatgatctaaaatcgaagagacgcttagtcaaggtcatgtcagtttgtcattcgatgcctaggacacgggtcacccatcttgacaagactccagattgagtgaagtccatgtgcgaccaagaaggtccagcgcagacttggggggaaaatgttatccagttttttgcacattaacgtggcgataggatcagatgacacgtgtcctatagttctgatacctgggtagaggaaggtacccctagtagcctgcacatgatttgtcagcgtctacaattgtctattaccctaatagagttgtacataagacatctaaccaggtagaagcatgtttgtgtcgagcaacttacaagagatagcaacttcagaataatctcgttgtgtccagacacgaaggcaatccctacaatcgtgggattgagttagagaaatatggcaacctattcttgtttcctatttcttatattgtaattatgtaatcattgtaatttcctattttatgcattgtaaaaaaatgggaaaccatccctcacgcattcctataaatagtgacctagcgtcactatgatagggattgaaagaattgcctcagagagagagattctagagagaaaatagtgatctaagagagttactcagagatcatttgtaagatattttaagaggaagaaaactttgttccttctcttaagttaatacaataaaaggggagtaggctattacc

SEQ ID NO: 309558 - DNA, 1234 bp, Cannabis indica
agccaaaaagaaagtgcagacaaaccagttgcatatacacctaacttcatactgattcagacaatttgataactcttccttaccacattcctatttgggcaaaattcaggcctaattagctagcattggcttttcccaaatatagacattcctaaataagattcagtgctattcttagttaaaaaaccaatctcatcaaatttctcctccaacatagattcttcttcaggagtgaattttgacaataactttgattcaattcaaacacttatacacatgatcagtcacaattcacaaattacaatatccttaaaagaaacataatctgattttaagcaattctcaatatctgtagaaacattcaataaaggactaaactttttaccagccccacaacccttttaacatgggattgattgaattccttcaaaaactcaaatctcaaaaaggaaaaaggaaaaagaaagaaaaaaaaaataataatcccagcaaaagggataactcaagatatgaaaaattaaaataaaaattcaatctttaagagaatcaaatatgaaaacaacaaaagggttaacaaataatacataccagtaggttgatttctggtctgtgatctcattccatgattaaaactttctacatgttcttttcttctccaactacccataataataacaaagattttggtctcagaaaaactgggtgaaaactgaaaagatcggattttgattatatgggaagatgtgatttttaaatataagaaatgaaaaagaaagtaggaggcgttagaaagaaagagaaagatgaaatttttgtatgatttgattatgattttttgttattgtttgggggagaagtgtgtggttttgttgttggtatttatagtcaaagacagagtcgccgccccttgtttttgtttctttcttaaaacatattttcacattctacttcgacacgtgttgaattagagataaggaaaatttaaggtatccgacggctgagattaatcaagaggtaattagggttaaaaaatagtaacgtaccttgacactcataccgtgagattcatctaatatactactaaatacattccgtgaaagtacatcactggacaaaatcgtttccctatatatatattttgtgttttacaccatgaaatttctaacttttttattttattatggggtagatttttttttcaaaaatattgtgtaagttttatactgtatactgt

SEQ ID NO: 309559 - DNA, 1278 bp, Cannabis indica
aacaaatagtcggacataaaaaaataatttttacacatatttttattataataattgtaattatagcattcctctcgtacacatgaaaacgtctctctttatcaattctttaattaataaacattattacacctgatgtggcctgttattacacctgtaaactaaaaaccttttgtaatataattgtgaagcactatgaagcaagggatggaaatttgactcgggatgaccggatactcataggtagccactccgaatgggcggggaatacccgtttattggattatggagcagggtacggacaattttatttacccaaagtacgtttaaggcaaaaacacaagtgatactaccaattctatattcaatatcaaaataaaaatatttatattctaaatatttattcgtattatgtattaaagttattgactacaaaattattgatttattttttattactattatactagataccttttaattaatatagtgttctacctatcaattttaatttctaatatcttctttaacttattattatttacaaacttagcatcaatatatggggtatatgtatcaatatatatggtatagtagtcatatatatgcatagcttagccttccacatttctcctcacaaaaagataacaaattaaatagtgtatgttattttaaattcaaaaactctttttatttacattttgaattacataatgttattttattatttttttagtttttatgagtattcaatgaatctttatatccaatggggattcctttaacctaaatttgttgggaattaagcgaggcggggatagggcatagaatttttcactctatgacattttttatatctttttttttttttttatattgttttgtcgtaaaattaaaaaaattaattatattttttatttaattattttaattatttattagttattagagttgtaaaatttttaaatttttaacgttattaaattatatgaagtagcttgatttatgatttactgctcgcatcaattgtatttgacaagataaattttctaatttttctatttatcaatatggtttattaatttgtagggaaatattttgtaaaatttttataacatttttattagggaaatttgaaattccatgctttaaataccctataatttttcccctaaatgtattatcattaaaattggtcatatatgaccactttaatgattttcctaaactacccctcacattttgttgttataattttaaacactacgcaagtatacg

SEQ ID NO: 309560 - DNA, 1106 bp, Cannabis indica
ccaagagcttggtttgccaagttatcatctgcactactcagtttgggattcactcatgccaagtcagatacctcactttttctcagaatccattctgtgcatacaacatatcttttggtttatgttgatgacattattgtcattggtagcaatgacaaagaggtatctgctcttatctctcaacttagttctttatttgccttaaaggatcttggcaatcttcattattttttgggtgttcagattacacagacagagaaaggcttgcatttgtgccaaactaaatatatacaagatctgttaaaccgaactaagatgcagggagccaaatcgagcagtacacctatgactagtggtctcaaactgtcccattttggcagtgataatgtcctcgattccactctatacaggtctgttgtaggagctttacaatatgccacgattacccgacctgatattgcctattcagtgaacaaagtctctcagtttatgcaaaatcctttggagtcccattggatagctgttaagagaattttacgatatctggctggaactttagactatgggcttcacctacagagatcttccaactatgatgtcactgccttttgtgatgcagattgggcatccgatcctgatgaccgccgttccacaactggttattgtgttctttttggttccaacattgttgcttggaaatctaagaaacaacaaacgatttcgaggtcttccacagaggcagagtttcgcagcctagctgctgttgtaactgagataacgtggcttcaatctctactcactgagctcaaaatctcattgtccacacctcctactgtctggtgtgacaatttgagtactgtcatgcttgcagccaatcctattcttcatgcgcgcactaaacacatagaaatagacctatactttgtacgggacaaagttatgcagcatcaacttcaagttaatcatgtcccttcccaagatcaacttgcagacactttgacaaaggctatttcaagctccaggtttccctttctcagagacaaactcagtgtggtctctctatccacacttagtttgaggggggctgttgaagaataggattagtt

SEQ ID NO: 309561 - DNA, 787 bp, Cannabis indica
ctttattctgatattttcttttttattttattttatttgttaccgcttgaccgtttaacacttgcatagtacaccatgtattaagaaactcgatcaccgggagtaacctcactgtttcttgaagttatctttacatgagagtagttacatagatgtgcaaaaaaatttgaatgcttctgcgacatatggttctcgtataccataacttaacctatgtgctcgccaagtgatcaaagaagtgcctttatgggtcactagccataccaaatccccctaggcgtcttgatcatgaatcttaggtcggtgttacactttttagaattctccacttatttgaagatttgtggagtgaaagtgttgaactcactaaagaaacaactgaaatcatctcaagaccaactcacaagctttgctgagggcttgaaagtgtcgtcaggtttgtgagctgtagttgactaattttaatgaagtaccaaaacaactttgttcaacgttctagcatattcatcaaattaaatataattacattattgttagctacgttggaagaagaagtagtagttgcaaatttcgtttttactcctgtaaaaagcaaaaaaaaaattgtaggagtgttcttaatttttgttaagacaaaaaaagagtgttaacaaaataatagagaaataatgaataaaagtaaaaagaaatacatatttaagtaaagttttttaaaaaataattaagatcttctttataaaatttgattaattaaaaaaatagttttgaaatagttagagtgagaata

SEQ ID NO: 309562 - DNA, 926 bp, Cannabis indica
atgatttagtatatataaaaattcggaggtacgagtttggtacatggactatcgaccaaattaataaatttgaacagaacttcttgaatttaacaatctcaatagttcataagtaatttttaacaattacgaaaagttagagaggtatagcacaatgactaaagagctagccacccataatgcatagcacccttagtggggtgtaatatcgttatcagtactaatttaatatcaggtctcacttattttaatttaataaaaaatataaaaaaattgttaactaaatataagacgttacgtcatagttgtgtttaggtacattagtgtccttaatttcattagttatataaaaattagataaattattagtttaatagagttgaaaaaaaaaaaaaaataaaaaacgtaataaattaatagaaactttcaattctggtatgtagaaatggaaactagtgtacatacatacataaatgtgtgaccacttaactcttacccatgcacatatcttagcacaaattccaccacaaattgtcaataaggaccacttataatttttcttctttaataaaatattattcatacatttttatcctattaaaataatttctcaactatttcttatatttattattaattaacataataattgctaaccatatatataaattaataagataatgaaattattgcaaaagaaagaaagagaaccccaaaaagaatcgcataacttatttttcatcacttccctcaattttttttttattaattttgttatttttttagctccaaaaaaacacaaaacccaaaccacaaatattacaaagatacgatacataattagtgtacttagttcaattttttttttagtttaatttaagttattaattgttttttcttttaatcaagctcttctcctcctcctc

SEQ ID NO: 309563 - DNA, 1194 bp, Cannabis indica
taagagctctaagaaaagggattattttcctttttcttaagtcaatacaaaccaagaggattaggctattaccgaactgctcggagctgaacctctataaaattctcgtgtttttatttactttattatattatatacacatattatactacttgtcgcttactatttagactcactatcgtttgctaaaagcgagctcaagatattggtgccttcattgagagttgaacttaagatcgttctcaaacctaatcacaaatacaatggtggtacagactcgtggaggcgtggttgatccggcgaatccacagcgatggatcctgcagtgtagaacaagggaacacaagggttccaccaaccacaaatctcgaacaaccctcgatcatagctcatggtgtgatgactcctgtgagtacaatcgcggctggtgtgcaagagagtgggattaccagttcaacagttaatcagggaattctcaacattgtcgttccgcccataaccaatgtttgaaaaactattagagatgagaccaaaatctaaaacatcggtgctgctcttggagtcatgcaaggtcataccaacaccctggatcacgatgaggaggagctccgtgccgcggtaaatcttgcatttgaagagaagaggtgcatgttcactgaatggagggacaaggagatggaaacattaagggctcaacaagtagccaattacgaacgaacccagcatcccaccgtgttatttgaaaagcctatcaggctacaggacaacagcccgtaatcatcatccccctgggcgagacaaataaagatgcagcagtgaacacctctcagtctataaatggtcagccgtccaatccccagtcacatgtcccacttgtgggcgaagcggtaggcaagcagaccttgtctaacaattcatcaggagaggttatacctaatacttccactcaggttaatggtttctgccagctgatgggccaaaccaaccagtcactgagacagcccggtgattctgtatttaatcgtttggggatagttcatgatctccgagatgatctaaacagaaggagaggggtagacgacctgcatgacgtaccagccgttcatcccaaaacccgcgctcaaaatctcgctcaaagagatgttgacgcgactctggtcggccaagaggccgaacaagttagtccagccgtgc

SEQ ID NO: 309564 - DNA, 2435 bp, Cannabis indica
atttacccccaagctttagggactctttgagttgtgggagcttccattcattttctagatctcgagataagttcacgacacatggtgattgttgggatcacaaatgtatttcttgagttgtcactaattaaaggaccaagaaccagctttggcaagtgttggccagcctttgcatgtgttggccagccttagtaggtgttggccagcctttgtacaactttccttgcaaaggtcagactttcttggtcgaacgggccctctttggtctgacaatcacccttttgtcagccagcttgtgctcaaaccctagccagccatacaagcttctcctagcttgcctacatactccctttggccaaccagacatggttatgtagcttcttgatgacttgcttaactttttttgctctgcttgacagttttgccatgccttatgcagagactttttattgctattaacaaggctatattccacacatcctcagtcttggcttatgcggacatcccaagtcaggtggacaaaatttgggataacattttctccccaaatccctgtttgaacatttggtcggatagggactttccagctctcgtcttgcttacagtagcctttgttgagcagccttgtctagccaagtattggaattttgcatggcatgctttttgatctttaatcttctctctccatatatgccacatcttcttttcttcgatgtctctcctttgaatatgtcattgataagtttcaagctttttaatcttttagaaactttttgattctcatgtagattgtagtctttttaatattttaatctgcatgatagttttagaatgcataatgtgttatttcctgataaaaaaattcaaattttggcctttgttgttattcttgactctttaagtcattaagaacacgaaagacacacattttgatttgaaactaaccctggctggccctaggggtcttgtttgagacctggttggtgctagggtttaatcatgggggttggaaaactctagggtttcacccaaggaactggccagttcatgccttggtctagtgttcctggccggttcttggctgggtcataggaccctagtcgaccctcccaaagcttgggaaccttgacgagcctaggccttggttccaagcaggtggccaattttctatcctcttttgaccttggcaagaatcctgtcatggccttgtaggcatatacaaccttagtctaatacgtagttcccttagaaactttttatgcaacttaatggtgagtctattatagtcgaatgctcaacttaagactcaacatgtgtccaagttgttacacttgagactgtacttcgctgatacccagccatgtacaataacattatctggaaagtacccttgaatacgattgattagagtcttgtctatggcttggaacgtacaacgaactctgccttttggcttgcaacctgctaggacctctgccttgccttagagatttagctcattatgtggttcttataggaactctgtctggctcttctttggttgtacagttcttgttgggttgtagccttacatatttgaactgattttttatttatattctgctttaaggctttcatgttcttgcttttggcctataggcccttcatttttgaacactactattgtttagccttaaagccttttattatggacatataattatcttggctatcttcttactgccttgacatgtaagtatccaaatttacttttttgtatgccaagctgaagtatgtttgcacttgacttagaggcaggtttagtaacttatactaagcattaaaatttctttgcataagttctctgtgttagtttgatgcattgtacagtgtgggttccccccaagtgagcacagagacttatagtgtaaaaccctaattagatgattatgaataattgagaaattatattattctatagttcaatttatgtgaattggtaagaccccgttggtgagctaggggcattttagtaattatgacccaagaagggtaaaatgatgaaattaatttaattatgtgcttaatggaactatattattatatagtatgcctgtgttatcttttcaggtgtgttctcaaaggttggcgcggtatagtcacaactgggtatctcgggccgaaccaagttcgggcccgaaatgcaatttgaattgaaataattagcatttttatttaatggtgataatctgaaattatattggatttatgggtgcatgaaatgacttaattgcccatgtgagtgtgtatgcatgatttatggccctaggggcattttggtcttttgaccttattggatttattttaataaaagatgaatttttggaaaaaggagaagaattttctggctttttccttcccatacccgaacccctctctctcaaccctctcttgaa

SEQ ID NO: 309565 - DNA, 1120 bp, Cannabis indica
ttttggtttgttgagaatgactttaagaatactgttcgtctaggctagcagtgaaatattaacaatcttcagtctagtttagaaaggattttttccaaatctccccttttggatgttgatattcgggaggctcaaagaattcaatctcagattgactctcttctttgtaaagaggaggtttttttggaagcaacgttctaggattaattggttaaaagttggggataagattactaaatattttaattctaaagcttcttctagaactcgaaataactttattcatagtcttattttagatgatggttcttctgttgttaatactgctgatatcagtgatcaatttcttcttttttacaaaaatctttttgattcccagggtactaatattgaagctactgatcatattcttagttgtgctagtacttgtcttgatgaatcttcttttcagatgcttgatgaggcttgttgacctcgcttttagccaatgacaacgagtctattttataagcgataaatgatttatagtaacaaatatatgataaagcaatataaagacacatgaattttatagaggtttagccccgagcagttcagtaatagcctaatcctcgttacttgtattgacttaagatcaaggagaaagattccttttcttatagctcttacaatagtatctctgaatatataattcttagataatatatttagggtatagtcttagctcaactgcttttcgaccgatctcttgcccagtgaatatgcatcactatttatagggataataagcttggggaggaagagttcccttcttgttacaatgcgtataaacagaaagatcgtgggatcaatgctgaatgcaaggattagtgggatcgtgtgtatgccatatccacgtaaattgatccctgagttatagggattgtgttgatgactcacgatgcgaaagttgaattccctaagtgttggttgctctgcgcggattgctgaataccttgctctgggcatgccagcgaggcatcctgctctgactatgcttcccgagcagatgttctaagtggattccacgtgtcaccattcatgtgatgccacgtctgttagaattattttactaggatct

SEQ ID NO: 309566 - DNA, 2143 bp, Cannabis indica
aaaattaaagcagtttgcaattattgcgagcgtgagctggtgggagaaagttttaaggggactaggcatttaaattctcacgtagagaggtgtccagtaagaaaggcccaacttatcgctaatcctagtgcaactggtcggtcgtcaagaaagatgtgattcctacggtgctaagcttccttaatggagatggaaacatagcacctctaaacactactcttatcactcttaagcctgtgcaacataatctacaaaatcatttccaaagcgattgcgaacaggcttaaatcgattcttaacaacttaatctcccccaaccaaagcgcgttcctccctggaagactcatttcggataatatcattattgcccaggaagtcgctcactcgatcaagctcaaatccagagggaaagagggttggatggcgattaagctggatatggccaaagcctttgattgagttgaatggccatttatcttggccattcttaggaagtttgaattccctctgaggataattcatcttatttcagcctgcatctcttcggccaccttccaatttaatgtcaacggcaaagtcgctagccgtgtcattcccactcggggaatccgtaaaggatatcctctttctccttaacttttccttctttgtgcggagggtctctcatctttactcaggcagcaagaaaggaacagaacgctcactggcttcaaagtggcctgcactgcgccaaccatctctcatctcctctttgtggacgacagttttttatgctgccaggcctccatccattcgtgcaatgtcatcaaagaggtcctggctctttacaaaaaggctacggggcaacaagtgaacttctaaaaatcatctctctatttctccccgaatgttgccttgagagaccaaactcttatctcggacttcttgcttatccctgtgatgaacctctttcaaaaaatacttggggctccctcaacatattggtcgaacgaaaaaacaagtcttccattatcttcatgataaagtttggggctaccttaacaactgaaagcataaggtcttctcgaaaggtggtaaagagacgcttctcaagtcggtcatccaagctatctccacctataccatggcttgtttttgtctcccggttgccacgtgcaattccctcgagtctattatggctaacttttggtggggtttcaacgataacaattgtcctaagattcattggcaaagttggcaaaagctctgtaagtctaagaaatatggagggctcagctttcattccctggtccatttcaattaggctctgcttgctaaacaagcgtggcgtatctttaagcatccaaactctacagttgccaagattttagctgtcaggtattacccaaactcctgtttcattgattgctctttgggtcactctccttttgtttggcgtagaattttttggggaaaagagttgctgcaaaaaggtctcatctctaatgggcaaaacactttcatctcccgtgattactggatccttgggtatcgccaagtcaccactatcaacccggcgccagacatggtttcttccttcattaggaatgatatgacttgggatctctccctcattatgaattgttttccaactcacaatgttcaggaaattctcttcatcccccttcccctttaaccttccagtgatactctgatttgggagcacaccaaatctagggtttactccgttaaatatggttaccacgtaagtctctcttcaacctccccacctgatatcccttcttctttggccccttcgccttggtggaaaaatctctggcatcttaatatcccgcctaaggtaaaacacttcgctttcactacaagaaaaccaacttttgccggcgcatttttgcgccggcaaaagtacactaactgcgccggcaaagcttatctgggaagcttggtcggtaaaagactttttaccggcgcgtagaataaatgcgccggtaaaatttccttttaccggcgagaaatcacgccggtaaaaaataagcgccggtgttaaaaaaatgcccttatccgctatgaacctgctttgataaagttttgccggcgcaatagtgcgccggcaaaactattggcgccaatctaacggttggcg

SEQ ID NO: 309567 - DNA, 4065 bp, Cannabis indica
tagtagattattaactacttaagcaatattaaaggaaaaacgagactgatggaaatgcttagttaaagtatttaaagtttgatcaaaatataattatgaataaaaatgcaaacaagcaaataaattaagttcaagaataaagatgtgaggcaataaaatgaaaaggtaaaataaaagtagagttggccatccaagaatacaaatttgtctttacaataaaaaatgccacaaggggcaaaccattgtctcgtcaacatggccactttcctaaataaataaataaaaagggttaaaaaccaagcctacattgtaggtaacttggataactcttcttgctccacctcaacctcaccgtcttcaccaagctcttccttcctagtcttctcgcatagggcaagcatggcttcatctccttcacctaaaaagctgaagtctttctcagggttagccaactaggcctgataaatggtcctcctagcaatattattgaccttgtctttggtctcagtcatcgcctctttgagcttcttgtcatggtcggcttggagagattttagagaatcctcgagctccttaatcctattctagttgacctagcgtcgcttttctgcctcctcctttgcgcgagacacctcggcgacagagtcattccattttttggccaaggtgtccctatgctcccttatttggtgaagctcagcctcatacatttcaacccgctgagacgacctatgctgggtagcaaaggagagaagaaatgcctgcaagaagaaagcatattaaaagaagtaaagataataaaatgaggaaaagtgagaataaggaaaacaggaaactaaagttcataactcctttttgctagatcttcagagctgcctcgcgtgagaagctcctagtcgctagacccaagagtctggaagtgacgccaaccatttgtaacgtgcaacgagcatagttgtgaaccttcgttcccggcctcgaggggtaagggacaggaaggctcgagcataaccatcttaggacgagagccagagaacttcacttggtgcactaacctagtggggtgttcattggcactcgtcgcagctgggacatccttctctggggactaggctggctctatggttagttggcgtgattatttcttcttgttggccgtggttttggtccttttaaatcgaggcatcaccaacttgggtagctttcttcttagacttcttgtcgactgagggaggactattgaacatgttctctaaatccgaatccatatcggcgaagcaagggaagtacattagtacataagcaaaataaaatgagggaaatggggaataaactcccacgtgagaaagttactgtaatttttagaaggtgacgagggaggactataatattcactaaattccctagatcctgttatcataaatatatcgtaagggtttcgtggatctaaaacccaacttgaatctatatgacctgataatccaacatagtcccaactgctcggcaatcccatagtaggaactagtacatctattatgaacatggaattctgggtaccaactatcaaacctttgtgttatgcgatcattgagaaagggattccaagtgtaagaactgtatcgactatctcagattgatactagggtgttacgttcggtcgtgaccacccacattgattaccttaggattttccttctccagcttcctcaggggcaactctctagagataatgtgtgcaagccacgtagtcaacgctctcttcgtcagctggaactgagaccttttgccatgaagaatacttgggtactttgtagtcacaagtaaattaatctaaggcaagaaggccaacactctttagattaatctccttgcataagaagtctgtcgagctcagcccgaatgaaagattcaacaagattatttgatgctcgaccatctcaagagtaggaactggtcttcgaggaaccgctcaaaacaaataaaagctttataagcgaccacgaaaatataaatcaagactattcaaagtagatattcaaaaagaagtagtacttacgtatgatacgaaatgcggttgtattagagaggcccgtcgtcaagaagaagtcttctttactcagtcttgttgggcaaccttatgatgatcatgcgagcattcgtgtgagtgctgagttagtaaaagcctcctgtagctcccaggaaccgcctgaacttagtaaaaatagactatctccaaaggagtagggtactcccatcctcaaatatggtataggaccttcaagcttccaaggatcctatatgagatggggttcatatggaagggggcaacccgagatagttgcagaactctttaaagtaatccgtaaagggaagaaccaccccagccgtgatgtgctcgaggctctaggcaccaatgcccgaggaattgctcgtgccaggtccactgcactcctcatggattaccctttcaggaggaaaatagttgaattacccaggggccacgaaccatatgatacaaccctttccctgcttgataccgcaggactttagtatgccgccaacgtatgccccaattgacctaaccttagattcgatgagttcatcctcgaaggtgacactaggatcctgtgggtctttgatttacgagtcttagaagacataatgtcaaacccaaggtcacctggtgaaaaagcaacagtgacttcaagtaaaaatactggtctcgcgagtggaatagatgataatattgtgggttcagggcaggctgcgtctcgcaaaaaatgatgtttgccctcagaattctcttgtataaatttcctataacgacttgcaacttcatcctagttctaatcaaacggtctctaattttggcatcgtttatctccaattgggaccgaggttggaaatttcttggtttgaatgggaggtctaagtgtttaggatattttgtttctaacaactctatagaataaacttttgaatcagattgggacatttctacaaaaaaagaacaatcccaattccttgatgaaatttattaaaccagagccttaagaatttgataagcctaaattatatcatgcctaaaccctaaaaattacccagaaaacttaaatcagaatcgctaaaagcacatgaaatggcaatatggaaataataaaataaatgatcataacccagaaaaataataaaaaaaaaaaccaggaaaataaggggatgaatacttactgattaaagaagtgtgcctgtgtagtggagaattctgtatttggattcgagacaaacgattgtgcaagttctggggacgaccgagattggggatcgagtttgaggaaattcgcaaaaagtatgtcgaagccaaggagggcatgcaaagtttcaagaaattaggatgggaatttctcagaatggcttgaatttttgaaaaggcaaaatttgtgaaaaaattgatttcttaccattttatacttcaaacttagctaccgtaggatcaaagtgtagaagatccaacggatagaaatgggagagaagaggaaaagatgcttcattaatgctaatgatgtgccttgcaaccataaaactgccaaattcaaaggcatgaatgtttcaaattagattatgatagaaatacccacagtaatcgtttaaaaagcactttttattaaaaaatgaatttttaaggggccattgttatacccaaaaatttgttgtacttcgaaaggtgacatgtgtcaatctcagacaatacgaatcatcgaatataatggtaattatatcattagatacaaaatagagtaactcactaaatgcaagattaatagagtatattcataattcgttaactgtatagaattaagcgagacagggatatacaaactatcaattcgtgtattgatgagaaacaatcttgtctcggaaggcataaccccaaggtagatatagacaacacatagcgagacatctacctcactgtatgtgaaaaggtattgacgaggtgaattagttattagaacacttagcgtataatatacattataataactaagtgtaataacttgaaggaca

SEQ ID NO: 309568 - DNA, 1575 bp, Cannabis indica
ggtctttgaatgtcaattccaagtatttctttgcattaccaagatctttcatttcaaactcttgattgagttacaatttaagcttgtttatctctaatttttctttaccaaatatcagaatatcatcaacatatagcaataggtaaatttgatcattatgatagatgcatggatataagctgcttttcatataccctattttcttcatgtattcatcaaatcttaaattccattgcctaggtgcttgttttaaaccatagagagatttcttaagtaaataaacctgattaagatccttgctttcatacccttctggaagttgcatgtagatttcctcatcaaggttcccatgtaagaaagcagtccttatatccatttgctcaatatgcagttcttctttagcagctttttccatcatgaccctaattgaagtttgcttgacaactggagaaaaattctcattgaaatccactccttcctgctgagtgaacccttttgctactagtcttgccttgaacttgattggttcaacaccaaggatgccttccttctctttaaaaatccatttgcagcctaccaatttctttccttcaggtttcttgaccattatccatgttttattcttctaaagtgaagtcatctctttatcaatagctttcaaccatttcaacctatttctgcctgtagtagcctcaaggtagctagttggttttgaagattctaattcctctgcaatgatcaatgcatatgcgatgaattagcatatccaaacttgctcggtggtctggtttctcttctcattctgtctctagcaagttgataggtgcttaaatcagttgcaccttcatgtgtatccgtttttgcactggtttcagaatttttttctacaatttgagtgtcaggttggtccacctcaagttgtagactttgaactggtatagcaggttgtatatcattgagagctttggttttcattgccatttcatcctccttaaaaacaacatctctacttatgatgcatctcttgaaaccaggttccaaacaccataatttatagcctttaaccccatcaggataaccaaggaacatgcatttcaaagctcttggttacagcttatcctattttatgcgtgcataggcagtgcaaccaaaggctctgagatgatcaatcttgggaacatgccatgtccacatttcatgtggagttttgaacttgtttgtaactgatggacatctgttaacaagatagcaaatagttttgagtgcttcaccccagaattttctttctaaacaagcatcaagtagcaaacacgtcactctttcaagtagtgtcgtattcatcctctcagccaagccattttattgtggggttttgatcacttttttgtgtcttattatcccttctcaggcacagaaatctttgaacaaatttgaggaatattctaggccattatctgttcttagcaccttcaatttcttgccagtttggttctcaagtaatgtcctccaattgacaaaggtttcaaatgcttgatctttgcttttgagtagatagacccacacctttctactata

SEQ ID NO: 309569 - DNA, 561 bp, Cannabis indica
aaaattcagagagcatgatttagtgcatgtcaaaggtcaggagaaaaaattggtaattagcaaaaaaaaaattaaggcttgtgcccaataacaatacgatcaataattattgttaggctttgcaatgtcaaatatgctcggaatcaaagattgtcattaattattagagaaataaaataccactaaaatattataaataataatgatgtcgtaggttttttttttttaattttaaacaatgaatatatcattaacttataaaatagagttcaacaacctaataactaataaactaagtaataagtatcctaaagataataagggaaattgttcaaccaaataagttgttcatccatccgaaaaatatgtactcagcgttaatccatgatcattgaaaaataaaggctaattaagattttttcctccgaactttgacatgtaccaaatcatacttcctgaactcttttggtcgttaaaaatttcccctgaactattgagattgttagacttaaggactttgtctaattttattcaattttactgtttcagtgattgtttatg

SEQ ID NO: 309570 - DNA, 1599 bp, Cannabis indica
gatgtaggtctgatatacctcataatattggtgtttttaacttaggctcgatagaggacgatgctaagcccgatgtatattataattttggtagtcttaggcccgatataggtctgattcagaatgatggtaggcacgatacctcattcaagtttggaattttaacttagacccgatatgggacgaataggtgcccgataattggtctgataggggaccattgtgattgttcatgctttgaatgtaatttctagttcgatggaggatgatggtgggcccgatgctgggtcgatactttgctaccaatggtctaacttgtatttttttcataatacaagacatccacgccttactaattctaatttcagaacattacatagatcgtatcacttggtgtggcgctagtttttactatccaaagattaaagtaaaatttgcggaataccaattatttgagaggaggaatccttttttaaaataatttattgagagggagccacttaacttttttgggtgcattgatccatcagttgttcatgcacaatattaaatctgagaaggaagatgaactccacttctatattgcaaagaaaaaatgtagattcagccgaaccgagtttgccttggtgactaggttgaacttgttactcaaacctacagagcaagaaatagaagaggaagcaaattccaatcagttgattgtggagtacttcaatggtgatcaatccatcacatttgccaactacgcaaagttttttaaggttgcacaaaaattggtgatggccttatttgttatggacgttctcactggtaaagaggagaagaccgtggttcttcattttgtgataagaatggttgacaatctacaattattctatgagtactcgtgggaaaagatttctttcaacaagttgataaaaacttgtaataaagacttcaaagaagtgaaaaactatatgaataagaagattgaaagggggacttgtcgaaatgaggtaaagtactcagcatacggctataccgcaacgatgtaatattgggcatatgagcccatattagagctggctaatgaatttgcaataaggaagtcgcattgctgtcctagaatggtcaactgggaaagtaagaacaaggtgaaactcgacaaggaggaagtaataaaattatttgctagaaatataagttttttacgcttttgaattggtcatatttatttcattttaatttcaatcttatattagttcattttttatttgtagttgacagtgtgctttgtattatgtcctcgacctaatgaggaagtatttgtgaggaccatcatcggaggtgatgcgcctttatttgttgacttgaaggaattgattttgcataaacttcttttagctcgatattggcccaatacttgtccaatacttgtattgatttttttcataacaccaggctagcattgggtcccacatcggaccagcatcgggccagtcacttttttacaggaaaatattgttgtaagttgatgaaaacctgttcatgccacaaataataatgcttaacaaagtccaacaagagtttaacaagtatacgtaacactacaatacataa

SEQ ID NO: 309571 - DNA, 2170 bp, Cannabis indica
aagtcaatattatttggctagaaaagccttcgagtattaaccaagtgttcttgtctggtttatgaaacctaacctttttgccttaacttctcagaagaaaagatccccgctttgcatgaaagtatcatgttatatttataggctacagttaggtacgactatacgtagactcgctagggttttcttgtaaacctagctgactgatggggtaaatacaagtaatatattgacattgggcccattttgtgagaccttgcccatgaggcaacgatcatctatatatgtggagacctcctgacggtaacaggtggcatgtgtggaccatctttgcatataattttgccagattaatggatgttggacaaaaggcatgtttccttttatgttatacacaatttcagggtttatcgtggggaataaggttctaatatcaagggattctgaattaatagagtgccatataaacctcgactcttgggcgcctctttaattgctcttccaaaactgtgatttagagatatgtggatactctccctactagaatttctctatatctggataaattctcttccataacttgggaagcccggttcttatgatagttatgcttacttgagatttggaactacgactaaactctttcagcgagtttagggcattatcccaattgggtctgcaactgggcatgtgttgattgatttggattatgaaattactcgtgttcctcttctagaaacacgtataatatttaccccaagcctacagaacttaaatgttatggaggcttgcaatctttcctccagattagatgaggtcatgtgaggcattgaaaagtgtggactgtttggctttgtgccctaaataaaactctatttcaatgtaatcttttctattcgtatcaaaaaagaaacagagttaatttcattacatgtttaatgtgttatttggttcatgtgatcatctatttacttatttgattaataaattcatccaaacccttatcacattgatattcttgtttattgtgttgtcaacacagtggaaagtaaacaagattgtgtgattaaatgtattcctagatttatccagggcattggttaaagtaagcttgggttggatgtatggagtatgcatcgaaagggaccgatattgaacttgaactagatatagataatcttaccgtaatatttattcaattcaatatcacctagttgatcctagatcaaatgatctcaatcctgagatagtaggttcgatctcgagagtattatttgtgttctttgcttgttagtttagacctcctttggtccgggtgatacgtacattttgggaactacggtagtaatagatatggaatctatagcttctttctagacatagaagtgaaatgatgatttcctttcgagcttggctaaatagagataaatggttgagtactcatttcagtgattatgtttacttcactgaaatatcatttataggtagctaagttttaaggaataaaatacattgaagggtgtaacggtaatttaatccctatacaatgtaaatcatctatagaggatcattgattattgggattataacaatggataactgatagcgtatctatatcgtggaacatatagagcgttctatataactgagagtgcaattccaagttctatggtggatgcaacaaggaattaataagtcagtgaatttacttggtaaattctgggtctgcttattggaagctcagatatataggcccatggtccccatactagttgagacaatactacttgtaagactcagttaattgattttgattaatcaattataattctaaaattagactatgtctagtttatgaattttcactaagcaagggcttaattgtgaagaaagagtttctagggtttatttgttaattaagagactttgattagtctaattaataaatatattaaatgacaatattatttaataattaatttttagttattaaataattagaattggcatttaagtggttaaattggaaaattggcatttttgagaaaataagatggaaaaatgacaaaatggcaaaattgcaaagtggggcccattatccatatcatggccggccacttatatagcatatttaccatttattttttcattattttaatgccaaataaatcta

SEQ ID NO: 309572 - DNA, 3742 bp, Cannabis indica
tccccctcgttgggatatctggtcatgccttactttgggagttttgatagaagagttaagctacacacttctcctccttcttccttagacttcatggcataaagagatctttgaatttccctctttttccattacgttggtttgagtcatcgtagttgcgcgtgcctccaccattctcattttttgagaattggtagagatcgtttgtgctggtcggcatgctggacagcgctatgaggccctatgtttgtttgtcattatgcttgccagacaacttcttctaaatgtatgaagccatgagctcgctcaaggaactcctccatgtttttaattgaggtcctattgatatctttccataagtcagtcaacggtaggatgcctttgagtatggccatgtatcagccttcttttgtcaggcttgtgaccttggtggcctcagccatgaactgttcaatgtagttcttcaagggttcgtcttatctttgctttattttgataagatcctctaatcaggcaggtattgatcttgaagcagagaacttaatatagaactagggagagctcttcccaagagttgaatcttcctgagggcaacttgaaataccattgttgggctattttagcaagagttttcgaaaagattcgacatcgcacatctctagatacttgtaggagatctgtttggatctcaaagtactttaggtgtacaagagggtcttctcttctggtgtacatcttccaagacgatatcttgaatttaggcaagggtaacacatggatgtatgtcgagaatggcgatcccctcgccttgtcttgcttaagttctgaaggttttagaccagctaggcccatgagcatgtctcgtatttgattctactgtgcttgcacagaagggtctgttgctgcagaggcctagtggattgaccttctttaattgagttgaagtttcagattggagagagcctggccagccataccttgggagagggtatactcaaggtcggccagccctgaatctggtgctcatacatggtcatctagccctaagcttggtagggccttactgcccacacttctttgcctagctggtagagcttgtgcaattacatagggtagatcacaccaattactggagtttggtggatcgaactgtctgaagtgatgaacttaacttctcaagttgttgttttgggtatttccacccactgccagtcctcatcaatttaaaattgaccttcgggtgactcgctccccttggggagggagtcctcttctctaaccggccatggggactatttgaagagtctagtcagccaaggcaactgttggaggagtctggccgaccatggagactgttgaaggagtttggccggccatggggactcctgttggtggttggcctgctacaggatggatagagggagttgttgctaagccaaagaaccctagctggccccatgcagctggttgtcgagattttatagttttgctgtttcacctttgaggaaaggtctgtcctccatgtggcaagggaagatctatcctagttcctgaggaactgggttgatctgcatgtcgatagaccctccctgatctatcaacaagtcttccttgaagtggatctctaatgagattctcgtctcttctatcggtactttggttgaattgccttattagatcattagcctctctgttgtggtgatctaactctttttggtgagatcaaaggatgtgctcttggtcatccatccatgtcaagaatttgcatctctactaagtgagtacatcgcaatcagtagtgcatggtttttcaagggatttgcctctcaattgagcgaatatatcgcagtcaggagtgcgtgattctttaagggattcacgtctctactgagcaaatatatcgtagtcaacaatgcatggttcttcaataaggcccgcacggcctaaacttccctgagtctggccaactcaaggtcttttggggttgccattcttccttcagtcaaaggcaccaatggtgggcctattcttagaggcatgggcctgccacttgggtccactaggatgcttgtatcaatctggccactatagagtcttaccaggtaattatggctgcatatagacctacaagggaggtcaggccgcccaaggtatgcaggacctagctggttaaggtgtacaggacctagtaggacaaggcctataggatctagaaggacaaggcctgcgggtcaagggctgcaggacaaggcaggtcaagggctgtaggacctggcaggtcatgtcctgtaggacttagcaggtcattatagctctgtctagaggaggcctaactagttaaattgtaatatcctaagattaaggaaatggattagcgaaccctaactagttaaatatatatatggattatattattatataatttattatatgtgaattaatttgataaatgacatgttaagaccctgttggtgagctaggggcattttcttaattttgacccgagaagggtaaaaactgtaattttaatattatgatgtgcttatggactatattattatatggtatacttgttttgtccttctgtaggtgttttctgacacgtcgacgcggtatagttacaatctggtatttcaggccgaatcgggttcggggccaaaatacattttcaggattttatactggcattttattgacattcttacccttgtttcttgcatatgcgtcattaaggccctaggggcaatttggtcattttgaccacttaagttgctttaaacaaaaaggaattttagagaaagtcaaatgcatttctggttttactcaaccctaatgaccctcattccctctttctttctcaaaattttcttcacttggatattcacttccaattggatttttactatgtgcttggagcttatgattttggtgcttgtgtggggaagatcttgaggtagtttccatcttttgttactgaatttttgtttatgtaattctgaaatgaaaatatgtgtgaagtcatgaaatgtgttcttgagttgcatgcttgtgataattgagttatttttgttgttgtcgtcgggattgtgtttatagctattgattattgctttgggtaggttttggagtgaataattaggtggtatttagtgttagtattattttgtagctctgaaattatttgcttgaaacatgagttaatggcttggttgtgcaaggttttgaagatggaattgtgttgttttttagctcaatgtctggagctttcatggactattgctaattttatttatggtgcttgtgcggatgagaataagcttgtattatgtaatttaatgcccaactatggtacctattaatccatggattatgattttgagttttatgcatgttttgggtggtttaggtgtgttttgtgcttatgttcgagctggaaaattagggtttcctgggtttgaaacccaggcgtcgcggcctgcccttactgaaagcttaggtttccaaccctggtgccgcggcccattgtggggagagcagcagcccgccccttaatttttgggcacattcgaacgcgatatttaatgtcgtatctttgtgatccggactctgttttgggagtttcgcataatgttggaaagctcgttccgagctctatattattatctagaatttgaatgcaacttttataattttgtgaaaatggatttagggtttaaccctatttgtgaatcttagaaattgt

SEQ ID NO: 309573 - DNA, 5449 bp, Cannabis indica
acctgaactcagacccaaacattgaccaggactcaggaccaagaattgggatcgagacccaaaactaaaccccagtctctatcccgaacctacaacaagacctagaccgggacttgggacatgaaccgaaacaagattaggacccgtgattgggatccagatcttatccctggatctgagaaccagggcttagataagatccatagtcgatttcttgatctgggactcagacaaggacctgaagccggactaggacccagactaggactaagactcgaacctaaacccgaacccgaactcgagactcaatcccgaacccagaccaagccgttgacctaaactaggattcagatctaaacatggacacgatccaagacccgaacctgaatacaccccaaacccaatctgggatcaaaacacaggacctggacccagacgcagacacagacgcagacgcagacccaaacctgggacccagacctaggacccaaacctagacccaaaccgggattcaaaaaacccatacgcggactcggactaagacttagaccataacgcaaacatggacccacacacagacccagaaccaaacccgaacccgaaattaaaattggaactgtgactaggacctgaacctcagaccagaaccgaactcaaataataacccaaactcagacagaaacatggaccgagaccttaactaggactgagacctgaaaccgaggacccgaacctagatcgggacctggactgggaccttgacctaacctggtcttaaaccctcaccgagacttgagacacgcgacctagaccaggatccaaaccttaacaaggacccaaacctgaacccagacaaaggcttggagtgagacctagacccgaacccggactgggacatggattaaaccaagactcgggacccgaaccggaacctagacctaaaccaagacctagtaaccggacttggatgggggacctagacaagggacttaggccccagaacaaagaccaagagctaaatctaggactcgaacccgaaccaggacctttcctggactccagaatctgaagtcaaacccatatccagacccaaaacctgcactggaccctaactggataggaacctggacacgaaccgatactaggaccaaacccaaactcggacctgaacccaaaattgaacccaaactcaggacccgaactcaaacctagacccagaatcagacccaaacttagacctgcactcggacctgaacttgaacccagactgggatcgaaaccaaggactgagacttggaactaaacccggactcagatcgagatcgaaacctgggactcaaatacgaacttggacctaggcacaggaccctaacccacacctagagcctgatccggacctagaccgagatctggacccgaacccaaactcagacaaggtctcgaaccccgacctgaacttgaacctcgacccgtactcgaacccaaactcaaactcgaaatcgcaactagaccgagacccaaactcgaaacgctactaggactcaaacccgaacctagagcgggactcaaacccaaaacaaaatcgggacctaaaccgggaccttggcgacaaaactaggactaggacccaagactggaccccaaacacgaacttgaacctaggacccaactcatcacccggcactcgaaatggaacaagaccagaacccgagatcgagatccggatctagacctggcgcttggatcgaacccttagtcggtgtatagatctaggacccagcccggaccaaaacccaaaccaggatgcgaacctagacccagacctgaacccagtcctagacccaaacccaaacttggacccgaacatgtacccggtgacccgaaattggaatcgaaactggaagtagactgggacccaacaacgggattggaacgaggacttggacctggaaccataaccggacctggacctagatcaggaaccgtaatcggacaaggaccaagactcgaacccagacctagacccgaaccgggaccctgacctggatcccaaccaagacctggactcaggacccgaattcggacccaaactccgacccaaacaaggaaccagactcgagacacagaactgggcccgagacctagaaccgcaccctggtctcggtcctaaacccaaactcagacctcgaacctgagacctgaacaagaagcaaactgggacacgtgatagggatccagatctaggactcagaccaagaccaaaaatcagaccagaacccaaatcctaaccctgacccacacccaaaacataaaattggaatctgaacaagaaccgccagaccaggaccctcgaacaagactaggaccaagaccaagactcgaggccaaacctagaactaaactcagacgtagcccagacctaaatcgagactagaattcgggcccaaacacagttgtgtaccctgaccgggacctgatccagacccaaactcagaccttgatagggatctcgatacgaacctggactcgatcccagacccagaccaagactgtgatcgaaagtcagaacctagatccggattgagacctaaacccagacccagaccgggatctgaacttggagccaaaccttaaccgagactcaaaccaggacttagaccccgacctagacccaaacccaaacccaaaaccagtcactgaatcaaaatcaatactaggactaagacccaaacctaaacatggacccagatcgagacttaggacctcgacctaggcctcagatcccagatccagatcagagctcgggactcggactcgaaccaggacctagactcgaacccagatctggaccatgactgagatcagaatctgaacctgtaatcggaccaggacttgaacctcgaccgggtcctgcactcagaccgggacgtaggactcagatgtggatgggggacctggaccacgaacacgggcatcaaaattgggaccgagacctaggacccgaccccagatccgaaccctaacgtaggacccagatcgggacctaggacccgagaccgtgatccagatctggaaccagggtttgaacctgatccgtaatcagtgttcggatcaaggacccataccgggactcaaacccagacctgaactcggacccaaaccttaaacctgacccagactcgtgtcccagacctgtctccgagtttgagtctgggtttaagtccaacaactggaatttgactaggacccaaacctagacccaaaccgggacgcgcacccgaatcaaaactagcatcgggactcggtacatgaacccgaacccacacacgtacttagagctaaacacagacccaagacccggaccgggattggatactaagacctaaacccagatgctagacctagattggggaccctaactaaaaattagaaccaaaaacgggactcaagactgggacaaggacccaagattgggatccaaatgggaatcggacacgaacatggaccaagacccaggattcgaatcggaacgagatcgaaaaccaagattggtatccgtatcttgacccacaaccagatgcttggacccaacccacagtcggtgtcgagatcttggaatcataccaagacccgaagctagaaccatttctagactaggagccaaacccagacatcgacccgagacccgaaatcggaacatgaaccggaaccaggcccttggaaaaggaattggacctggacccaaaaccgaatctaagcgcggaacctaacacgaaccctgaccgagactgggatcgatcctcagacccaaacccagaccccaacccggacccaaacttacgccaggacctgcgatccaaaactaaaaacctaggacctgtgacccaggagttggaccagaacccagacctgtaccagaacccggacacagacccagacccttaccaagacccagacctagacacaaactaaaacccagacctagacccaaaactagacccgaaccaagacttagactcgacaagaactcaaactcgaacctgggactcggacccgaaacgagatcagtacttggatccaaacctagactaggaccgagacttgatcgtagactggactagaacccagactgggaccgggaccgaggcttaggatcgggaccagggaccgggacctaggactttgaccaggaccagggcttgagaccgggacagggacctaggactgggatcgagacctgagactgagaccaggacccagcacccgatactcagacttgggacatgagaaccgaaacgtgagccagacctacacaaggcctaaacccgatacaaggacgaatactaaactcaaaccgggacctgcactcagtcaggaccctaacccagaccgggacctaggaccttgacttgaatccgggacctagacccatgactcagaacccaagacccaaacttagaccaaaacctggacctaagacctgaaccaagacctaagacatgagctaagacccatgacccaagaccaaggcttagactcgaccaatagtcggtgtctacatctaggaaatggccctcgacccagatgctgatccagacccaaatccgaacccgtactagaactcaaactaggctcgacatgtggttggcgtttggatttgggacaaagacttgaagctgaatacattacggacctagacttaaaccaggagtcagacccaaacccacaccaaaaccttaagtcgtaccctgtgacccaaaattggaaccaaaactggaagcagacccttaaaccctaaatcctaagctctttacacttacccctaaaccctaagccctaaaccctaaaccataaatcatcggaacccaggaccaagacccaaacctagacccagactcacgacaaaaacatgaactcaaaaccaaaccggatctagtctagtacctagaccttgactgggacccaaattggaaccccgactcggacccgaacagggacctgaactcaaactgggatctgaacctaaactcaaccctgaacccgtactaggacctagactcggatccaaactcgagatccaaacctgaacctgaactttgacctagaccgagacctaagatccagacctagatgggagacctaggacccagacctggaacaaggaaccgaacctagagtggggacttgtacttaaaaatgggccctgaaatcgggaccgagacccaaaactcaaccccagactcgagacacatgaccagaccatggactcggaacctaggatttgactactgagacacatcgcgaactcggacccaaacccaagcttaggacatggcccaagacacgagacctgaacttgaacaagaccgagatctaacaacgatatccgaatctaaacctgcagctttgacctaacccgtagttagtgtttgaatccaggacccagacc

SEQ ID NO: 309574 - DNA, 778 bp, Cannabis indica
taaccaagatcattttgtgtataaattttttgattgaaataataaatacaaatgcaaatttagcttaatttcacaaacaatgcacatttattttattaaaacatccctaaattgctatgtagaacatttaagaatattttttatttttttttaaagaaataatgaaattttaaaaaataataatctacaatctaatagagatatatttcatgttgaaaatacaatcaagattagaataagaaaaatgagtcaactaaccggccgcctaatttccaaatcgttttacacaaaagaaacataaaaaaaagttagattaaaaggattgcagcatcacagtatccttaagaggacacaacattagacttgttgcggcatggttgttcattcaaccccttagtttgagtattcaattattgtgcaagatacgtaactgtcactaacaatctctttagctgcagagaacttgttaacaactaaaagacattttatggcgaggtactgaagaaaaaaaaaaggcaaaccaataacgaaacaaacaaaataaaattaaccatgccacggaaataagattaattgcaataacctaaataatactcaaaaccatgtcatagaggcaaaactaactaatcgaagtagcaaaactacaaactccaaccaagccatatctatgcccaaggagggctagcagcaggggcagacccacatagaggcgaggtggggcagtcgcccaccctgaaaaaaaaaacaaaagaaagaatatatatgcattttagttagt

SEQ ID NO: 309575 - DNA, 948 bp, Cannabis indica
ttaattagagagcatgagatttagaacatagaagatctgaaaagagctaggttaatttgaataatctgtcattcacaacaaaaattggaatagtaattaggcattaacaattaggtaaacctatcaacaggattctctttcctatcttctcatcttgatgagaaattctatctcgtccctaaactgattacactcattagtgtcatgatcgaaattattgtggtaatgacataatttgttcatgtctctcttccctgactctttgaaggggagaggtttgcgatacgacactgttgactatgtgtccatataaatctcctcttttggggccaataggatggagtaggtggtaaaccgaggctcatactctcgtaaaggcctacccctagtcttgggcttctttccactaggggagttatctagcttaccaccgttgttggctcttttccttccattagaacctcatttcttcccattaccatgcgccttaatgtcaagatatggggagtttggtgactttttcttaccacccttgtaacccctagctttggtgatggatttttctaacttgacaaagccatctgttctatcgaggaagtcattcatggtgtaaacggccttgagacgaaggtcagaccatagaagactcatatccttgagtccagctgcaagtgccattacccttgcatccttgctaagacttttgatcttagcggctacctctaagatctattggatgtagtccttgaggcgatcatcttcctgctggttgacatctaccagatcattgggcttgatttagtgttatgaggaaggggaaaatcagttgtcaaaagcatccactagatctttccatgattcgattgatccatcggggaccttgaggtatcaccattgagttaggcctattagtgttgcagggaagattctatgttggaaattatttta

SEQ ID NO: 309576 - DNA, 1780 bp, Cannabis indica
aaaagagaatgatcagttgctaaatggtgaaaaccttcttcaactaaggcattagagaatttttcaaaccattgcctagaagcttactttaaaccatatagagatttgttcaatttgcaaactgcattaggtggaatctcccccttaggactatacctatgaggtaaagtcataaaaatatcctcatgtaggtcaccatgtaaaaaagtattgtttacatcaagttgatgtaaaatccatcaattaatagtagctaaggccacaactaatttaactgtaacaagtttggtaacaggtgcaaaggttttagaataatcaatatcttcttgttgattatatcactttgcagctaatctagccttaaatctctccacacaaccatcagcattaaactttatcttgtaaacccatttacaacctatagcatacaaatgaggggggagagaaacaactgtccaagtgtcattagcttcaagtgctacaatttcatgatccattgcattgtcccattctgggatgacatgagcttgagcaaaagattctggttcaatgtagcttgaaatggataatatcagtgcttgaaattgtggggaaagtctgaagtaatcaatcaccttggatagaggataggccacagattgatcaagaccctgagataaaacatgagacttatagttagctaaaaaaatgataatcactcaaataggaaggtttgtgagtgtttctagtaggtctagaagatgaattttgaggctgaatagttggaatagagagaggttttaaagatgattaaattgtttatgggacagatgtaggtgttgtttgagttgtagatggtaggttgctttctggtgttgtagatgtaggttcagtgtgggttgcagatggtgaggttcttgctagtgttgcagatatctaaaatgcaaacaggaacagattcagtcatgggagggtctgaaataaaacctgtcaaaccagcaggaagttgaaaaaaatttattgtaatcatttgctgaagtagtaccaataaaagggaaaatatgttcatgaaattgaacatctctaatgaagaaaactcaattagtgtttagatcaagaagtttataggcttttatgcctattggatatccaataaagattcaagaggcagacttgggagaaaaatttgatctagacacattaagaattgaagcataggccaagcaaccaaaggcttttaagtggtcatatttaggcatcttcttgtataaaatttcatatgggaatttctattttaagttgggagtaggagttctattaattaagtatgttgcagtagcaacacaatcactccaatatggtaaaggaatgtgtgattggaatacaagggctctagcaacattaagaagatgttgatgcttcctttcaactacagaattttgttgtggcctatgaacacatgaatgatcgtgaatgatacttagatttttgaacaagataggaaattgaagttctttagcattatcagatttgatgcctataatagtagtattaaattgagtcttaacaagctgaataaattgagaaatgacagtttgtgcatcagatttttgcttgataaaatgaacccatgtgaacctagatttatcatccactatagtgatgaaatacttgtacccttcaacagataaagtgtgaaaaagaccccatatgtcaacatgaatgaggtcaaaacattgtgcaacaatgttaagattagatataaatggcaatctttttgtttagcataatgacaaatgga

SEQ ID NO: 309577 - DNA, 1711 bp, Cannabis indica
ttagtaggagccataccttagcaatggaccttttaacttagagacaactttgtcacatctcgtcagtttaagaggcgatcgattcacttgcataaggtaaagtgaatcttatcgtgaatcgagatgttttgaggatagtttcttttattggtagtactatcgtaaatgcaccccattccaataccttggtactagtattggattcaagttgtagtcatagtgtgaaaacttgtaagttttaggttcaagtgctttagtgacgacgtatggtcctttccaattcgaccaaagtactcctgcttatgcatctttcgtgtttaggaatactcgtcgtaacaccatgtctctaggcttaaatttcctatctttaactcagagttgtagtgttttatgactctttgctaatacgctgcctttttaagctcagacctttctatgatctcttcaattccatctaatgactcggccagcagttgatgattggtttactggtctaatgttagtcctcgatgtgatggaggtatgagctctacgggtatcgtggcttctttcccgtaggttagagcgaagggagtgtgacttgttgttgtttcttctgttgtacaattagcccatagtacttcgggtagttcttcaggccaattcccttttgcttactccaagcatttctttagcgaattcttaagattttggttaaccgcttccacttgtccattttcttgtggatagacaactattgaaaaactcttaatgattccaagtctgatgtagaaatcagtaaagagattgctgtcaaactgtgtttcgttgtgtgacactatcttttatgggagtccaaagcggcaaatgatattcttgaccacaaaatcaagaacttcctttgatgtgattgtggctaaaggctctgcctcaacatgtttggtgaagtaatctactgccactactgtatattggactttgccttttccccttgcgtagtgaacttatgaggttaattccctagatagtaaatggccagggtgtttgcatactcttgactttgtttggggtagctctgggtataatggagaatctttggcacttgtcgcactttcttatacaatccttcaaatcttctatcattgtttgccaaaagtatccttgtcttaagatcttctttgaaaggctttgcccctagcatggttgccacaaaaggcctcatgtacctcgaccatgaggagtttggcttcttcttttgtgacacaccttagaagtgacattgaaagcttcttctgtacattactctatccatgatgaagaagcaggctacttttcacatcaatctcttagctttgttcgggtcagttggaagaataccttgttctaagcattgtgcaatcgaggtcatcaatgatggacttttgtcaatcatcagtataggcttcgagtcttcattaatgctccatttggaaaggtatttgataggttctacactgagagagttaaaatctagccattttagctagggagtcaacattttggttctattcacatggcacttgtcagatggagtagtgcttgagttaggctaatacatctttagttttccttaagtatgcgatcatgtttgaccctcgggcttgacactcactaagaatctgattaataactagttgagaatcactatagatctcgagtgactcggctttgattgctagtgctaatcacattc

SEQ ID NO: 309578 - DNA, 572 bp, Cannabis indica
aaatatgatgagcctttatgcaagcccactctcgatcaaatatttgacccaaattgagtcgtccatgctttgatccaaaggcccaagggcgagagtgtgcttcgccccagacagcggagagtgagctcctgcacactgcctgctccaaccttccgcgtgggtcctgccaacttcccctccagcatgccacgcgagcaacgtgtcccctcgtcagcagctctccgccaaccaaggcctgccacgcaggtctccgtcggcctcctcctccaatccaaccacgccatgtgttcgctgagaccaaaaaaaaagaagaagaaaatgacttgttaattggcttttctctcagccgaatttctcattaaaaaagtcaaaattcttattttttctcccacattttacacacaaatacctattttatcttcccaatttatttcacctaaataaacattcctaatttatttttaccctatcttctcactatttttccatccaaacaaacatttatttttttccaatgctcttacacatactctatttatcccttctcttcccaacactaattaaattaatca

SEQ ID NO: 309579 - DNA, 990 bp, Cannabis indica
tttcttatttttttttttttgctgaaaaatttagaatttttatatatgagaatcctttctagcgaaatccaatttttgtttaggtaacaatatgtcaatattatacattccttcaaaaaataaacaaaaatgctatcaaaaaaccaaaaaacaaaaaaataattaatttttttttgttaaaatatataacaaaacaaataaataattattaattacctatataattttttttagggcggggttctcgttgtgacttgtgagtaagggagcaaagcggtgccaatagcgtaacgacaacgttgaattttggttgcatcgatataatttagctaacttaactaaacgacaacgtatcaacttattataataaacataaaattatttaagaatatacatcgaattaaatttataaattaaaaaaaagaacgtgacatttttggaaattagaactacatttatggcattttaagaaataaatgtgattatttttgaaaaaaaaaagccaggacacatcgtcggtgtggctcattcgctatcgaaaaaccaaccgtatataacactctttcttgtgcccctcgaatctcatttctcactctctctctctatctctagagctcgtgagtcttgtttctctcagattttcagagctgggagatctctcggctggtgaactgaacttttgttgcctaacgctttagatgaattatatctttatacaggtaagtttcgttctttaactttttgctttgtgttgttatggatctttagtgatatagttgttgtgatgtttcgaatttcgtatttgaattcaaaacatagatagaaatttgttattttatttggcttttgtactcattttctgatctgggtttctcagatctgacgcaaattcgccgtgtgaaattcgaaaaatggagttttttgatcgatttaggatctgggtttcggtcatttgcttgatttttaatttgggtcatgggttttacctcc

SEQ ID NO: 309580 - DNA, 1772 bp, Cannabis indica
tcattagcacatgatgatgatgaagaagacgacgtcgttttacttggacacataaaaaagtttcttgatcctaatccattcacttgctcctctctatctagacctacaaatatattccacaaaacaaaaaatcaatctcaaccgtacacgtgtccaacagtatattccatcaaatgattcttcaatattaaattaacgaacggttacgattgaatttgaatcggaataggaaaactcacattctaagctgaactgagagtaatggaggttgaatctcgacggatcggtggcgaccaaaattggacggcgaccttccttagcgtactgactcaaagccgccgcaatcagatctccaaccgtcgattccaacgatatcaacacctgaaccgctcctacgctaccttgaatcgtaacgttgagaagaatcttcgtcagtttattattaatcggtcttccttcgatgatcatcgaagaagatgaagatagagatgttgtgagtaaacttcgactcggaagtaagtccggtagagttttcggacgccggagttgagaagtcgccgtcgcttgatcagtagtgaagctttttccgtgaaacgacgacgctttctccgtcagttttcctctccgattcttctcctcgttcactctccgattactcttagggcttggcattttaatacgaaatatgtatatatatatatctttggctcaccggttacctaaggcggcggtaacggaaaaataagaagcgagggaatccaagagcaggagaagagcggtggctctcaggttcccggtgaccggcagctatcatataaccggagaagggtataaacgtaaataaagagaacaagcaagggcaaaaacgtaaaattaaaggctcactatttctcagttactcaaatgaaatgaaatccaacttcagccatctacttggtatttatacttagtttaattgagacgactggctattaccggttagtatacccggtcaaacagtcaaaataggaggtttagagaccgcctatagcccgtggaagcgacatgtgtgctaaagttacatgggtgacactagattaacacgtggcagtatttatatggtgagatatttaccggaaccttacgagaccgttagacgtcgtgtattgaaattcggaactgtttttgctttaacaggaggcggctgtgacactagcgctatgaaattaaaatgagtgttggtgtgggtccctaggtttgtttggcacgtggttgaaattttaaatgaggcgagtgagagaaggggggtccaggataagttctggtgcgcctcatcacacgtggcatgtcgagtaggttagtggtgggtcccacgatagagtcgcaccgagtgttaggaaattaggatgagaatatgattgtggatgttgttgtatgtggcgttatggttgtcttggacggtgtgctttgccaaattaaaaagaagatacattatctcatcatgaatagaataatcaccatgaatgagattcttctagtctagcttatacatatttaaatgagaatgggatattggcggctaaaccacctgaattttacggtttgtaacacttaaccacataaactgaatttttggcggctaaactacctaaactcccattccgttttgctctgtacacctccgtccaaaaatctcagttaagtgccacggtggactgtccacgtgtacatacttgtacacgtggcaaatttttaatggtccacgtaatattaattttaaaaaaaattataaa

SEQ ID NO: 309581 - DNA, 635 bp, Cannabis indica
aaaaacaaacaaaaaaaaaatctctagcgactatccaaccagttgtgcaggatggtgagaatataaaatagacactatcttgaggggatgttagagagtcccacatttagaaagataatacaatatataagaggaatggactactcctcccattgtcaattgttttgagatggaaccccattcaccttattctaataaaatgcaaatgcgaagaattaccaattatagatatctgtcacgtctccatattctgcagcattacatgcaaaatgttaatcaccaaaaattagtcaatggtaacacaaattaatattatttcacaaaaaaccaatataccttcaatttgttttttaatgaaagcagctccaagttcaacgaacaaaggatcagaaggtccaagaaggtaagtacaacaccatcgcttatcgccattgacagtgttcctaataataacaaagagatggaattcttagctgagaaacagaacttggaagtaggctgagaaaacgaaaaaagaacaagaactgtataaataccaatcgccaagtctagtaatattagctgaaggacgtatcttcttcaatgttgccggaacatttccagagaacgatggtagaactgaaaaagaagaagac

SEQ ID NO: 309582 - DNA, 681 bp, Cannabis indica
tgcattctgccagattcaaagaaatcggaaattgtattgcagaagtcatcacctgcagactcccaataatgtttgaaaaagaggactgacataccatcaggtccaggggccttgtggttattcatggcaaataacgtacttttgatttcttctcgagaaggacacatggtggtcccatcctgaacatcctgagtaattctatccaagaacagatgtttacagtctaaagcctgaccaggatcagaccccgagaagatgccgttgaaaaacgcactgaactcatgaccaatagactcccggtcattgatccagacattgttactactcagaatactctcaatggcatttcttcttcctctaatagctgcagagaggaaaaagaatctagagcatttatctccattctttagccaatcaattctcaccctttgcttccaataaatatcctttctagccaatgattcattcaacgactgacgaatatcacattcctccttccagtccctgactccaaccggtaacttctagattctatcaagcttctgttccagatctttaatggtcccttccaatttaccgtactgagttctatgccactgaagaagagtccacacgagtagctccaattttcttgaaagcactagtagggggcccaagggtgatcatgtgggttttgtgccc

SEQ ID NO: 309583 - DNA, 1276 bp, Cannabis indica
cacagaccaccgtgagtaagaacagttaagcttcttcctctttagtgtcgagttcctctaaccaatgtttcgatggcgctagtactcacctttttaatcgctcggtgtcccacctttagggactaacatcacttctgtgggcttgggcccttctgggatggatcacttgaatcaaaattcttactctagtctccttggcaaggtaataccatctcttttacaggaattatgggctaggggatataaaacccttactggtatgggcactgtggaaaaatatatgggagaattgtcactttttaatcccatattggatattgaggactttagatccttggaacatgatttcggacccaaaaaatgaaaggccctggatggattactcgttggcccaaggcccaatgaaagcttcgctttcacctcaaaagtccatgccatggaaacagttgactttttcaggaaaagaaacgcatcccacaccaagtgttgctgagtagcagtcgtcccctgttctgccagtggacctgaccttttctccgagctccttgggagctacttcttcgaagcgtaatagaggaagaccacccacatacagttcaggcaatgctacgggtagttcgaattctcaagatctttctccaaagcctaggtgaatggggcgaccgtctaaagcatctaccaattgtggcgtgaaggctcaccctattaagaggaaaaccaagagtttacgaaacaacgacagtcaactatccaaactaattgggagaacaacgtctttgatttaatggttgatttgaataatcacttcgtgattgttgaacgcactcccaagctgaagttgacttgctctacacagaaggttactgaagagaaaggagagagggagaacttttccaaccaggttttttgttttggggctacggggacttgcccaaaaaagtccccacaactcaaatgagggtcgtgtcgtggtttcaggaatgcagcgacaattcgacaattgaaggatcttatccaaaagtcgaatcccgaaatcctggtcttctctgaagtcagactcacttaagataagttcacttgtttaatgtccaagatttatttcactggtttgttttatgtggccccgttgggttcagcaggtggtcttgttttgtgttgaaaattaggagtcaatattagcatatgtgaacaattatctgcatgatatgatgtcgattatgcaattaggaccataatgagattgtcagtttattaactgcatttgaggcacatggta

SEQ ID NO: 309584 - DNA, 862 bp, Cannabis indica
cgttgctaaagttgcctattttccagtttcaccagtgaaacatatctggttcggtcacaagcatcctcacttcgcctttctgggaactgttccctagtttgatcaaagtctccaccgtttcttctagaacagggaattttagtagttttcgtcctgtgtgaagcttgaggctcctttctcggatgatgggttgtctcttttggctaattctttgcgttacgtggagtgtcgtctaccatgagtttgatttaaggttgtgtttttaaggagggcatcttttttgagttttattacaaagactctcaatgaaagcaccaaactgttaacacagatttctgttaactaaataattagccttttttgtaataaataaactgcagaattaattatattgtaattagttatttaagaagtaacaaataacaagaagatttttatgtagtttttaagttaaatcttcatagtgcacgagttcatcatattaaagattgatgtgtttgtatacaaaatataatgatacctgattttcaagaataaataatagcaatattatctattttgtccaagattggctatcctctattccctaggttctgtccctttttatagatgtatagggtgaccattattcctttaggatataatcattcgtaactgctcatgacacgtggatattctccacatttcatctatgtgcacatagattaataatgaataaccacctaatcgctctttgttttttctatggatggttatgctgactgtgcgcaattgttcttgccgtttgaatgatatttttcttaaacatctttatagaaaaatgttaaagtgttgagttatgatgcatctcgcagccttcctt

SEQ ID NO: 309585 - DNA, 868 bp, Cannabis indica
ttgttcaagagcacgccatagctgagatgaatttgtgtaggaggcaacaacagcaagaatgccgtcagtcatggaagatttgagccaagagagaagaatttgatcacgtttgttccattgaagatattgggggttgggttggaagctccattgacaagagttcttagaggtggaatactagaaaaaagaacatcatcaaggtcatggccgattacagtgggtacaacttggaatttccatgccaaaaaattcttgcgatccaatcgcacagtgagcgatgcagagaggtaatgtgcaaacggattccatggctgaatttgttgaggcaaaggaggggcagcggtagcagtagcaggatcatgttgagcagcagtagaggagttgttgtcttgggaagccattgaagataaaggtcagaggcgattgataccatgtaaagctttgcaatgtcagcttgttgaatggtacataccagatggtacaaaccagaaaaacagaggaaaagtaaagagaaagagagaaaataatgccaagaaagctcaactcaacagttggattttacctctttatttatagtgtaaagtacagatcaagatataaagaaatgcctaacaaattttataacaaactacatttaactactcactaacataaccgtttaactaactaattagttaataggtttatagataccatggttacaccacatgtagtcactgattttcacaagaatctccaaatgtacggaagcactctcacaggctgtgtaagaatggaagttgaaagggtattccgaacagtctatggtctcagaagatgcccatgtggcatgtaacaccctaactaatttaggcgtattacgtgattt

SEQ ID NO: 309586 - DNA, 1274 bp, Cannabis indica
tatactttttgaaatttcgtttttttttttcgtttcctttatataaacaaatcataataagaaaaatattttacaatattaaattataaaaataattaaaaaaaatatttttttagagattctatatttttattccactaggatggtgtgacctaactataatgatcactcagtaaaaaaagttttcagcaagaaatatataccataattgctcatagaagatttaaatatgattaaccaaataattaagttgcgtagaagttgatttaaaagcaacaaattgcacaactcacgtaaaagaataaacgttgatgtgttcattagcttaacatctgtgtaccataaaatgaactctaatgaatgaccgtaaaatatccacgaaaaattataggcctatgaatcggaatggaatgagtgttgcaaagaatcgatatttaaattgaagtagtttgaacttgaaggagttggagtatatgcattatcatttattcaggacgatgccctaaccttgtgtgttggtgacattgatgcccttccgacacaattacgcttattatgatctcgtcctccacaagtgagaaaacaagagtaaatacagaggatgtaaataataaatctcagctcaattagcatgaccaaattcattgctatttaaggttcttacaaatgattacaaccattggatataaggacagatggcagcagagtacataaaaggaatattgctgaaaacaatgctaacaatatacaaaaaggtataacagaatttgtactttagtgaatatcctttcagggatatttttccagtatattggagcagaaggattgccaaatcataggccaactcagcatccatgtcaccttcatttcttcacaccacccctcaaacgacaaggtgactctttcacttggagtttgtcaatcagaaacttaaatctggaaggtgacaatcctttggttagactatttgctacctggtcatgagaaggtatatagcgaatttccagcttcctgttcatcaccttgtctctgatgaagtgaacatccaactctatgtgtttggttcttgcatggtacacaggattggaggctagtgcacttgcactcatattgtcacaccagattactggtgaagcagtgagaagaactttcatttctttgagcaattcctgcagccaagacaattttgatgctagctgagcaagagctctatactctgactctgtacttgaccgtgcaaccacatgttgttcttagaggaccaagatatcaag

SEQ ID NO: 309587 - DNA, 1514 bp, Cannabis indica
gatggcaattggacaatcaagaaatcctaatttatcccaatacagagcatgcaaatgacaatttgaaatgatgaattcaaaaaacaataagtccataaataagaaagcaacgtacctaatgatgataatggagatgttaagctaattgtcactggatcaggctgggggttggatcgcacctttcgttgaagatgagatgctagagcgatcaatgaataaatctttgcgttgaaatccagactcgcaatttctcctgtcgttgaagtcctgattactaggggtcgattatgtgggaactctcgtgctccaatcctcatcaacattcgaagatagaaatctacaacgttttccaaattgaagaagaaaattttgatttgaattcagtccatggttttggagattgcagggagacttgtgtgcttcgaaggattgaaaatttgaaaaagaagtaaaagtggtaactataagttaccaggggtatttatacccaagaaagcaatccacgtgaggaggatataaaagaccatgatcttctctcaaaaagcacactttccatccaacaatcagggagtccaacaatccaagcatatcttagcatttaattcattttagaatcaagatgccaagtgatgatgaaaatgcccctttctcgatgttcctgcaaaaaattgaacatccatcaaaatgtagccgctcctagaaagtgactcctcaatggatgtgccttgtcatacacccgcgactgacacgtggatgcattatcatcacagacggaagttagcttctgtggtcgagtgccatttgaaacatcactattccattcctcaatttccacatgtccaaatcaagaaagtaatggaagcttccaccacacacaatattctaaaagcttgggggtaaatattatctgcaattccagcattggacccgtggactctagatcaatattcacgactcatcagtgggacccttattaaaggtagaatgggccaagcccatctggatgataccttctagaaacatacaacaatttcgcacttgtcaggtctttcaccttcgacaaattgagcccagaagacatgtctggtatcacgagaccggagggacaagacaccatgttctcaaaagacccttccggtttcccttcatattcctgcacataaataaggaaactccagttggcagatcgcaatagtgcatcgaatcaagattaaagggaaaacttcctacaacaaatattatgtaattaattaaaattaattggccacaatcagtgtacacagtgttgaacccaatccgatctacctagtcagcatatcatcttctccatggactagacttcatgagaaagcccacgaataatcttcactgtaaactccccagtagagggaaagagaaaaactaatataattctcatgctactataaataccagggttgttcatccgatccaatctgtactttttagtcaaacaacatccaatccgcactaagtgcggatttcatattttggat

SEQ ID NO: 309588 - DNA, 909 bp, Cannabis indica
atagaagaaagaaagccaaaaattccacgggaaggggaaccaacaataaccttcactgaagaagatgctatccacgttcacttcccgcacaacgatcccttggtcatgaaagtacagatagcaaataaaatagtggcccggactatgatagacaatggagcttccgcgaatattctattcaagacaccatatgagaagatgggacttcaactcaaagatctgatcccttgtacccaaccggtgtattgtttctccggccagagtgttgcacctttgaggcaaatttgcctacccctcattgagctccaaagagcataactgtaatggcacaatttctgataattgatgttccgttagctttcaatgccatgttcagccgactagcctaatatgacctgaaggctatcacatcaattttctattcgtgtatcaagtttccaaaaaagaatggggtagggtgcctaaaagggaatcaacaagtagcacgggaatgctataactttgccctaaccaaggccataaaggaagattcctctagccagagttcggacaggggaaaaagcattgcaaaataggaagtcacccaaggtggggacgaggatatggatcccagacttggggaaccaaatacaaacattgggcctacggaagaattggaagagctagaaattgatccaaatgtcctgactaggaaattcaaaattggcaaaggtttgttgcttgaagtaaaattagctttgataaaatgtctgagagcaaacctagacattttagcttggtcacacgaggacatggtcggtatcgatccttctataatatcacatgccctaaacattgatctaaacttccgtcgcgttcagcaaaaagaagattattagacaaagaacgggcacaagcattaaaagaaga

SEQ ID NO: 309589 - DNA, 1469 bp, Cannabis indica
aggaggcttcttggtatgggacggtagcctaagtggccatgtaaatggtctcagattttttggatagaagggtgaagcatgtgtacttctcctccttatcttttggtttgtggcgtagggagtattatacttcccctttgtaccactgtttaggctagacctgctgttgttgcacttgcctccaatattcttgatgctgaaggttggctggcactgcttatattggcatgtatgtttggtaggtcttgggactacatagcaccctaagaccgcctactactgacttgccctccaatctgggcttgtcgaatacttcttctaattttatgaagttgtctgcttgttcaaggaactccttcatattgttggttgacattctcttaatatctttccagaagtcactcaacagaaggatgccccccaagtatggtcgtatagtgaccttattttgttaggcctttgaccttggtggcctcaaccataaacatttgaatgttatccttcaatggtccaccctatatttgctttaccttgacaaggtcttccaactatgatggtatttgccttgaggatgagaattatgtgtagaattctcgtgaaaactcattccaatcattgaatcttcctagagccagcttgaaataccattattgggatgtttctgaaaaagttacaagaaaaatctgacactgcacatcaccagtagcttttgggagatctgtttgcatctcaaagtacttgatatgtgcaagagggtcttctctttcggtatatgtcttctatatcggcctcttaaacttagcgaagggtaaggcgttaatatatgccaagaatggagatacccttgacctatctagctcaaggtttgatagttttgggccaggtaggccctttatcatatctctaatttgatctagttgtgcttgcacaaaaggatttgatgcagtaggaacttggccgagtggcctttttcttggctgggctaaagcctttggttggctagaccttgcccagccataccctggtgataactctatggtatagagttatttttagtgcctttaaactgaaattattgtgaaaagagtagtgaaagtgtgtttgttatttaactttaattagtttctaacttcattttctaaatagtaagttagctttgaagtcttatagaaattgttattttactagtgtttatttacttaaatgttgttgaaaaagaagaattaaattgttaggaaaaaggaaaggaggcaaggatgaagtgggaacaaaagctgaaactgggctaaattgctgaagcaatgatacaacaaattcaacattctgggcagtgacgtagaaagagttggaaaaactaatttaagttgtccacatcagcatgagcgtgtcagttactcaaaatcaggctagctgattattgtggaggaagaagactaaacctagtgagccaagattggaaaggattgggc

SEQ ID NO: 309590 - DNA, 1362 bp, Cannabis indica
ctatcaaattggagtaactgctgtggatgaaactgagataattgctatggatcaatcaggtacacataattatcatatattactattgtgttctatgttatatacaaatagattttgggtttattattaatttttctaacattttatatataaaaatactgtggagataaaaatttgagaacaatagagaccaggcgaatgcgtgaaaaatatgcacgagtgggaaaaaactctcacacaagctgagtcacacgcagggtctacgattatgcaactattatatgtttctaagctcccataattttttaaaatatatattaaatttttcataggtgaacaattacacaacaacaaataatctatacaaaatgaataaataaataacaacgaacaaacaaccgaataataacccctctaatttaaaaattaattaaccctcaacatagtacattaacacaaaacaaattaaagactaacaattaataatttttaaaaaataaaagcaactacaaaatatttatacattacctcaaaaatatgtacccattaaaaataaatatatactcatttttctatttggttaaacaatttaatagtaactaacatacaactagatgacaagactacataaatatataaattaattggacatcaaaaaattgtgtaaataacatgaaagaaacataaacaatctcaataaaactaaagtaagtacaaaaaatggactactgatatttttgtgttgtaatcttattatttaatttttttttttattttgatgatgttttcttgttactatcatatgcattttttgttgtttttataggacaccggaaaattttaattaaaaaataaaaactgtaaaattgaaaacaaaaagatttaataaaaatgtaaaaaagaaaatatttgacagtaaaaatgttaacattttgccaaaaatagtaccttgtgtaaattttctaaaagagaatactaaacaacagtgctactttatatgtaaatcatttagacattaatttttgtgtcaacagtctcaaatatacacttataaaaaaaaacctcaaataatacaaaaaaaaaaaaaaaaaaaacaaacaaccacacacacacaaaaataaatcgtaatgcaatgtactccacatttatattttgtgtcacaacctaaaaaaaaaaaaaaaaaacaacacacacacacaaaaaaaaataactcctaatgtatgtaatgctgaatgactaaacatatatatatttttatttttctcttagttaaacaactaacaaacaattatatgacaacctcactttaatatgtaatctacttatttttcttttgtttgaacaactaaataagaacgaata

SEQ ID NO: 309591 - DNA, 2970 bp, Cannabis indica
tctgtataaaacatagggaagaattagaaatgtaatacaaaagaagaccatactttcatatatgagatgaaaaaatgccacaaaatttctcaaattaaataaaggatgacacaagtaccagtaaggtcctccatatttgatggcttcatgtcaataatgttgaagcactgaccacttatctcaagattccacaagtttatcctaaggtcatctgcagaaataaatgtctcacagtcgctgtacataaaatatgaaaccggattatcatctttggcacaccataactacaaaatttaatgatttaataataagacacattgattggaaaattcaaagggatggtttattggaagaatgacataattactatttcatatcctccaagcaaccaaacatgcatatacagtcctatacacaaagacaaagagctagaaaatgccatgctttacctattagttgagatggaatttatattaaactcatgagcatgagcataagccttcgacatctgttgtgcagtatctctaggtctacaatctagttatgcaaacattagcatgacacccttttataatgagcagaacgcaataatgaaaaagaagaaaataaaagttgcagaaatcctagcaactaacctcatcatgttggtattgtgttggtgacatgttctttcccatcttatctgtccaatctgaatgatgaccattagaatcctgtccagtcatgaagctcttttcagccaaaagtgcattctctgaactcacatagggagaagaatccatttcttttactttcttcaccttacgttccttcacctgtcatcagaaccaaaattgaagaggagttcaatgttggggtgctaaggaaataattagctcttaaattcttcattgatgtcttttttaaacttctcttaactaatccaaacattacaatcgcttgaatgcttcttactgaacatatatcattcatgtccatctagttacttgatttctgttttaatgaaaatttcttttattcttccattgcttgtccccttaatagaccgcgaaaactcatactctaaggcggggaagtggtgcataatatcatctttataaaagtaaaatgtaaaactccacagttatacaagttacaggttcagaaatattcacaccttccacaatttaattgtcttgttattggtggaaaggataaagagtgagccgttgggcgtagcacaccatcttactttgtttatcttctcttcgatttccaaactcttcaaatagtcaaactgtgttgttcaaaaaccaaataaaaatataatcaccactcaacaggcatagaaatgcacaacaaatgttatttaaaggattacaaaatgaaaagcatacctcaggctcatggctctgaaactcagtcttgtactgaaattcaggattccaagtaggggtaaaatccagtttctccaacttagtgcgaggctggtactgattcgaagtctaagaagccaataattaatcgtaaaaaacacatcataaacccacttttttattccaacattagatgccaaaccaataaaccaacacgattgccatcctaacaaagaaattagcccaaaatgaattcacaaacttcttagctttgaaaaataaataaaaactctgtaaacaaaatcctcacatgtttcccatcttttctttcgaatatcacaacacgaccacctctatctccaacggcaaggtaatcaccgctagcgtcgaatcccatagcagtgatgatatcaactaagaagaaaaaacagaaaagacccattagcaaagtagtttcagtaaccaaattaacttcattaacaaattaaccacaaactatactttgtttaccgaaaaaccaccatgaacctacacattgttgtactgtagtagtttcactttcactagcaattttctcagcataacaaccaaaggaaaacaaaaactaaaaaacaaaaaactatcgtctcaagataagctaaaggaaaccaagaacataataaccttcctcaacatcctctcccggagctcgttcgccgaaaacctgagagaagttccactccataggggcacaactaaaaaccggagctcaaagtcaaaagtggatttagcttcaaatttcaattacatgagagagttcaacattggagggaactgaagttgtaatggagatttataccaatgaattttctaagctttttccactctacttccttacaccactcgattttttattttattttccgggaaaatgccttcttctacttcaagatatgcgccaaaataactttctcggcctctgttctgtgactgcttcgtgggccgatctcatcgtgggcctggcctggaatgcttgcatagtagaccacattgaagataattacaatagtaaccttactagaaaaagcttcctgatttttatatttttaaaattaaaatctcaaacaattaatttcttatactaaggtatgatatgatataatgttgagtacactgctagcaaaaataaaagaagaatgatattatcgaacaaaaattttgggttgagtcgcggattaagttgccttttttaagacgttcgcgacattgcttaggagtgtgcaagcagtcgaaatttgatggtcgtccccaggataaaacaacccagttgtactgtattggaatccaactgtactgtaaagcatcgccgaatacacccaaaaaaatttttatcgcagatggaatttaatttttgtgaaaactgtaattttttttatatgaaaaagatgtattcttcccatcagttcaatcgcattatatagacgaatggattgaaaaattgtaatgtgaagaagaacgttttctgaatcgtggggtgtaattggttgtaggggtgttcataaaaatcgaaaaaccgaaaccgaccatcaaaccgaccagaccgtaaccgaattttcggttccacgtcatcaccgaa

SEQ ID NO: 309592 - DNA, 1006 bp, Cannabis indica
atagcttgaagctgcggtgttgtgttcgtagtgcccaccccttttgttttgttgggaaaaaatgaggcatgaaatttgctcttgggatctctattactcaagcatttattacctactcaccaaggctctatttacgaccgattcatagggctacaacaaatgtcaattgtccaagaatataggaagcagttcaaggcaataacgtcttcattaggagcaatggatgagaccaagctcgaatcgactttcattaagggctaccctggaattacaagcccccttgtagatttcagagccgaaaaatttggagactacaatggcagagacgattgcagctaaccatgcacacactagggcttattgtactaggtcaaacaaagccccaagcccagctcataataatagccctcttaatgggttgattcaatttaatgggcctccagcaatgatgatttcatcctcctcgcacgactctacctgaggttatcgaagactcaaaaatgctaagattcaaaagaaaaaggcatgagaatttgctttaagtgtgatggtacttgggcttgcatgcaccgatgtacgacactgaagcttcaagtgatagagatttacagagagacacgggagctggaagataattcaaccatcgaagaggcttcgagaattttgattgaggaagtggcaaaggcaggcacgcatggcagaagtctcgttcaactcaatggtggggcttacatcccctaggaatatgaaattattgtgaagcataaattaatgattgatagtaaagctacccataatttcattcaactaaaattgtttcaaaattagctattggtggtttcaactaaggtttatgaggcagaaatgggcactgagcaagttgttcatggggtaggattctacaaagtcattcccctaacactacaagagttggaaattattgatgatttccttcccctacccatggaaaatacctctatagtactccaagtatagtgattggaca

SEQ ID NO: 309593 - DNA, 819 bp, Cannabis indica
ttccattccccgccacatatgtctgtacgttgtttcccctcaaattcaggtttctttcttttattgatttatggtatgtttctttctttttgtgtttgtgtagtgaaatttcttctttttctaatctggggttgatttaccctttttatgttttctttttcttaaagatatagtggatgaaggtaaataatactcaaagtggaagattagggtttatgtatttgattggattgaatgtcttaacttatattgatatatggatcttgctgcgtttatacagagtagctcattatgatatacatttccatttggtgtctttatttatattattactatatgcgtttgtacagagtagctcattatgatcttccttagtcattgtttttgaacttaaaaaatacactttcatttcttctactgctaaataataattcaatagggtggcgattaaaacaagtgggtggtgtataatgattgtatataatataacaatgttctttatatgatggattcttttaaagaaacttcataggagttacatgcaccctagttacttcttgcacagaaccaattacatattaggagtcctctaatttgatatacaacacttcattttagaattgaacacagttttgaaagaaaagttcttattctctcacattgtttgaaagtcgtcatggatatcacattgtttaaccattgttcgttgttatgggtaggcggtcaacaacggctctaggttcgtccaagattacgattacaagttggtggtggacgacaactttctgtttgtgaacggtgttggattttatgccctaa

SEQ ID NO: 309594 - DNA, 1672 bp, Cannabis indica
tctggtttcttgcacctcaaacctgaccccccctctctttatctctttctcacaaaacctatttcaaattggtgagttttgtgagaatttgcttggtttggaccttgttatttgtggatctttgtgcttggttttggattgaatttgaggtaacttttcatagccttaatctataattcgtagctaaagtagaaattgaaaattatgtttttctaagctttgaatattcttgattgcatgagtaataaatggtgctagatgttggtgattttgctgtgcgaacttgctcatgagcggaattttacatttttccttgttggagtttatctagtaccgttgttagagattaaaatggatccttgactctaattttagtttctggtttttggtgtgtcaagttgcaagttctaggttcttgagtttgtgatatagattgagttttgctctataagttgtgcttatttaggggtatggattaaaatctaatttttatgtggcatgtatgctgtgatttacagcagcttttaatgtgtgtggtagctctctcgtttatggattttattgtgaagttattattgatgtttgagcatgttttggggttgaattggatgtgtttgggctggttttgcgaacctaaatgggttgttttttttttgggtttggaacccaggggccgcggcccagctctctgtgcaccacggcctgcctccagttggtggcctgggttttggttccaggcgccgcgtccccatctggggagtgtcgcggcccgcccccttgtttctgggcagattcgaatgcaaacttcgaatatttgtaactttgtgatctggacatcattttgagagttctatatatcgttggaaagcctactccgagctctattttattatctatattatgaatgccaaatttatattgtgtgaaagtggatttaggtattaaccctatatttgtgaatcctaaaattatcactaggattaccggcacttggtaaggagcacccggggattgggaatctccacatctgcgggacagcaagtaagacagtagttgcacgtagagatatgcgcggtggtgcttatatttgaaatgataaatatgagtaattagaaacagggattagggttattaccctaacatgagcggtttaacggcctagggttgttaccctgttgatatatgatgtgtaaatgctatgccattttaattataagagtatattaagatatagggttatgcgtttaaggcataatcaggttggactcaataactagaaccgagataaaccattctaaggccttattctaattagacgtgtgagcgtaacacgtaggtctatgccacataaacataaataggcgtgtgagcgtaacacgcaagtctgtgtcatacagacgaatacaaaatggcattaatatttatgtgatatgttaagtatggttattgatattttatatcgtcttgttgggctttctgggcttggctcacgggtgctccactatgcaggaaagggtaaatctgtctctgatcatccatgagtgcggaagctgggcgatgtatgtacatgtttgggccatgctacaccaagcgcgttggggtctactgttacgaattttatgtttactacgcaagtatacgtaatcaagtagtatctcacgcaagtgaggtc

SEQ ID NO: 309595 - DNA, 1045 bp, Cannabis indica
attatcattataattatattgtttggttaatttttgaaattattatatatatatttataatgtaatcacggttatgatattttgtgtaatcactattatattgttatacaaataaaaaattactcttacactttttatattcttctattatcaaaataatttaaaataagaatattataatcatcacactactgattagaatcatgccgattcatgacatcaggtgtcccgtttgtgagctgaaggaagaatcgcatgaccatatttgtttgattgcttgtttgcaaaacagatggttaatcatatatgttcttggcttggtcaagttacttggtcaacatccaaaacactgatctttttaacaggtgttttttagctcgacatgacatccaaaatagagtgatcaatgtagtggctgctgccactttctatctcatttggcaaaatagaaataactgtctttttaacttgttttgttcttccccaagcaggattagccaggatgtgaagaaaatgatgaagtctagaattttatgtttgggtcccttcaatagcagtagaaagaacatttatttcattgatgtaatattaaactggtagttggtctggctgtgttgttcttgttgttgctcggcttgtttggttggggctatttttgcctcaattgttgttgtatcttgtttcgttttttgaataatattattcctcttgttcaaaaaaaaaaattatcacactactcattcttattattgttttaaaaacaaatcaaatatcatattatcatttgggaaacttacaaaaatactagaatttgggttaacttttacaaaaatactgtcacacggaaattttacaaaaatactgtgtttttataaaacaccagtaaaacacaaagcagtataactcaaaacaacagtagaacactagtagaacaccagtgaaacttaacacagtatactgcagtatgaaacttataaaaaaatacagtaaaaagtaaaaaataccgcctggcagtatttttgtaaaaaaatggcaaaagttagta

SEQ ID NO: 309596 - DNA, 1162 bp, Cannabis indica
atacccaacatatattcccagtcagctttgaggacccatctttgttcgttgtggtggagcactcagaacatatactgtacaaccgaaaattcttagatgagaaatatttggctcctgaccaaaagccaattgtaatgagaagaatttgtgatatgataatggcctaatacgtacaagtgtcacaacatgtaaaatagcatgtgcccaagctgaatttaggagttttgttctcataaacaatggtcttgcaattatttgaaggcttttaatgaatgattatgctagaccattttatgtatatacatgagcaacaggattttctacttttatccctattgacatacaataatcattaaaagcatgtaatataaattcaccagcattatgaagacgaattgtcttcattgcatagtttgggaattgttctcgtaattagattatttgagcaagcaatcttgcaaatgctacattatgagtatataataagcaaacatgtgaccatatagttgatgcatctaacaataccataaaatatctgaatggtccacatagtgggcaaatagacccacatatgtcaccctgaattcgttcaagaaatccaagggattcgattccaacttttactggtgatggcttaatgattaattttccttgagaacaagcagcatatgagaactcattggataatagaatcttctggtttttcaatggatcaccatgtgagttctctattattctacgtgtcatgattgaaccgggatggtctaaccggtcatgccaaacaataaataaatttgtctggtttgtgaactttttgttcacaataacatgagttttcatattgtacttatacatgtaacgtacaaacctaaagacaaaccaggtaatttttctaatatgtacttttttcttgaaacaatagatgtaatgcaaagatactcaaaattattttcatctattttcccaatacgatatccattacgacgtatatctttgaagcttactagatttctttttaatttggtggataataagacatcatctataatattttttgttcttctaagcatcaataaatggctcttttgaagccttcaattaaacttgtagtgcctcatattgtattaacatttgcctttattcttgataaatttgaaaaata

SEQ ID NO: 309597 - DNA, 1861 bp, Cannabis indica
aaaaaaaaaaaaaaaaaacccaactgtactataatttaagttccagtaatctctaatactcaccttgttaaaaaaagaaaagaaaaagaattgcttctcttttttttcttaatgcatataaaacaaaagaaagcaataagtgtacatgtcaaactcgtgcaaataacacaagtgttggtgaaaaaaatccataagtaaaccacataggaaatagataaatcgtacccattgataggatccttcttgagttccatcaataacagacactgcatttggctcaagtttaaaactgcttctctctctcagtaaatccctaaccttagaaaacaaggttgatgtattagcaatggaaaaaccagtagaacacatagtaaactacacaatcaataaagataagcagacaaataagaacaaggagcagaaattacttcttgcaaaatgcgttcagacgtatctccaggcaaagatctcaagccagcagttgcctgcatttcagtgaaaaatctcgtaagtattcaaatgtggaaaacataacataaattccattatggattagtcgtcatagaacttaccccaactcgaactggagtggaagaacgcagctttttgggaactgcctcttgtgctttatcaagaagaccaatcaaagattcggcagcagaacgaggattatcagcatatgcacttagtcctggtttaatctgcatttgagaaatttactatatgaattttttaaaaaacataaatttcaatttccaaacatcaataataatactaacaaagaaagacctgtaagaaaagctcgagattgccaccaatggggactagatcaaggtttccatcaaaattaaatacgtgaacgcgactacctgagctaccagcatcaaaaataacggcataagaagccttggatctaagtgctgtaggcgaaaccttgcgattagcaatggagtattcagaacgcgtaggcatcacgtaaacaataaacgtaacgagaagcaaaggcacagaaatgagcaacaaaatccctctgtacctctggatcttatcccctatagaatcatgacccagaggccgacctccaccaggacgcttcgacattttctccgattcaaaaaagccctgactatgatgattatgaagatgatgatcttgatctgacggcggagaattcgtctgaccttctagaagctcagcagatgacggcgatcgataccggatctgaccgttggtggccgcaggcggacccttctgcttcccttcctgtacggtctccagctctctccttcgttaatttccggcttacgcctttattatagaatctaattcttcaatttcgaaaaacgatttcatcaaatttacgaagcaatgtagagagaattatcgaagaaaaaaaacaagtcaagtttaggaaatttacgaaccagatcttgagataatttctactccgaggaataaacggccgccgagtttcactataccgtcgccgattattgccggcggcgaactgtttgatcggaatcgagaattgattgtgaaaatgtaagaattttctgagagagagtgtcagagtcagaatcagacccccaaaaactccacattccaatattttcagacaaagtatttatatatagacagagatctatacaaaaatgggggaagaaattcggaacttttggagaaatagttccatttttgtaatttcaattttttttgtggctctttatgtaaatttgagtttatgtatttttcaaatgttattgcaattttgcccctgaattatttgtaaattataaaagtagtatgtttttttttaaaaaaaaatctattaaaagtactatataattttttatttttattt

SEQ ID NO: 309598 - DNA, 713 bp, Cannabis indica
cgtaaatggtaactatatgtcaccatacttattttaatttaaaataataatataagcaaattaatccgcatgtcatattctaattcgtgtaaaacttaattttcataattaagcttatgactaacatttgagtaatgtgtttaactactcaatcttattattccaaacaaaaaacaaaaccaaactactcaatattccaatatgaaaaaaaaaaaaaaaatactgagattattttttgaaatcaataaacttctcattaggcaaaagccgaaaataaccaatgatcaaatacaagatggacacctgtaagcccaattcctttcatgttttttatcatgtgtaatcaaattttatttgaaaaataaccataaaatgttctgaaaaaaaaaatactaataataactatttccttgtttgaggaaaaaaatactaattagaggacagaaatattatcattaattgctttgaaaaatatataagcagtttccttacacgtcataattgtttaaaagttactttattcctttgtgattcaaatatagcattgttattgagcattaatagtgtttagctttgtagacatatggtcttgtgtttgactagtaatactccttaatgatacatttactacgcagtattcagaatcagaataaagtaataaaaaaatgtaacggaataaatgaagaacagtcgaaattaatatttataatatg

SEQ ID NO: 309599 - DNA, 509 bp, Cannabis indica
tatggatttttgttgtgatttaagttgcaccattaattgctatgtgagtttactttaaaaaaaaaaaaaaaaattaaaattgtaaaattaaaaaatttccaaaaaaaaaacaaatttattaggctaaagaaaaataaaccttatgttttttgttgtttctgctatgaggagttgccacctcttgttgccatctaagactttgttccatttggcaccgtttgtgagcttctttgttggttaatggaaggagcttttaatccaaaaacaaaaaacaatatcaatccaaattttaatggtgttctaaaaaaatatgtaaaatttgcaacatgctaaagttgtactaaatttagaacgagatataacattgtgtcgctgactattatggttcattcatttttacaaaattttatatactttatttaccatattatcattatttaaacaataaaaaagataaaaatataataaatattgctaaataacttttttataaaattattttaattttt

SEQ ID NO: 309600 - DNA, 3518 bp, Cannabis indica
aaaataatttccaacagtatcctgctaaaagtcttaggagggaggacagaggcatgagagacccatctgtctcccttcgatctggcatctaaaatcacgggctcaaaagactaaattaaaacatgatccaagcccaacattgaaggccgatcgagcctgttcaaaggttcctcattgtcgtcatagctacccaaagagtcggttagagaggacatacaagttttgtatctcattctcctgatcggtgcagcctcctcaactttagactcagtatcaggactttgagccccttggtcaacctcaggcacttctgcctagtcaacctctagatttacatcaacattgggctgagtagcctcctctacaactctgacacaaccccttgttgccacgctgacgatatggagatcacatggcagtgttctacgacatgtctatttcgttctggccatgatcacacgggataacaagaggacctatgcggctgtcacctccttaatccaacactcacaatcacctgcatagaagagacaagaggaggtgaacaacctgacaaagctacgaacacattctagtcaacagtactcaagggtaccttccaggtaaatcataatgtgaaaggctaattattagccaagtaccgtcttaagtatatttacttaggcaattagtgagtcctcctaagctgtgcacgcaactataatggactcactaccaagtctcatacagagttcccaaggggaaccacgtataagactacagttttatatgccttcaaggccatcacaagaccttagccgaggtcaatagaggataaaaaactagctgcccgcttggaaccttggccttggtaggctagggttcccaagccttagagactgatcaggtcccatgaccaaaacaagggccgaccaagaaccctatctctaggcataggccggtcagcctatagggtataccccttggccggccataccccatggtggccacccttgaccgaccaagtcttaaacaagacctccttagctggccaggaggtgtacgaatcgaagaatgtgatttttcaagaactcaaacacgttcttcgtgttcttcacaactcaaagagccaagagtcacaacgaaagtcagattcatatcttttttgtctagaaatcacatattacatatcctaagactaccatgcagattaaaataccaaaaagattacaatctaatatgggaatcaaaagacattcaaagcaaagaacaatgttcatgcattcatggtaaaatcaactaaatcaatttaatggcgggaataagaaagcttacccacaactagaaaccattgatgaagaatatgggaagcttggatcgtcaaaacggtgcaaaaatcttgggagaatgatgctatgtgggtttgaccctttagagagaaggaggagcttcttcaaaagttactttctagttagagagtgaaaagtgaaaagtgaagagagttttcccccaaaagcacttaaatagtatctgtaggaccactttttcacttgccacacatactcaataaagagacatggaaaagcagttagtttactgcaacaagtgagatcagacactctagagcaaagcatttcaaaaggctaaaaatgtagcaacttctatttggcaaaggctacatcagttctaacttaaactggtaagtccatatccatgcaaacgtttgcacaaggacttaggggcaaatgctatcctaatttttgctcaatgatgtggcatgcttatgtggaaaaaattagtgccatgtggcaatataactcaccaacaagaaggtcaagtcactgccttagccaacggggaacccgacacttaaatgggacgataagtgacaaaccacccacctcaagagggctagttgaccacccttgcccagccctatggccgaccagcctctggacaacacaaggctggccagcttgctccctccaagtacctgatcggctaggactagacctgggaggatcttgtgcacagttttacacatggactgcgagttgggctacgaattggtccttaacagcctaataaagtagctgaaaaatatctatgtttaagataattttagtcttttgtatttaagcaatataatatgtaaatatttacttattttattggtaaattagggtttaagctctcctatataaagagctttaatacaactctagaaaacctaagttctaagtgataagtctcattcaagccgtcaagctctaagtctgataatactctctctctaccattcacatgcccactataacatctctcaaaacttgaaatttgctttcttttgattcctactttgtaaccttaagagagttatatcaaatctcacatatagtgatctgaatagtattatctcttggtatcaatacaactaaaaggggagtaggtcattacctaccaactaagggggctgaacctctataaaagtctttgtgttccttactttcaagttctaattgtgtaacacatggcaaacatatgattcatacgatcctgctatcggttggcctttttttgaggtcaacactctttaacaccacttgtttgggggccagaggcgagggaatcgacctcctccataacattatctaatgtagttttcttgcttgtattcttttgggtattcaccatggtcgaagtgatgcaacaactagcaaacttttcttagctctcaatgaaagcaccaaaatatttactgagatttttgaaaattaattaattagagcttaagaaaaatataaaaaataaataatagacaaataattttttacgtgggtcgggtgatgacaatccctagtccacgactctgttgtattggccttactagccaatgttaagtgttacaaatgtttatagaatgaatatgaactctgtattgctctcgttccttttgaagaagaagaagcttataggagttttggtagaggttctgtaagtaagaattattcaccctttgtatataaaaaatgagggtatttataggcatacatgtgggtaagggcataccctttacccacctagggtttcatactctacaccctgcaagggttggtactacaacaggacgatctggccattagttggtaaaaagcttcgccatcgtgtggcgtacagttgcagtgaaggattttatgcaaaccgggacacgtgtctctcaaaggtttctcctttgcaaaactctctaaacaggccgttgggcaaaaggcatgtccagaggtgcgtacgggcactaccatggcctgacatgggggacaagatctgatcttgtgtcagaaaaaggtgtaaccgtctataggtcgatttccatatgaagctaacctggccattcgccttgaggtagcagttaagatctaggatcagtccgtggatgtctttgttggaaatattttaccaggatctagatttattaccaagtaagttttattaacatcctaatatgaattctaaaacaatgaaaataaacacataagagttta

SEQ ID NO: 309601 - DNA, 2333 bp, Cannabis indica
ttttttttgtttttttgtaaaaagttattgatgagcaatataggtgactaatttaccccaaaaataacacaatttcacatattatatctcatataaagtgtagtctttttctatagaagagaaagtcaagtctttatctattaactataattttaatttctttccagtaaacatataatgcacgaacaattaaagtctttttttggtgcctcaaaataaataaataagtaaatcaagagaattattatacatgtgaaatgaaaaattaattaagtttttaatataacactctaaatcagaagagtgagatagacccaactatctcgtatggcgtttgaaaatcgtcacagctcatataacactctaaattataaagaaatcatttcacttaatttattatgtatatcatgtgaaataatggatcgcatgattacatctaatatattaagtcaatagtagtctttttctatatcaacaattgagagaaagtccactgtccaaaagaaaaaaaaaatgatatattatgttataaataaattaataatatgacattaatatccaatcattatcaaaccaaacgtaaatttctttagtactacagaaactgcaatcattaataacctctattgagaaatagtagatctgttatacaagataatgatatgtctaataaactctagtcttgcctatatcacctcaatttagaaagtcaagtctttatttattttaatttctttttactaacagcatgaacaaagtctacggcacgtgcccagctcaaaaataaaagttttatcaagagaataattcatgtgaaatgattaaaaataaattaataagcttttgaatactagagtataattaatttgatcgaccaagtcgagagatcagactatatatataagagtaataacacttttcttccaccaaaaaactcatcaaatgtttttctaatataacaaagccaaacaatataggtccgaaaatggattggagttccattagtgaaaatatatatgagataaacaacatcaaaatgaatgttgcctcagtcgggtcagagtccgatccggcgatcgtgttcctccatggctttcctgaggtttggcaatcttgggccaatcagatactttatctgaatcccaagggttaccgctgtatagctccggatctccggggctatggaaaaacagaaatcgaagttcccggagatccagagtcttacagcgttgagaacatcatcaaggacattcttgcccttatgaagattctgaatatcgataaaattttcttggttgggcatgattggggagctttcatggcttggagcttttgcttgttacatcctgacaaagtgagagctgtggttaaccttagtgtgccttacattgccatgaaccctgataaaagtttcttggatgggtttagggattactacggggacttgtactacatgtgtaggtttcaggtgagattggttttatgtttttcattttgattaggtacttaatatataattatatgtattgatttgttatatatatgtataggaaataggagagatggaaaaggagtttgcttcaatggaaactgaacaagtactaaagattctttattcatcttttggattaaatcctttaatgatacctgaagaaaaaaatggaggattcaagagtttaccaattcccaaaatattaccatcttggctaacaaaagaagtcctcgactgctatacccaactgttcaaccacactggctttacaggaggattgagctattatcgagctatggacatgtacaaattaatatatataatttcctattaaaaattaataaagaattaagtataattaatcaaaatatattcactgtgcagatcatggaagtacctgttaacttcgaaagatgacaaagttatagttccagcaaagttcatagcaggggagcaagaccatcctctccatttcgaaggcatgaaggattacttatttattaatggtggcttcaaaaaagatgtgccctcacttgaagaagtggttataattcaagatgtgcctcactttgccaaccaagctaaaccagatgagattagtggacatatacatgaatttttcaagaagtacctctgatcaagatcgagctagaatgatgatttatttaccttattcataatgtactaatgttttacctattatgtttttcccttgttctcttctcttgttgtttgttattgttttgtaatggctcaattgttcttgttgtatgcatatttcttttggtgttttttgttttaataacttcaaccttcataaataaacaatatatatatatat

SEQ ID NO: 309602 - DNA, 1788 bp, Cannabis indica
actcattatatatcactgacgacgcccgtacttacgcctagtatgtcgccaggaaaattgcatcacctaatcaagtgagcctgtatatcacatgcataatatcatcacactatcgatacttaaccaatcaatattttcattatataacaatattaactatctctcaatattaatcaattcataatgatactaattgtattagatacaacgtactatgcaatacaatatacttttcttacctttaatccaagttcatacattttagccaacccacgtggagaactatccccggtgatctcggccctatgtcacaacaatggtaaaccaataagtgtttaaccaaaaacactacttaaaattcacataacacaatatagggttttctaccaaatcccgcggtataaatacagtaaaataaaacttatattttggccctaaaacatacaccgtattttagagctcgttggaagcttcaaaacagtatatagaatgtccaaaacggacacccgagacaaaagttatgacaaaaatacaatttctgatctctttggaatttctaaacactatacaactcgaaaatcacaattttcgcactcaccgaaacactaccaaaacttatccaaatcactccaaacttcacagggcgcataaatacaataaatattaccatccttacataaagaaataaaatttgagcccttaaataaaaaacgccattaaccctcctgttctgcgatctggaataattattcgaatttagaggcctctttcagtactaccttgaaacctaaggttaaaattactatggaggatattgaggatgaaatttatttttggaaaccttcgattgtgtgttatgtggttcgatcaaatccttcattacatattattgaggggtttgctaacagggtctggactgggaaaattgacagagttaaactcttgtgtcatggtatttttatcattcgttttctgagcttggctgttcgagatgaggttctcaatggtggttacatatttttcaatagaaggcctgggacctgaatactagcttcaaaaaagaagacatataaactgttccgatctaggttcatctagaggacttggaacttaaatattggggtcaaaagtcattgttcaagatcataggccaagtgggaaaatcagttacggttgattcagtgactaaggaagggagaggcttagttacccgagaattctcattgaggtgaatggtgaatgtaaattaggaatagttcctggtttggtggaaactcgaagggaatgagaatggtagcctaatactagtgttggggtgcattatgaattagtaagccggtggtttgcaaacaatgttttggtatgggacatagtgctgaagagtgtcaaaagaaaggtgaaaataaagaagaatgggtggttaaagtggacaataggccgaaaccaaatgctgggaacacaaagatagatgatgagggttttcagcaagtcaccaaaatgagcaaaacatgacagaaaagaatgaagttgctgtagtaactcagttgaggaattcgtttcaggtattggatggggacaatcaagataagctccttgctgagattcaaccatgtgaaacagtagaagaatcggtcaagacagggagggggggggggggaggtccctctcttgtcaatggataaagtattatgctggaatgttcgaggggccaacagtctccaaaagcagagtcatataaagcaatttattttggctcagcatgtgggattggtgttggaaattatttta

SEQ ID NO: 309603 - DNA, 1751 bp, Cannabis indica
cgtaaaatcgttgtatatgtctggaaccgaaatagatagagcaggcctctattatgcttccatgaagctaactcctagagagttttccaagtgagtctataaaaaccttttcaaccaaacattgttagttgttttccatgctgcatccatccttcaaacagttgttttttttttaattctgacagggaagggctccttaattcctcctcattatcttttctagttgatcaaaagaaaaaactagaaagatacattacttgtggtggccaattattatgggaaagtataagtgttttgctgataagtttatagtatattagatttggagagtgcaaattgtagaactttgggaacataaggtccttagagttttcgcattagccatttttttttttttttaaaaaaaaaaaaaacgccaccatactttgattatatatatataactaaaaataacttcacttagagtacttgtagttttttttttttttaaaaaaaaggtcctgtaacaataacataagcagtacagtacaggttataaagatcaaggactacatgtttgaaacacatcccttccaaactacctctttatcacttcctaaagaccttggagcaaggtctttaggaagtgataaagaggtagtcaatttattggactaagttagaaagggaagatctgtctcactattcactactacaaaaatgactttttattttaatttttaagtgacatatacacaatttgtgtcggttaaccttagacgtacatactcatattttttgcttcaattaagaactggggccaaaatattattactttgatttagaactgacgcaaacaaatacatataaaaaaggctaattaggatttttgttctctaaactttgacaattatcaaattatgccccttaaacttttctggccattaaacattccttcttgactattaaaattgttagatttaaggactttagtccaattgcatagaattttactaattcaatgattctttatgtactaaatcatgctctctagactttgatatctacctaatcatgcccctcgaactttgacatgtaccaaattatgccccctgaactttcatccacacactattcttactaaaattggacaaatgtccttataatccaacaatctcaatagttcagatttttttttaacaaagatcagggggcattatttggtacatgtcaaagtttagggagcgaaaaatcctaattagtctaaaaaaaatagtttatgcatcggtcaataattggcgttaacaagaaaaaattaaacaaaatgtacacgagcaggttaatcctccgccttctacagatcaaaagaccacaaaaaatttgtttcaaatgtaagatccaccccgcgtcgtcccccacctcaaatccaccacctaattaaaaaacaagaaaaatacccaatccataaaataaaaatacattcaagatgttaaataattggacaaaagtaaagaaactaacctttaaaactaccgtttgagagagagaaagagggtaagggtggcggagatgtaactaggctccacgatgttcgtcaatgagagagctccacatcacctaccaaaaaaatgagaaagggagaattagagtttcaaatctatgggatggatcaagaagaaaggaagaagaagaaggtgatgatgggtggagttggatgacaccgggagagctaacagttcaagcgtagcttagaaagaaagagagagagagag

SEQ ID NO: 309604 - DNA, 527 bp, Cannabis indica
tgaattacacaattctacacgtgtttgtcatgcacaaagcaatttgggcaacatttctcaatatgtcacgacaccatgcgacacgttcacgatgtacatgtcgtaaatactgacatgtttgcgacagtactatcgacatattaaagtagttggttaggcgggataataaatgtcacaaattaattaccattaaatgtcaaaacgtcttttattatccatatttcacgatacatttgagatatgttatcgacatgaaactgaacagttagaacttgatttgctatcgatatttaacgacatattagcgatattatatcgacatgacactaaacacttagtgttggaatttattttaccaggatcttagatctactcacaagtatgttgtttaacaccctaaatatgaactttctaaaacgataaataaacacatataaagtagggttgtacatcggtcggtttgggcggtttatcctatatattttctaacccaatctaaagttcgggttgctaaaatttaagtgcaa

SEQ ID NO: 309605 - DNA, 1347 bp, Cannabis indica
atttttgcacataatggtttagttacagcaacaaaatcagtataaagagaaaatattttagtctcaaaagtcactacaactaagagaaagtaaatgaaaacctccattgaaattgaggggttttcaattttgtatctcttgcaacagacgcatgggtataaagaagaaaagaaaaaacacttctctgcacaaccttaccagaaatcccctaataatgtgctcattattattgaaaatatcgaaacaagtaaaaaaaaacagaaaaaatgcaatgccgaaacggcaaagtttttaaaagaagaatggtaaagcaatttatacttaaaattgcatgctttaggttgaaatcgagatccaaacttcattctaacaattttcacagaagcaaaaaaccaggagggcagtttccttttcaacatgacaagtttttataaacctcttgaacatatactcaattatggataacaacattcgtgataaactaagatcgacccacatgcacaaacacagaaagcatcaaaaccctacaccagaaaaaatattttcaaaaaaaattaataaacgaaaacctagggcaacattttcataaatgaacaagatttcgaaactaaaatcatgaaagtacagaaacccaattgactgctcatgaaaaaaaaaaaaaaaaccctaaacaaacaacaaagtacagaaatagggtcacctcgaatttagatttgggagtcccgatcttgttcttctcaggagtatccatagagaaagagaagagaatagagtagtagaaggggagtagaaacgcagtgagtcacttcaacttcttcgccaacatttactcactaaactcttaaaactgaaaacaagtttttccctcccatccgattagcactctactaactatctttctccatagtttctctcctttcccatttccccaccctgaaaagtctctcagtctctaaccaaaaaaaaaatatatgggtttttcctttcttttcttttcttttcttttctttcttgttttagattcaagaggaagagcgggaaggcgggagagcagtagattttctcgtggggataactccgtccctaccaccaaagccccacagcctcacagctgtaatgtttttaggtaaactatataatatacacacatttattttatatatctacatataaaaaaaaattgtatattacattacatacatataaagtatataaagtaacgtatgataaggtatattaagttttgatctcctcttctctcaatgtgtttttttttttcacttttgtgtgtttctcactcttgattctctttttggattttatttttttgccttttttttttttttt

SEQ ID NO: 309606 - DNA, 857 bp, Cannabis indica
ttacaactcaaaacccccctttaaaatctgtttgatagtgaataataaattaattagagttctcgtgggatcggcatgtacttgcttttatactgaaataattaaaagcgttgaaattaaaaaatagtaaatttgatactgtatatgacacacattatttacatcatgcaaggtgaactgatcattctctctgatcgcattggttgatgtgtccacaccttttctttatgcaattaataacactttttgcgattaacagtacgagagtgaaaacaagtgtacacttgcatcaaataatattttcctatgaaggttggctccacttgataacttttcacgagactgtactcatatttctaagagaaattcgcattataatactatcaaaatgtattgtttgtttctgtttctgatattgagtcaaactgtaacaaataaataaatatgattggaaataacaataaggttttcactttcttttaagctcattctataacacaactacaaccagtagttggtgaggaatagttcaatcccattatttatttcttctagtcttagatgtttggtatgaggttcagattgataggaatgagaatatcaggtagatcttactttttatattaaaatgacattaatgttaaacccctctaacacttaggggctctttgtaacgcattaatgttaggaggggaaaggtaatcttaatgattaccctatttgttatgaagttttagattttttaagccctttaatgcttttatggtagtattctaactaccctgaaaaggtataatattgaccccttaaaaaagttgggactcaaatattccctcagttatattaacgtaagatta

SEQ ID NO: 309607 - DNA, 1483 bp, Cannabis indica
aatatattccgtaattgaaaaaatattttcctaagacctatttctagaaataagccctagtttttacgaagagatatataatcacataataataattaaacctcttaattatctactaattcctatgatttaactgtgtggtcattacaattatcccccgttaaaggatttcgtcctcaaaatcaaatctgaataattgggaccttgagtcctcaagtcggattctaatttccaggtgattccctccacctaataatttgaccaatattatagctctatttcaaataactttacctttcttatcgagaatttcaacttattcctctctataagatatgccttactgaagttctaagattttataactttaagttatgagtcgaattcttaccataccacatggaagcatcatgtgtgctgccaatgctactcgtaaggctaaatgagaaattattaacttgattcttctcaggaaattccaaaagtcttaggaacctagggtatatcttacccttgtcctcaaaatatttcgcttacttggagattctgagtttcggattaacatgtctttattgtctgtgttgaggagcaagtaccctagccataatcttctctatagtcttattagtctgctgaactgacctcaaatctagatattgttttgaacctcaaaacaacatcacacttcataccttttaacatcatatagggagccatctttattacaatttgatatctgatggttgcatgaggacttaatcaaacaggtactttttatatacattcttgtaattcatcacataaacttgcaatacatctttcaatacttgaattgtccctccggactggccatctatcaaaaggtaagaagttgtataaaacttcacttacataataatggccttttgtagactttattaaaacctaaagatgaattttggtttcctatccaaaacaatggactttagagttgcataaagtcatactatctcccttataattttccatactagctcttatacccaagtagtaccataccaaatcagacatactcatggttctaggtaatccaactacaagattcctagcaacttcttctcatcttattcgagaattaacagatcataataatcttacaaatttttggtgattaatcctaattcattaacaaactaagtatctgaatacattatccaccacatctttctacattctacaccataagtagaattttaaatttttatacatcttaatactaccaaaatataacaattaaaaagtggtacgagcttttttgtaaaatatcacttctgagctcaaactgcttgaaacacaaacttgagttttatgacttaacattctgcgatcaaatactaagatatctctgagttagcctgctaaggcttccttaaaggttttcaccgaatttacctccaccaactgagcacttctatttttatcaaataaacctggttgaagtgtt

SEQ ID NO: 309608 - DNA, 2925 bp, Cannabis indica
tcctttggacaagctttgtttagatttgtgaaatctatacacattctccatgtcccattaggctttgggaccaaaattggattggctagcaatatgggatatagggcttccctgaggaaatcaatgttggttaacttatttacttctgccttcactactaccaatctcactggatctaagagtatctgcttctattgaattggatcagccttaagatctatgttcagggcatgacaaattactcgaggattgatctagtcatgtcagaatgactccaggcctgtacatcaccgtttgccttaactgtggagacaatatttctttcaccgtcgaaggtaggtttttccccactctgatgactttagtgggatcttcatcattaattcatacttcttctacctcttccataagctccattgttcgttccacgcctacccttagatctagttcgtctttttcgtggaccacccccagtgctggctgggaagatgttctagcttctgctacatttccttcatggaccatgaggacagtcttggttgacacattatagcagcttctagcactcttctagttgcctctaatcattccaatgcttctggtatctctagggaattttaggtataagtagaagatggatgtcatcgctccaaaatcaaccaaaaaatggtcgtcccataagaacattgtaagctattgggcaatcaactactacataggtgctgttcttgaaagaggacaccacattgcttctagagacttcttcatttattgacattggaagttgtatttttcccattgggatcagcgtgtctccactgaagccttgcagttgaattggacaaggtaacaagttggcttccacaagaccgatggcttcaaaggcatctttgaaaatgatattgacaaagcttccattatctacgagaattttagaaactcttttattcgcaatctgagcttctatcaccaaagggtcattgtgggggaaaatgcacatgcttggcatcatcttctatgaaagtcattggcaaattcattatccgaggatgctgagcatgtgattgtcctgaatggaaagtttcatcttgatccaactcattcaagtatcttttatgtgcattttgggtgctttcggtaatgtgtgatccaccaaaaatggttgctacatgaccatctagcacaggttgggctgctccaggaggatatggatttacaagaccagaagctgcaacaagcgttgttggttgagcattttgtacccgctcaagggcttgtgcattgggagcttgaattctaggagcttgtggatgtcctactccttgaggaggattaatagctccatgttatttaggaataaaaatctatctatgtgcaaccccttgtcaaggataaatgactggtattcttaccgaattgggcaaatgttcattttgaacaaatccttcaatttcatccctctaatcacattcattggtagtatgccctgtatcactgtgatattcacacctctggttaggatctctttttttatcttccgcccttgtacattggaagaggcttcttgtaatggaccatgttacaagttaccttataaacattctctcgagtatccacaagacttgtgtactcagggtatcttgactcttgagtctttcctttcttcgtagaatcattccagcttggacccttagaactcctcttgctctgtgattggattacattagactttggagcttttgcttcttggtttgtttgtctaggagcggcactgaattcagtttgtattgctctaaatccaaaaaactaccctatgtagctggctgcgcgaaaacacttggtccgtaaacagtaggagttgtaaaggcagttgctggagggaaaattgatggagtagttatctacaaagtttgggctgctgctatgtctgtggaaggtgctgaaaatgctccataagcttgagcataagcttcttctaagtttatgaatccttaagctcttgtcaagaaatcaatcaaggtatcttcactttttagttggagatctccaagtagcaaagatcttgtggtcaatcctaatgtcaaacccaccatcttcatatcatcagtaaccttggttttagcagcaatatccatcatacattggatgtatttcttcaagctttctcttggtttttgtttgacattggtcagggaactagcttctaggtcgaaggccttcgctgttgcatattgctttttgaacattacttgtagatccctccagttgtggatcgatcttggagacaacctcttccaccagtctttcgcggacttgctcaaagtcagtgaaacgcaaagacattttgcttcatgtgattgtacttggacaggtggtcctggggtttgtcctacctttgtacaattccatttgtggcattttgaagtggtctggtagttgtgcatctattattcttttcacacatggttttgagtcttcttcttcagagtctgacacattaccattttgctttttggagacgttctctgtgagattcatcaactctttgactttgcgttctaagcgttgagtcttgtcacttgaagattcccttccgcgaacatcattgatatgatttctcaaattattctcacagggtctagattttttcgttcttgctttctctttcttctcatttaatcttttttgaagataatttatggagagacttccactgttgctatataaaaccgaatatacctcatagcaatcatcactttgactactggagttgttgtgatgatgcttgtacttttgagaagtagacttcttgcctccagcattagtcttatctttctgtgcgactctacctctggaattagtctagtcaccctaccctaaagcatggtttcctttctttttctattgaggttggtcgacaatttt

SEQ ID NO: 309609 - DNA, 1796 bp, Cannabis indica
agcctttgtccaatcaaacctcctatgccaagagaagagctcttatcttagccactgaatactcattcaaccttgtgttaacagaggcaatgaagacatcatagtccctggaaagaccattgaagatggcttcaatgcgatcctatgaggacatttctatgcccgatcgaagccaaggtgtcaataattttattaatcttgagaagataatcttcaagagtcctttacattcgagtgtttcgaagaagagttatgtactggccaatttttactctattcaagactgtgaagtgttctttgagtatggtccaaatctgagttgtcgtttcgcaccagaccattttgatgagaatcttttttcacatggaggagggaagccaataaatattcacattgtcctatttttaccaatcctcatattcatgaatgattctattagttgcacgatcttcagttgagaggaattgtggtggaatgagtgctggatcaagaaatcgctagagtcttcttcctttaatgatggtgaaaacttagtgtctccaagagagatagttgtgttcatcaagtcttaccaagagtgaatgagaaaaggaaacatgagaagttttaggaaaaatactgatgtttgaggttgggatgactgattgagaagaacctccattgctgccaccaaaggaagaagccattgatgtttagatagagaaagataaaagctctgataccatattgaataatagaatctaaaattctggaaaaaattctattctcattaactattgtaaagctatataagaatttttatacaagcttaagcaagctgagaaatatagaattgaaaataacagaatggccaaggagccaactagccctgacaaactaagaatcaattacaacagatgactaactaaaaccttatcccttgacaacaagtacattcccatactcatcatgggccaccatgtcgagctcataaataccaccaactgcatcaagagcaacgacaaggttcattttgcactttaccaagatagatggggaaccccgaggctaaactagctccactctcgtgataacatcaataattattcttgcctgattagctatttagaaagatgttaattaaataatctcctgcccaatcaaccaaaagcaagcttatgattaatatttcttattacttaggcttaaaagatattaatgtagtttaattttttttaagaatttaacaaagaaaagtacaatacaaataaacataaattttttacttctctagcaacactttagaggcttagataagtcaacaacaaacaaagtgagaatatattatttaaatataataaatagatatattttggagtttagacctaaggaatcatattattatgcaattaggaaagaaagaatggaatataaatatgttgcacatcaatttactttgatacgaattaaagcaaaaacaacgcttttttgtttgttagtgattcatgctacaagctaaatttcatattagtacctaattaataaaaaaggttgtatataatgtaatataatataataaaataatatcattatttctatgactaaaaatcccctatgctctaattttctttattattattaaattaatagcgtcatcactgatcaagtaattaattaattaaatataataatgtaggaatatacttaatgtatagtaaatgaaaagaattcactcactctagaaacccatgcatgatatgagaatcattctgatcatatctttagatttcgatgttaaaaatatatatataaaaaaa

SEQ ID NO: 309610 - DNA, 2192 bp, Cannabis indica
gaatctctttaagcacctgaacagactgcatgttgcctttactaaacaacatgagatcatcagcaaaataaagatttataatatttaatcctctgggcatcagatggtacctataagaagagttattggctgtcaacaatagccttctgtgagatattccatgattaacacaaacaacaaggggataaagggtcaccttgcctgaggcctttttctcctttaaagcttccttgaagtttaccattcgtcacaatagagtaggtagtagctctaacacaagtcatcacccaagcaatgaatatagttggcaagttgtaagctgtgaggagagtttcaagaaattctcaatttaccgtgtcacacgctttacttatgtcaactttgaaagtacatctagaggaaatagtccttctattataattcttcagaagatcttgaagaatcataacattatgagcaatcgatctccccttgatgaatgctccttgattttgatggactaagtcaggaagcacctgagcaagcctcaatcaaagcactttggagatgcatttatacacagttgagcagcatgctattagtctatagtcaacagctttagcaggaaatctatttttggcactaaggatatcattgttgcatgaaactccttcgacatatatcatgtgttaaagaattctttaattcttgtcctaatttagggcatatttgcttaaaaaaacctgctccatatacccggagattttgagtctgggatgctaaagagagcctttttgatctccttgctcgagaaaggctttaacaagcttagttgctgatcaagattaagccaagtaccaagagccatgctatcatggtttatactttttgaaggcctgctccgagttcccatgtagcctttaaaacaagcaacaaaatgatctactactttggaaaaatggtcaacactttctccttggtcatcaatgtaagagacaatcatgttctccactcttctcttcttcaaacatgcatgaaaatatgcattattatcgtctcccatattaagcaaagtatacttgcttcgttaactcaagaacctatgatacatgttttcaatcatgcatatatgtctactgcctccttttcttgttgtcatgtaacaccaaattccgcagatcagcttgcgaattcatcttagctgcaatgagcatatcctttgctgcctcatattctttcccaacatcacctataacatgattattgaacctcttgaaacaatgtttaagataaacaagtttgaagtaaagagccttcatccttgtacatctcaaaggtttgttccaacttttcataacacattcttgaattcaggataataagccccaaaattgaagtatctaaacggtttaactacaattttttcattcaccttaaccgaaaccacacaagcatagtggtctgatatagtttcctagctatagtgagctttagtatttggaaagctatcattccaatcctcattaacaaatatatggtcgatgttggaataaatccttttatgcccctgttgattatttgtccaagtgaaattggagccagtcttgagcaaaggttcaagatggctctgagcattaaaatatcactaagagttactgcattgcctccttctctatcctccaaatcaaaaagagcattaaaatttcctacaataagccatgattttattgggaattttaactttaggagattactccaaagttgtctcctctcctcattagtgttgtacccatatacaaatgtgatgcaacaagcattactttggccaacaattttgatgtaacagtgagtatattgagcattctcctctataacaatgacccgaacaaagttctttctccacacaataagaatgtgacctttactgtagaactagtataataatcccaattaacaaatttcttttccatgaatttcctgactttattctcttcctcaatttagtttccaaccaagcaccaacccctatcttatttttagaacaaaactcataaacaatttcctgctttattattaatacctctcacatgttgggttttatgccctaaataaaactcaatttcaatgtaatctattttatttaacatcaataaagaaacagaagtatttttcattcatttgtgtatgttttggttcactttatcaattgcttg

SEQ ID NO: 309611 - DNA, 1509 bp, Cannabis indica
ttaatctaaatatattatttttgttacggtaatataaatcaaattatcatttttatatataaaaatatatatacccatttaattttatatatatgtaccttccttgcttgtgggcccctatatatatttgaattttttttaaaaaataattaaaaataatatttatataaatatttgaattaaaataattaaatattatttattttgaaaaaatatctaatgtagtggcactttcttgtgtctcactatatctctaaaaatattaatagaaaaagaaaaaaaaggatatagtgacactttatttgtgttgttgttaccgtttcagtctgacaaaacttgactctatatgcctacagtgacgcgcagaaagtgaatgtaaaaggattcagtgacacatgtgaagtactaaaattgtctttctagtcaccctcattagtgacacgcattgaagtgtcactatacagttttagagttactcaatgtgggtcactaaaattcatttttctagtagtgaagcttctaacaatgaggatgaacatgaaactccaagtgctggcctcaggctagcacacgaagcgcgggctgaccacctagacatacaccacgactctcaactcgttataggttatgtcctaggtgaatacacaactcaatacaagaagataatggcttatctgagctattacattagctcaaaggttgtactaaaaggcaagccgcaaaagaagacacaacagccaacacagtcactcgattagccagttgcaccttgacaaccaaggtagactttgtacttgctcagttcttaaaagaacttaggttccctagttcaaaataaatagacttgctggacaatcaacatgaatacacatacagtgggataccttaaaggaaaaattttgccagaaagcagggattaggggatggttgcacgctctccatcctccacagcataacacacagaagtgcaatcccaacaccacctctaaggagcattaccaagaaacaaggtaagtagctattgatagaagtgcacaaaggctctacagtaattatgctggggggtaaagccaaccgagtgtagtcaagttcaaactgcagcatcgacttggcctcttaaaggctggccgaccatagcatcatcaacctagccgaccatcacctccacaagttggtcgaccatagaatcaatgatttgaccatccctagcttcctccaaatggccaagcaatgctccaatgtggctggccacctagtcttgacctggttagcccaatccaccagcattctactctcatacttctggtttatagaggctaagagataaacaacatcttactagcaagatcccttggcaaaagggaaagaagtgttgggttttatgccctaaataaaactcatttcaatataatcagatttacttattaatatagatcagagataacatttaatgttgcatggttcacatgatttatttcacgattatatgtacataatgcatgaattcat

SEQ ID NO: 309612 - DNA, 1177 bp, Cannabis indica
ggaagaaagcccttgggaagggattgatggttgtggaggccactttaaatggtaagtaggccaagagcgttttgattgacaccggcgcaacacataacttcatttctgaaattgaagccaagagggtgggcctaaaactggagaaagatacgggccgcatgaaaacagtcaattcgaaggccacaaccaccacaattggagtggccagaaaagtgaatgtctaagatcgacggatgtgagggacaacttgaccttgtagctgttcgcatggatgactttaatgtggtattgggaatggagtttctagcagagaagggggccattccaattccagcaacagggaatctactgatcatgggggagaatccttcaatggtgcccgttaaagtgagacagccccccaaaagtcaagctactatcagctctgcaactgaagaggagcctgaagaagaagatgccaacatttgttattgctcccgccgtgtacgatgaaaaagtggaggagtccactccacctataattgagaaggtgttagatgaattcaaagatgtgatgccgaacgagctcccaaagagactgcctcccaggaggggagttgatcaccaaatagagctggggctgggtgccaaggcctctgctaatgcagcatattgaatgtctctctcggaactacagaagttgaagagtcagctaacgaagatcttggaggcagaattcatcaaatcatcaaaagcaccttttggtgcccccgtgttgttccaaaagaagaaggacgggaccttgagactgtgcatagactaccgcgccctcaacaaggtgacagtgcgcaacagatatcccattctcttgatcgctgatttgtttggccagctaagtggagcaaaatacttcacgaaattggacttgagatcagggtactattaggttcggatcgcagaaggggatgaaccaaagattacttgtgttactcggtatcgggtgttcgagtttctcgtcatgccgtttgggttaacaaatgcgccagccacattctgtacactcatgaacgaagtcttccatgatgtcttagacaagttcgtggtggtgtacctagatgatatcatggtctacagcgccacttgaacacttggcaacggtgtttcggaagttgagaaaagaacagttgtatgtaaagcg

SEQ ID NO: 309613 - DNA, 827 bp, Cannabis indica
agtcacatgcaaacgcctccaagtacgattatcctctgacgattgcggcatctgcccccttggtttgcgtccctcttgacacaaacgtggcaactgaagcattccatgtctattccaatttgaacgatctcggtcatcaactcttgatcactatcgtaactaacaagaatttgatgcctcctacactacttctacacccatgccaacgagcttctttttcaacaaaagtgcctcttgcgacttacgttgtcactcaggaaaactcggcctagtgtaccaagcatacggtagggactacccaattaaccttgtaatatgccaaagagtttcaaacattttgttgtgcctctacaattgcacatggtagtcgtttttctagcatccctaaatttattcgaagcaaccatcatcgtcttctctctaggatgtccattattcccacgaagaaaaacaacccagtctcaactccatcttagtctactaatccactttagaagactaactggctcaatgacatcttgttccagcattcagacaatctcaatccatccacatgtctacatcccctctaggataggccaaccaggttcacctctcactgagatgaacttggctctgataccaactgtcacgggctcaccttttcaggcagcgaaacacccgtgcagcaccttgacttctctaagccaaggtcaaccttccaacaatttgagtaacagtgggctcatttttcgcgcgaccatgtgcctcgtgtacactttcgtctcttgaacaactcctgccaagtcttcctcacaagcatccataagtgcatccatgcatcgagg

SEQ ID NO: 309614 - DNA, 3113 bp, Cannabis indica
agggcataaaacctaacatttcttagacgaaataaagcaacatcataagtagatgattacaatcattcatgtccaatggtgtatgatttcaacaattttctaataaaaaagctatagagaaaatctaaagaaaaaattcaattaaataagaatttaatgatgtcctgagagtcaaggttactcttattttataaactttttcattgtttcagtattgtaaacaccaatcctagttgtcacctttagggatgatttaacaagattttttattgataaaatacttatcttacgagatttaacactattaatttgtctaatggatgactatccaaattactaagttagatcaacaatgaaaatttgaaattgatactgcataatcaataataaaaataaaagcaatgttcaatataaattctattaaccctaaaaattagcatatttgatgggtttacgtactcggtatgtatttcgtaatgccgccatcgatactcgtaattcctaggggcactcatgcaatttgatgtgatgtttggtcccatagagatccattgacgagagcaagggcataataaggaaaggttatacatgtgtggatgagtgctacgtgcatgggtgtgtgagggagtgtcaatgcgagtagggggctgacatgcaagccatgggtatgtgtgtaggttttggtgcgagtgcataggggcttccatgagagcccatggggggctcgcatgcgtgttgcgtatgtgtggggaaggggcatgcgtgtgtgtgtgtgtacagtggggctcacatgttagcccggtgggggctcgcatgtgattcatgtgcgtgtgggggggagggtttacttgtgtgtgtgagcagtggggctcatgtgcgagccatgtgtgtggggggggtgtacgcgtagtgtgtacgagggatgggggcttgcatgcaagtccatggggggctcacatgcgagacgtgtgtatatgggaaaggggtgttgagtgtgtattgcgtgaatgtgtcttggggaggctgtacgtataaggtgagaggtgaatgcacaccgacaaggatgacgttggacaaggacttaagggacaaggtgtgcaagggaaagcgtaccaccatcccttctgaaagctctgaatgcagagatgtacgagtagcagcgacaagacttgcaaggtctgaggacccgaccaagggtatgctacaaccactctcctgcaacactgaagcggggaccacatgcttgcaactggggatcaccttcatgcaaccacagaccacaagcttgtaatcagggaccaccttacaccaaacaaaagtaagaggtgccaagacacctctagcacctgcggtctacagcttgaaagcaacgttttgtccccttgggaccactttctattctaggccattagagcctatcaataccctcttctcagaagacaagttcagaccaggttgatcctttgcacacaattgttaaaaatgactagacactctcgtcattgtcagtacgtgaaaactcaccttgacaaagaatagttggttgcaccggggtgagacctgtcaccatccaccgttagaagtggaggtgcgaacatcagtagggtgcaaatagacgaagagcaccggcatagagtgcccagtgaagtcaccaaagtgatggaagaggtcagtacaatcatcagagggtcttgcataggaggccaaactcaaagagggagggacatatatgcctgagaggtaagacgagaacctcactcttagagcttagaacgaagacctctgaagaactttgagggggagaacactccagtcatatttatagaggaagatgcaagagcagtgcatttcccacacaatgatctattggtgcttacggtgttgatggctaacaccagggtacactagacatttgttgataacgagagttcagtagatatcctatacttcacctgttgggattattttaccaggatctggatttactgacaagtatgttaaactaacatcctaaatatgaatatctctaaaataatgatttttttttatgaatcagagatttcattgcataaacaaccaattacaacatttacaaactaatagcaccttaatcaaggccttttgtataatctatacaattatgtgtgatatgaaaaatgattcttaaagattgttaaaccaaactctatctttctcagctactttccccggcattacacttgctattctatgcttcagtatccatttaatctgctgcatcaatgaaccgactgtgtgcatgttggaattccaaatttgagcatttctgttttgccaaacagagtataccgaagctgcaattgcaacataatacacttgcttcctaaacttggaatatttccctctatcaactcttcgaactaaggcctgtagactactcgaagcaaccctccaatcaagccaaagtttcacctgctgtaacacttccagagaaaatctgcaggcaaaaaagaggtggtctgctgtctctttatccgaactgcataaggagcagttttcatcatctgttattcaaaattttgtaagtctatctttggttttcagtcaattttgcattgttaaccagacaatgaaactatgcttaggcacattaagcctactccagctgcccttgcaccagaaaaagtgctcaaaattgccttgaatcagtttatagcctgctgctattgagtactggtttgaggagaaagtgttgatgttcattagctgcttcactttgtctcttgcctcagctattttgcaccaataccagctgctattcgagggagctttatgctcccaccactcctccttcttgatgtaaacactatggatccaccttatccaaaggttatctttcttatttgcgatagaccaaacatgtttgaaaacggctgcctcattccaatctgaagtactcataaaacctaaaccacctgctgccttaggcttacataaccacctccaagcaacactgcccgacccttcacttctaccttggcaaaatcaaaatctgacaccagtaggtatgtacagtcagcaacacagagtttattagtacaactctccccacaaacgagatgttcctcgaactc

SEQ ID NO: 309615 - DNA, 605 bp, Cannabis indica
agtttgatttcatttgagtatgcaattttgagtaaatggatgaattaatgtaaattggtgcttgggatacattgtttttatgatatggaaatgttctggaaggtttgagcaggtttggtgaggaattggttgggttttggaccaacaaagcagtgtttcccgtctccacaccagggaaaactggttaacctgtttcacaggcatagtgaaaccggtcaaccggttttgccagtagggggaatcctagtttaaagcttcgaaactggttttctttggcgtgtttcccagagctttgaatatgatattttaatgatgtttgagttattccgaaccagtggagagttagatatgtctagttacgaagttagggttattcccggaatgattgatttaagttatttattgaatgttgttgccgtgacataggacccgggatcatcaagctttgttttccacttagactggcatgcacgtttaatctctggactgaggtaagaaagtgttttgtaccatttatggttaacaaatatagttataatagtctcgattataattgagagtctattatgtgtttattatgactcgattatgatcgaggtaatatt

SEQ ID NO: 309616 - DNA, 475 bp, Cannabis indica
aaaataatttccaacacttttgtggtgggtacatgtcacattgagggagtcttagctccctgagctttctcagcctcttacatgagttgtcatcattttgttgagggagcctttcgtcacttaggttttctcaacctcttcacttacgtaacttttccattgagggaatattgactcttagagcagtctcaacctcttctcagtaactcattggatgtaagagagcttttggccctttaggcaacgctcaaccttttttaaaaatataatattttattaaaggagctttgtccccttaggtagcactcaactcctttcatgatataatgttttactaggggagctatgccctcttaggcagtactcaacccattctactacatttgtggtgcttagaacaggtcttgaatgtttggaattttgtacctttttttgagaggcatccctctcatatttgtacttcctctctctctct

SEQ ID NO: 309617 - DNA, 3649 bp, Cannabis indica
taatttagcccctcaataaattgaaatatcgcttagggtatctacacatttagcccatgacactttaatacccaatgacccataattactaaaatgatcactttattttgggccaaacttcaaatagcaatacactaatatacatatgagcccatattgaggattttaatccaacatactaaacttaatctaaattaatactaaaaataacctcacaattacctcatataccactatgcacttctcaaagaatataatcacattcatctccatcaatacactttaatagtgactgattaataacagttattagagtaccattggtatgacactttaaataatgttatacagtaaaaatgtcaaccggtgaaagacgataccttagacccgaattggtcagtgaatccattaaaaaggatcttatatgcttgcttcacaaagtagatagaaaatctaagctaatctgaaacgtagagatatcgagttccaagtagtagattttgtatctcttcgagtatcgcctatgaaagggatacgtagatttcgaaagaaagaaatgttgaaccctagatttattggtccttttgagatactggagtgagtgggcaacgtagcctatcggttagctttacctcttgcattgtttggggtgcatattgtgtttcatatctctatgttgagaaagtacgtgtcagattcgacacacattttgagttatgatgacattgaccttcaaacagacttatcctatgaacaacaacttgtctaggttttagatcgaaaggagaaaatacttcgaaaataaacaattgtactagttaaagtgttgtggaggaaccacaagattgaggaagcgacttgggagttagagtcgcaaatgcggaagcaatatcccaagttattcaggtaaattttgaggacaaaatttctgtaaggaggggattggtgtaatatcctgaaaaacctaattgtaaataattaggatttattatacattatcagttaatcatgtagtaatgagttaaattatgatcctactaatatattttcagcataaattatgaatttttttcataagtggataagtaagcgtaatttattaattatgaagattttttttttaaaatatgtgaatataatgtgacttgtttgtagaataaaaatatttttaggtttaacgaccttagagactcgattggaagccaaaaatatcacaaggggttaagttagtggttgtaataggagtgttatggtatgttagtattataattgctggtggtatttaaaggtacttagggttgacctaatatcctaagattagagatttcttagtggctaagaataacaaaataacttttattaactaaattattattattattattattattattattattattattattattattaataaattgattatatgcgtatgttacactttagaaaaacctaagcctaaccctttttttctcttattctcgtgcaagccaaacaactaccaccaccaccaccactatttttctttgtttttctacccaaaactagctctagtagtagctgagtgtatagacaattgaaggggaaagcttgagctaaggttttagctcaattttttttgaagtttcatgtcatgaagagctattggttttaaggggttaaattttgttctgttattgttgggggtttcttgagccttggattttattttaaagatgttttaggattgtttatgatgcttatttgataggtttgctggctgtaaggtgaaaatgaatcaagtttgagttttaagctcaaagcttgatctttaatgatgtttttcatgttaagacttgtttttttatttctgttacgttgcaattattgtatggatgttctatatgtgttatgtgaagttctgaatgcattggataggttttgatagagtttcaagatgtgtaaaacttggggttctcgtttcatgcagaaaatggtctaccattttggaaaaacagttaatcatttttcctaccacgaaaccccaaaaatggttaatcatttttttctaaacggcttcccatttttggtgatatttagaactccattttccctattttctcgatgtttgaggtatgggtaccctagtgatttataggcaatggtagagttatatggatgctaagggcatgcatcgattcaccttattaagaaatgtgatatatggatgacggtttagggcatcagagttctcttattaggcaataataaaaatggttactttatgaataaataaatgtggcttgttttattttatatctattagagtatcattgtttaatttatatatgatcctaatttagatattcaattattttatgtacttttttgttacttttcttgttgagtctttgtgactcacgagtatttggtggtgcaagtaatggcaagaaacaattagagcaaccatgagacgatggtcttcttaagaaaatgtgcatattgacttatccagcttgtatagtcgggttgtcaggagtcgatttaggctgtatctattgtgcattttgacttattatggtatatagtcattttttaaaacttttgtaacaatagattcgcagaacatttttagcaatgttaatttgttcattactaggattttattttagtgaaaattttaatattattataacgtttaaataaataattaacctactattactatactaatttctaaaaccacacacgcgtgaggtccctatagattagggcattacaacttagtccacttttgaaagagtatttttggtccctttattcagtttagatcacccctttatatggaaagaaggggtccctttggattacataactggttagatagaaatattattacattaattacattcaagtaagaaagttattgaatgcttagttacattcaataaatgaaagagcagtttcaactattcttgattaattacctaaacgtattcgacttgaaaaattacatattagccattcatcttccaaacaaacatactcgcagaatctatgatgtttgtttgcgtatatggtctttggaccaaatataacatcgaaactatcttataaggtagaatgcttgtgattatcctggtcgtgtaactggatattcatgtatcgacaacatagaacctacaggttcttaatgagttatcgtttacttgtctttcggacagcatgtacataaagatacaatctttatgtataaacgtaggtgagatgtacttggttatcgtatataattaatatatgcgcggtaagtgctaactttttttttatcttactttaattatgttgggtgtcacgggctcaccttttcaggcaacagaacacctgtgcggtaccttaacttctctaagccaaggtcagccttccaacaatccgagtaataatgggctcatttcttgcgtaaccgtgtgcctcgtgcatacttctgtctctcgaacaactcccaccgagtcatgctcgtaagtatccataattacatccatgcatcgaggctctctagccaagatactcgcactgttcataggttctcactatgataaggaaaatctcaacaccgacgctcacctagtcactcgtgaccaaggtagcatgtgtggtaagatgccaacac

SEQ ID NO: 309618 - DNA, 1913 bp, Cannabis indica
atcaggcaagacaaacttgaggctatgaccttaaagtgtattttttagagtttccagaaggagtcaaagaatatagactgtggtgtctagagcctggaatgaaaaaatatataattagtagggatgtgacttttaatgaatcttttatgggatttattgacaaatctgctggaagtcaagccaatattgatcaaaacgaaatcgaagctttggaaactgatcttgaggtggagcctctggcaagagtggagattaaaacacctgtagatcatggaagtaatgattcggaagacgattccaaaaataataatctaaaaaagttataaactggctagagacaaaacatggagagaagtaaaggctccaaataggtacggacatgttgatttaattacatttgtatttcatgttgccaatcagattgtgcatgaagtgcctaccaactatgcacaagcaataaaaagcaaagaccacaaaaaatggaatgtagctttgtcggaagaaatgcactccctgaagaagaactaggcttgttgcaaaagtctctgtatggtttgaaataatcttcgagatagtagaacaggagatttgatgattatgtgaccaggataggtccgaagaggggtaagcttgatccatttatacatttccaagagagaaatggagatactttgtatatgttgttgtacgtagatgatattctgatcgccagcaagagtgtgcaaaagatcaagcacttgaaactccagctaaaatcgaagtttgaaatgaaggatttgggtccagctagtaagattttaggcaatgatataagaagggaaaggtggaagagactattgtacttgaaccagacgagttacatcaaaaaggttctagatacctttgaaatgtgtaactctaaggcagtgagtactttgcttgcacaacacttgagttgcttagatgccgaaagatgagactaagaaatcgaagatgtcgagagttccatatgctagtgttgttagctcattgatgtatgtcatggtctgtactagaccagacatagcatatgcactaagcatggtgagtagatccatgagaaatcctagaaaggagcattgggatgtcctgaaatagattctatgttatttgaagggaactattgagaaggggctggtatttggcatgaataatcggaatgaagacttatatgtgattagtggatttgtggactctaattatgcaaggtgtatattgatacccgaaagactttgaccaaatttatgtttactatgttcgaaacaactattagttggaaagctaaccttcaaaaggttgtgtaatgaccacatgatagattatggattagtaaaggcaattaacattaattatggacattttataattaaatataattttatattttattgtgtgctctattttagaaatgggtattagagttataatttttcaattccagagacgttactaaactctaagagtattatttatgttaaatatgaattatacaattttttatagtttttgctcggcgacaatggaaaatgcgatggatagcggtaagagtcacatgggtaagtttagaacctagttcctagtgagacaaacataagagatatttggtgtaacgtcttgtcctacagggacgccacgtgtgtgtgcttttataaaactactcttttactaattcatgtaatcataccaaaaagtatggctaattaaattttgcaattaaaacaaacgcataatttttataaaagataagtattaatatttacggggaccccctgttaccaaaatatttatattccaaaccaaaagtgcttttacaaagtacgtttatacttcaaaatacaatcaaaacgggttatcctgtccaccgggccgtggcactgtgactgatatgtacattg

SEQ ID NO: 309619 - DNA, 1481 bp, Cannabis indica
atcttccttgtccatcttgataagaaaaaacactaagtgttaagaaggtttccatctcgctatgtcctctttgtggcttttataatgcgaagagatcttctcgctatatgtaatgcgaggcggtctatgttgatacattcattctgctcgggtggatgaatatccccttcttgtttgtatattccaaggcatgcatatgtctcattaatcttagaacaatagttattattcttgtctcgtttttgactataaagccaatgaatattatctatttacctttattttataataatgagttatttaatatgcatttatttaaataatattaattatattattcagaattgattcatcttccatatattggacacgtgtcagcttctgaagtgtagccaaattttaagtataataatttccccttaaaaagtactgtttaattaaaaagaactttttaaatgattacaaggctatttttttcataacacaatttttaaaaattgcatgctttggttttctggtggtttataacttcgaggcacatcattagcattaaatgtcttatcttttccaatttgtagtattcccatccattagatctaattcctttagatcaaatggttatcggtgattgggtataaaaagtagatgtgagagctcattttgccattttgcttttcaaacctctaaatttttctgcaaaaggcttttttgattgcttttctcctccgtgtttgtatgccctcattgtctttgacttacttcttgcgtatttcatcggatttcaccttcaatctcagagattctcaaaacacattgattcgctcatcaaaatctcaatcacgaagttcttctttgtctggaaatcttcatcagaatagtgaatggttcttctccttcctctatatacctttctttttgacatttgcaatctgattttcgtgattgattgtcttctctatctactttgtttggttatttctcttttagcatctgctagtttggataattttagggttaagtaaaatttctaggttattaggttcttagattttgaatttatcttttccagaaattgggatcacactagtctgtaagtatgaccgaatttatttctgaaactacaaccccagaattccttgaaactgtatgtcttgaaaatttagcccttccatttgaatccataacttacgttcctgaatccatacttgagataaacgatgccaaaattagggatcatctaataaaaatcaatcaagatgaaatttcagttgctataggcaatttttgcaagaaatgactgagggtaagcatcattttttgcgagatgcaacttggcctgaacaccaaactttatcttctattcctctagcgagacctttgtttttacctcgagtcactgttgttttttcacaaggtcacttagatttcaaaattatgaccactcaagctcaaaaatcaaagacccctcaagatccaacagt

SEQ ID NO: 309620 - DNA, 555 bp, Cannabis indica
aaaatattaattattttttaaaataattgtgcctaaatgagctacacgtgcgaagcacgtgagactccactagtattataacatatatattaattatcagaccattatattagattgtctttaaaatttattggtttaatattttttaaattaatatttatagtgaaatttatttattacccattaaaaagtactatatatacatgtaatatttgttctaatattaaaaaaaatcatattgaaaaaatcagtaactttgtaatatataatgcaatgcagtttcaatcgcaattattaaattcaaaattacaaactgcatcgcacaatttagcaaaaatgcaaattacacccgcaacgcaaaagatttcaaactgcataaaagtgcagtgtgttcgaaggacacaatttagtagatatcaaagtttggaggcacaataatttaatacacaaactatcattgcattagtaaaattgaatgaaattagataaaagtctttaaatccaaccgtcttaatagcttatagaaattttttgaggcgtgaaaattttaataaa

SEQ ID NO: 309621 - DNA, 1187 bp, Cannabis indica
gtgacgtctcgggaaatcggggcgttacaccggggatggaggcaggttgttattgcctcggattgccagctactggtgcgtggtttacacgcacggagggctcctgattggcggctggctggttctttttgggcgttggcggagttgctcgatgatctccctgaggtggagatcatgtggactccccatgcaggggttcaagttgctcacaaccttgctcagtgggcgttttgtaactccttttctgattttttaaatgctgaggacttggcccctcttgtggccatgtgatttggtaaaactattgtgttgatttctccagcaaaaaaaaaaaggtattgttcgctaattagttcaactatatatttgaagatcaagatagatttagtgtaggccccgacttttatcgagccttaggaaaaatacagtttttttgagtaagagaaaattacaaatttgatgaatttttatactttctatataaaaatatgaatttgttttttttaaaaaaaatattttatgggaatttgttttaaaaaagaaaataagtttaaaaatatgggaaaattaaataaaagtaataatcattgactctttagagtaacaagagagtaaccaattactttatgttgtttttctcatattttttaatttttttctaaaattttctttaagcaaatttatactttaaaaactataaaaataaatttttttcttaaaataataggtgtttttttaaaaaaaaattcactaaaaatggtgtgttttaaaatgatattttcttttgggcctttgagttgggtgggctcttggccagccttataggcctaactcaccttagtcgaggattggctcacttcatcttagttttagaatagttgagttgtttagttaggtgttatatgagagttagtttcagttacttgttttgttgtaaccaatacagtaacaagtttgtcaccgtttcttgatacttgttactagtataagtaactctcttataacatagacaaagttctagctcgacttattcaactataactctataatgtctatatattattgaatagattattaaaacatgaatataaaatagtaatcagttaacgtctgatatataataataataataataataataataatagggaaacttacaaaaatattggaatttgagttaattttta

SEQ ID NO: 309622 - DNA, 1986 bp, Cannabis indica
aataatttccaacaaaaatatctagagagctctaagacaaaattagagtagttcttaatctcccaacacaacgacacgtggttgagagagttgatcacgatcctagagtcactttccacgatgacgaacttgcgacctttgagcttcgcagaatccaggggtaaggaataagtcgttgcctcaccacaaagagcatttgcatagtccaatctagtcgaagtaacctagaccacctcacccaaatggtttctagcgaccaccgtgatacaaaaactttccaagccaactctgacatcacaatgaagcttgagccaatcctgaggaggatggcgccagccttccctctagacttgggtcgcaacgagtaaaagagcaactgtcagatcttcaaaagcacaatgggtagagtcaatacattttttttacatcatgtaaataattattatggaccttttcattcctgacacgctagatagtatccaccacaattgaagcataaataatgacctcctctgcatttatgcctttggaactgagtccccacgaaaactcaacccaatcctaaacacgtatactagatcaaaaaataggataaatcccccacgtggaagatctccataagtgaaaaataaagtcacaagaaggaaacaaatgctccatagattcctcctccatcccacataaggggcagttcacatcatcaacatggaatctcttcttaatgatggccctaagaggaagagcatcagacagaatgctccaccaaaagactttgagtctctccatgattttactattccgaagcctgttctaaagcgatggagctacctcacaattaggagctctttgtaaagcttaaacaagatggctgacttgcaagagaactggccattacgttctttggcccaaatccaattatcaaaaccttaaccagagggatcgcccccttgcagaatagcagaagtcgtttctttatcaaatatgctcatcagtttcggaatgtcccattttccattaatagttaaaaggttagccaccttgtgtaaactagaatcaaatcatccgcaaagaaaatgtgtgatagagtatggcctcccttggaaagacatattcctttaatgttaccccttttctgagtcccatctaaaagccttgacaaaatctcagccgcccaataaaaaggtaaggagataacggatccccttaccgaagcccacaagacggattgattcacttcacaagtaatcgattctttaaatttatttttggcaacaaaactcgtattttgtaaccattaagctactttcatctattttttacaattaactactatataagactattaatgcatacatagatgttgttcatgtgaacacaatttacatatgacataatttaatatctaatctctttaaaaataaacacaaaaaataacaagaaaaaaaaacaaattatatttatcggttcctctccttctctctaatatctaatctctttcactctctctttataatttaggggtgtacgtcgatcagttcggtcagtttatgttatattttatttaacccaacgtaaaggtacaaaaatctaagtgtaacttgaccaattaagaaaaaaatcaacccgcccaatgaattggtctgtttggttgggttaacccattcaaactgagcactatgtttattttaattcaattattatattttagttaattgtgatattgagataaatatatagattgaattcatagtttaaatcaactaccatgaaagaaatatagtagtttgaactttctattctttataaatatgtatataaattatattatgtatagattatatacaataaaaatatatattttaaaaaatcctcttaaggtcaggttagtcccggttaattaggcgggttagtattattttcaacccgcccaatataaagattgggcgagttatattttcgtcgagtttttttatttgtatttttcgt

SEQ ID NO: 309623 - DNA, 4140 bp, Cannabis indica
gcataaaacccaacactaacatcctatgaactattatacaacaaacctcccaaatatgaccatttgaggtcctttggctacttggcttatggttccaccttagtctcaaaaagacacaaatttactcctcatagtcgtgcctccattttcattggatatccttatgttatgaaagcctacaccttgttggatatcgaaaacaacaccatttatcaatctagagatgttatattccatgaaagcatatttcctttttttttcacaaaaaccgaatactgatgttgaattctgttttccacaaatagtccttccctcacatcacaacatacaatccaatcaacatatgccacccgatccaatgcacaaacagatgacagcaaatcctgtcaataaacattgtgttatcccacggcccatacaccagaaaaaccccactgtcaatacaccagatcaatcaaaaaagtctctatctaatataaaggctccaattaccattcaacctgcttctattgagcatacacaacagaccaaacatggtcggatcatcaagaaaccctctcgcttggatgcttgtgtgtgtcacacaacctccactgcgcatcccattgaaccctttctctcttatatcaaactccatcctgaatttagagctgctgtgttagcagcctactctgaaatcgagcctcaaagctatgctgaggcctctcaattcattcattggctcaaagccatggacaccgagactcaagccctggaaaaaaacaaaacttggataataaccaaactaccaccaggacaaaaggccatcggatgcaaatgggtatacaaagtcaaatataccaaagaaggagctggtgatagattcaaagctcggttagtcgccaaaggcttcaaccaaagacaaggtattgactattcccaaacatttgaacccgtagcaaagttcaacacattaaaaaatttgttagcacttgctgccatgaataattggaatattcaccaattagacatcaacaatgcatttcttcatggtgatctccatgaagaagtatacatgaaactcccaccgggctacaaagctccaccaaattctgtttatctcttaaaaaagagcatttatggcttgaaacaagcctctcgacattggtactccaaacttagtaccacccttctcgaggatggcttccaccaatccttatatgataattctctcttcattaagagaaccaatactatgctccttcttgtcctcatctacattgatgacattattgttgcaagcaacaatgacaaggctattgcccacttcaaagttttcttggacaataaatttaaacttaaagatattggcagccttcgtttcttttttggactcgaaattgctcgaacaacaaaaggcatatccgtttctcaatccccttttactcttcagctcttgaaagatacagggcacttaggagcgaaacctgcctcttctccaatggagtataatctaaaacttagcaaagataaaggggctctcctacctgaccccactacttaccgtagcctaattggtaaattaatctatcttaccataactaggccggacatcacctatgcggtaaaccacctaagccaattcctccaacaaccacgagtacctcaccttcaagcaactaacagaatcctacaatacctcaaaagcactcctggacagggactatttttccttacaaatacctccccaaccatttcagcatatgctgaaaccagcttatcagcatccaatgttcaaatttcattttttgctgatgccgattggggcagttgttaagataccaggcgctctatttcaggatattgtgtgttccttggccaatcactcgtctcgtggaagtccaaaaaacagtaggttgtatctcggtcatccgctaaagccgagtatcgtgcaatggcaaatgccacctccgaagtaacatggatccttgctctcctcaaagacattggcatctctcccaaagttcccgccacattatactgtgacaacactgctgcaatgcacattagtgagaatctcgtctaccatgaacgcaccaaacatgtggagatcgactgccacttcatatgagaaaaagttcagcaaggatcactcaagcttcttcatgtctcttccaaacagaatcttgccgacgtctttacagctttgctaccttcatccttctccaatattgtgtccaagttgggtgtcatcaatatctacactccaactttaggggggctattaaattgtaattagctaagttagttaaaagtttttatttaataataagctaccagattcctttctttttttcctttctctctcgtgtgtagcttctggctggtgctatggcgaaaacccgtgcgagacaggggaagcagaaatctgagatcaagaaacctaagaagagaggccctacttccacggcggatgtgcgtaaaactaagacaatggatgcagtcctaggtattgagcctatcgatttctctaaaggtgaagatgagggcgaagaagagaggctgagatcgcaggaggatctggttcaaccggttttgtccccaaagtcatccctgcaagcgatacagaggcaggaagatgttagcagggattttgcatcctttttgagtgcaaacaagcaatgttcagtcagtgtgcggcaaggtaattctgtaacccctcccatattatgttctggttctgtggtgagaaatctaaagtcatcttttatgcaatctaagaatgctagtaaagtcaagatcactttagaagatattgaagatgaggttcagttctggaaatcctctatagtatgctatgttcttggggctaatcccccattatcagtcattgaaggtttcattaggaggatatggaaggataaggttgatagagtaggatccctgtcttatggtgtttttttggtgcgatttgaatcggttgcaattagggatgaaatattgaatggtggatatgttttctttaacaatagacctatagtgatgaaagcttgggatccggatgtcaatttcaaaaaggaagacataagatcagtcccaatttgggttcaattacctgatcttgaacttaaatattggggtgagggagctttattcaaaattgtagggcaagtgggcactcctctacagttagataatatgacaaaggaaaggcacaaattgagctacccgagagtcctcattgaagtgtcaatacagcaggaaatttcccaatcgagtatcctttgaagatgaacatggttttaatgtttttgctgaaataaatatgagtggaagcctcttcaatgtaaccattgcaaaggcttgggccattctactgaagatagcaaaaagaaggaagggaagcagcagcaacgggtagtcaaaagcaaggctgttgtttctgctactgattttggtgctgaaaacaaaaataaaactgacagtgatggctttaaacaagtaggtaatggcctcaaagtgaagactaatgtggatgttgggacaactcaagtggctaatgcttaccaggtgttaattgactgcaatgaggatggccaaactgaagcagaagggcaaaggtctgattgttataattcacatggtactgctggttttgctagaaaaaaatggctcggctggtgcatacaatgaaaggggaattatgattggcaccaacaatgttgtaacagtggggaagacaagatgagggggagatcctcctcttggaaatggatagaattatatgttggaacgtccgagggatcaatgaccatgggaagcaaaatcaagtcaaaggcatgttgcatgctaaaaaggctggtcttgttggtctcctcgagatgagagcaaaggcgtcaaagcttggggtcttgtacttaaatatattcaaaggttggtgttttacctctaacattgcttggcatgatggaggccgaatagttgtagcatggaacccctctagttttttggtgaacatattatccatcttcaagtctccactttggatggtaagtctttctttgctacttttgtgtatgctttcaacgatatagagggtaggaactattatgggatgatttgcaaagtttgatcacccttgaacctgttggaaattatttt

SEQ ID NO: 309624 - DNA, 535 bp, Cannabis indica
aataaaatgatatgtgccttaaaagtttaagggttaatgtttcacaaacagtatttttgaaatagaataaaatagaaaattttatgttgaaagaaaaatatagaaccttaaaaattgatcaaaaatgaaaaatggttatttttaaaactaaaatccataataactaacgggtttaaggaaaaaaaaaacctttgacgaacaacgaagcccaaactgaacaaaggaatgtcattctaatactttaaatgtcattccattaaaataaattttaaatttatttaaacatttccattaaaattaataaaataaataaatttacatattaatcaaatctttacataaatacaaaataataaaataaataaatttacatgttaactgaacatttacataacacacaactcttatttactcttcattagcaagatgagcatcactaataaaagaagaatcatcacaattgaagggaagatggggcatcataggaagacgtcgatgaagatgatactggtgatggagcatttaagcacatata

SEQ ID NO: 309625 - DNA, 2336 bp, Cannabis indica
tattattaaaaaaataaccgatcaaaaataaccgatccaatccgcactattgcggattggattggattggatttaaactcttatgcggatcggattggatccaaaatatgaaatccgcacttagtgcgaattgcatgttgtttgaccaaaaaagtgcggaatggatcggataaacacccctaattatgccgaagagaaatgctaaagagcctagatccattggtacaactaagtatcggatctcatatgccatatagtttaatataataatttttaggaagtatcgctatagccaatcgcaacgcgacatgtcgagaaagtgctaagcaccactagtgtctaataccaatacactatgccgaaacctatacatgaaatgaaagttactctattggccactaaacctttttaaatgtatttttttgtgattggttagttactttttaaaaataattgtataaattctgatacttgatacttaattgtactaataccgataacatttttttttcatattttgttcataattataaggctaatttagatttaattttgccccctgaactttgacatataccaaatcatgtttcctgaacttttaagatcgttaaaaatgcactctcaactattgagattgttagacttaaggactgttgtcccattttaattagtaaaaaaatctaacatggatgaaaattcaaagggaatgatttagtacatgtcaaagttcgagggacataatttggtagatatcaaagttttgggagcatggtttagtacataaacgataactgaaattataaaattgaatgaaattagacaaaaatccttaaatctaacaatctcaatagtttaaggggaatttttaacggccagaaaagttcaaggggcttgatttggtacattagggggcgaaaatcctaattagcctaattataaagcattgctatcaggcaccatgtggtgtttaatatcttttagatatgtcactttataattagttagtaatacttcctaaaatttattagattaaataatataagacttaatacttaattatactaatatcgatatcaatacgtaagaagatgctagacatcactagtgtcttttctttctctaattataagaatattgttatttggtatcttaaggtgtccaatattataataacgtgacactttataattagttagcaacttttatattatttattaaattaaaatatataaaacctaattttaaaatataccaaaaataatatgatatctcttgttgtgctttgcactttaagatgaactttagtggcttcttaaggtgactgtttctctaattattaagtgtgggtttttcgttaaagatgaagcgtttcaccaacgagaatttttggaaaaaaaaagagataattggagtcgagctatttgtccgttttagaaattttaaatagtgtaatgataataaatatgcacttttttaaaatggtcgatcttatctaaaataaatgtgatttttcatttcgaagactgtccaaattattgtaatttgattttatattttgtgttacaaaatagttggacaagtgtccgtttagagttgaattggcatgtatgggctacaacctgtgtccttctataggctcattgtttgctgccttagcctagagattgagacattacactcacaattcaacaacaatataaataatttggcatagacattgccaacccaactattcaactatagctttgtgatttaacaagatatttcatatattgccaaattgattttgtgtacatgcaaataaaaaatttgcacttaagacccatattatgtttgtcatgtatatacccaccagatatggacacacaccacattatggcctatccatgcttacagacattgtatccctctctgtaaactattcccaataccttttaaaaaaactctcattaatggaataccattttagaaagcattgttattggacaaacactttttataggtattgttttacgattaattagcgatatttcttaaaatttattttcttaagttaaataagacttaatatttaattggctaattaggttttcctcccgaactttgacatgtaccaaaccatgcttcctgaatttttttggccgttaaaaattcctcctgaactattgagattgttagatttaaggacttttgtctaatttcattcaattttactgtttcagtgattgtttatgtactaaatcatgctccgcaaattttaatatctactaaattatttcctcaaactttaatatgtactaaatcatgctctctgaactttcatctatgttagaatt

SEQ ID NO: 309626 - DNA, 2339 bp, Cannabis indica
cttttgttgctttatacttgtaagtatatattttttatggagtattaaacttatctaaatggtaatatatagattttatgtatttttcttattttttttagttaatcgattcaattggatcgatattatggtgttttttttttttaaattaaattcttattaacaagaatcagagtttaatacagcaatagaaatgatagaaaaattcaatccaaagcttgttcaccatccaccttaagtggatacacaactaattcattagtaaagacatgaactaggaatacttcataaatattgaaaagtaatataataaaaacatctaataaaggctaaataatcaaactctataaaatgaataagaagccccaacacaagagagcaatctagtagtagcactcccatccaaacaactgcatgttcttgattgattggaaaactccctacaataataacaaaacaaagaatgagttcaaaaaaccaatcatacaataaaagaaaaaaaaaacttatctcacgtaaatgactccaaaagtgatgtaaaatcttccataaatagtcgtcaaataaaactaacaaaataaaacaaaaagtatcataccataccacatagtataacataatacatacaccttaagggtaaagagtttaggataaagagttattgcttaaggggtagatggagagtaggaacaggttataatatcagctacaaatctaacccttggatcccagggcacacttgctttacaccttttttatttaaaggttctatatcaagtttgagttgctaatttaataaaccataataggcaatgggatttggtggccttacaatcaaatttttgtcaagttgatgttgacagaattcttagcatcccactaaatctttctccatcagatgatacaatgatatggcacaattcattcacaggatgctacactgtaaaattgggctatcactttgtagtaagtcttgctgaacaggaggatacatgtagctctacatcaacagaacattggtggataacttttcaaaagttgaatcttccatcaaagattcgtatttttgtatggaaaatttttcacatggcactaccaattgatgttgagctacatcaaagacatattggtgctgactctctatgtcatctctgcaaatgtcatactaaaataattaatcatgtattatttttctgcaaaagagcaaaggaagtgtggcgtctcttgaaattataaattgattttaaacttgtttgaccacttgtgaagatttccttctacatctctcagcaagcctttcaactacacattttgatcaatttattgtcctttactggtgcatctggtatgaaagaaatactgaattccatggaaaaaatgcaaaaaaagctgatgtagttttactatttgcgacatcaaatctgcatgaatatcaagctgcttgtgcttctactcaaaggcctgagacacatccaccaacaacaacgcttcaagtgctccttctcgtcctacttcaaagcccaaatgattagctctaccttccaaaagactcaaacttaacacagatgctgctattgacaaatctaaaagtgttgttgatgttggtggactcttaagagaatcttctagttctattgttgcaactttatctaagcctcttcgggactgttttaaatttgaagaaatggaagcagtagccttgtctttaagtctgcaatggctcctatcactcaatttgttagcggattacattgaaactaatgaactcatggtgatccaaggattgcaatcttttcatttatttacttctgcttttcatgctattttgaatgatattaactttcaagtgtcctattttccacgagcgcatgatcactcgtatttttatatttgttaatacttatgtccatactttggctaagtttactcttacggtgaatattgattgttattggttggaggaatttctatctccacttatcactatgtaattttatctaaattaatataattgtctttctcttaaaaaaaaacatataacatatttacaaacataaaaaacaatgtaaatatacttaaattaaagtacaattaattaattaattttagaagttaaccaacatatactataattaattaatttaatagtaataaaaaccttcacaaagtttaaaattcacatttacacgataaaatggcttttttcagttttaaccaaaaaaagtaacaatattgcaaaaataatttcagctggccaaataaacaaatatacagcccaaataaaaaaattacacaaataccacttacacacacgtacaactcaggatccatgcttcctg

SEQ ID NO: 309627 - DNA, 1273 bp, Cannabis indica
attttttaaacatttttttttcttaattaatattttagactttgaccccaagttggactttggaacccatactccggcttgagccctagtctcggacctagatccaactaaaataaaattaaaaaaataaaaattatagaacaaagttttattttctgcacttaaaattaaaaaataaaagttattataaaacagatttttaattttttaaaaaaaaaaattgaataacacaaattttacttttatttttgtggttaaaaaattaaaaactaaagtgttactaaatgtcccctagattaacagatttataatttttttaaactggattaacacatttaattaagactcatattatataatgcgtacaaattaaattacataaaattcacactattatcataatagacaaataattattttaagatttttttccaaatttaatctacagtatatataatatataagaagattaatatttaacattaataaaaataattaaaagaagaagaagagagaataatggatatcacaatgagggatcgatggctacagttagcagcaaacaaccatcatgtgagcaataatgaatttctaactgcttttaaaaatcaccatcatgtgttacacgacaatgatattccaaaaacaaaataaatatcatcaataatcaacatatatttatatatactatatattggttagtagttgaaagtataattagttgattagggtattaactattaaggatccgactttatatataaagatataaaaactagagaccgatactaatcctttaataaagatatactatatctatatatacaatacaactatatctatatatacaatacaaatgaaaaatgctaaaggataccagtggtgcctagcaccttcctatgtgtcagtatcgctattggtccaactaagtatcggattccatgtaatttaatataatatagtttttagagaatatcgctaaccaatcgcaacgtgacatgtcgaaaggtactaaacaccactggtgtcttatagcaatgctcaatacaaatacaagtaatattgcctagctattgctctcaaccaattaatacccaatatatagctagttagtgtgtaccgagtacctatgctaattaatttcatgcaatccccgtttatgtcaaattacaagtaatttgctcttaattttatatatatctttacatattaaaagggtctatctaacggcatttcttggtttaacagaatatacttaaaaataaaagaatat

SEQ ID NO: 309628 - DNA, 533 bp, Cannabis indica
aaaaaagtggaaataaaagtgtacgtattttgcttatgacttatctggcatcactacttgtcaaggcatagttactagttttagggctaaagtggtgtacaataataagctctaggtgtattcaccagactgcccacataaatttaattaggggtataaattaattcaatttaattataatcgatggccacataatgcatattcaattatgattgaatcaagttatatgttatttttgaatcggatattaattttttctttttttttgtttgaacataattttgaatcggatattagatgagatatttataaatctaatacaatttaatatttaataaaactaagtagtatttttatttggtttggataagtaattaaattttatattgttatgttttaaattaagggtgtaacatttaagtcaattcaatttgaaattttatgcttaataaacctaaaaattggtctcctaaactaatactatgcataatttgtaaaatgagataattttttgtaaatccaattttaccccc

SEQ ID NO: 309629 - DNA, 876 bp, Cannabis indica
aaaattattaaaatttatctaatcttgcattggaattgttttttcttccatttcaaaataaaataatcattctactaaaatgatggaaaagttatttcattggaatgacattccaatactttaaaaaacaaccaaaaataagaatacaataaaaattattttctttccatttcattacctccaaccaaacaccaccttaaagtttgttaggagagtagggtagaaacttaccctatgtttggaagagaagaaaaatgtgaagaaagaaagtttaggagggaaaagtgaaaaaaaaaatagaaaaaaagagaagaaagagagaaggaaaaaatggagagaacttttttataaaacatcataaatgtataacttctaagtttttgcaaaataatttttattttgataaaaagatagtatagtaattttaaaataactccacttttcattcctttctacttaccaaaacaactataaagagaattaggttttgtattctttccttctcattttatctctcctttatttcttttcttaataccatacatatctaaaaatgtgaaatttgtcaaactaacaatgtgaaacattaaagggctcgtttggtacgccgtattgtgttggattgtgttgtattgtattagtattatttaatacaatactatgtttggtacaaccaactatatcaactcacccactaaacataaaaaccattataaacccttctaaattttttaacctatacgaatcaagaacttctgttaaaagatggtgctctataatgtattaaaccaatttcattgtgacacatcagttaatttgagtattttttttttttgaaaagagaaaggatccaacagtctacaggacccttccaaa

SEQ ID NO: 309630 - DNA, 568 bp, Cannabis indica
ttttttttttttttcagtcaatcatatttaattaaaataagatttatagttttaaagaaactgcatactacttaatgtagtattttggcacttgttgaaggaaaataaacaatactaaaaacttcgagtattcaagctacgcaagaacacccataagtagaattgcgagtattcacttaaattggctaatgctcaatataaaatagcaattattagaatataaacaacaagtacctaaaagaaacaaagagattatagtagttcagccagtgattggtatgcttaatctatttttagaagatagattgtaatagtttatttgtattttgatcacttctttatatagaaagcaagtgatcattcaatgaaaaaaataaaactaaaattaaaaattaaaaattaaaaactaacaagtcaattattggatgataaatcaagaaacttagaccaaaagtaatttatctcatattcaatatgcccttcaaacaaaggactaatatttcaacacatttaaacttaacttctaatattgtatattcaataaaaatgtgtatatgtcaattctact

SEQ ID NO: 309631 - DNA, 2505 bp, Cannabis indica
agcttatagggtttctgtgtttaatacttgttgcatgttaaatttatcacgagactagaacgtttgcatgtgattgagatttatatatttgagaagactataaattaccttagtaaatctgctattgcatagaatttgataatagggagataatcatattaggtcataatcaatagaaatagttgaagtcgaagccctagtttttattaactgttaatttctttattagtttaattacttactctttcactgttttcattttctagttttaattttttcttaatttttattcaaccaaatagaagaaaaagtttaattttagcatacttaactacaatcctcgtgggatcagcctcactcttggtgagtttactacttgtcacgatacgtgcacttgcatgtgcaaaatatcacaacatctaatctgatgatatccagcccacaagttgagcttggaaaacactgctgctgtaaccaacccatccaaaagctcatcaattgttggaatagggaaccgatcattgatggtgattccatttagtgctctatagtcgacacaaaaacaccatgtcccatcttttttttttaccagtagcaccggagatgaatatgggctggtacttcattgaataataccacactctcccatctctttgaccatttgctcaataatgtccttctgaaaatgggggtacttgtagggcgcacattaacaggtgctgaacgtgattgtaaatggatgcgctgatcaacgtctttgtatggtggcaaccttttggttcgggaaacacatcaaaatattcagtcaacatgcctttaccttgagggggaattaccttccatctgaggtaatggaaccgattgtggctggcaactatccatgacagtcattaaatgaatcaaacaacgaacctcaccctcccacagcagcgtcgcaaactgactataagataactgatatgtggaaacatccttagaggctgctcatttgactgtactcccctgccaagagaactccattgtcaatgctttctattcatggatgcaagggcccaaggtctgcagccactgcattccaagtaccacatccaaacctgaaataggaagcatatacaaatccaccacaaaatgatgaccctgtaaaattaattccacttctttgcaaatttttatcatagtaaagaatggcaattgcccatatataccttgaaccttttagtttcttcccaaggtaattgcaactgagccgcaagtgtttcttgaataaaattgttgttgctgcccgtgtgaatcaagacttccaatgattctgcaccatgtttagcaaaaatacaaaaaattcgaggattagaggaatttgacaaagcatacaggctaacctcgtcaagcggattgtcatctaattcatttgattccccaccattcgaaaagattaatccctcctcttcttccttcttgccacataaaaccagaacctaatttttgcatttatggccaaagctatatttctcattacaagtaaaacaaatgcccttatctctcctttcacgtagttcagtaggtgagagacgtttaacaagaagagagttacctgttttagtggaattagaactcgagttaatcgatggagagccaacaccaatagctggaattataactggagttaatcgatggagagccaacaccaatagctagaattagaactagagttaatcgatggagagccaacaccaatagctgaactagccccttgaagcattggcaacgaaatctaaactgatttagaaccccaagcagctcgttgatttgatccccgagaatgcaggagcatatcatcattacgatcttggtacagttgtgccttagccatggcatctgccaaattggagggagtagcaatcgaaaattccttacgaatttctaccttcaatccccacacaaaaaaatgcaagaacatctgctttgggacaccggtaattcgtgtcattaattcttcaaaatctgctcggtattgagaaacctgccctgtttgcattagcttcgcaatacgatctagtggatcatcataaatggaggctccgaatctcacttgcaatgcttggataaatgaatcctaatccacaaaaccaccaccctttttatccattgaaaccaagtagatggagcaccatctaggtgaaaaaccatgacagataatcgcattgcaaggtcgactcgatgaagatcaaacaacttagtgatcttataaatccaatcatcaacttcggttccatcaaatctgggcacctcaacccgaacagtgttgagaagggaattaacatctcggcaatcaagctcaacatcagaacgtcgattggttgctcgagccatgactggggttgcactattctcaccacctattccaagtgaaagacgaggtgattgtgggttttatgccctaaataaactcatttcaatataatcagatttacttcttaatatagatcagaaataacatttaatgtt

SEQ ID NO: 309632 - DNA, 1642 bp, Cannabis indica
tgcagctacaaatggatgggacattcaacaagtggatgtttataatgcattccttaatcgtgaatttaaaaaaatgtgtttatgcaacaatcataagaatttattgaccttgagtttcctcagcatgtttgcaagctaaacaaagccatttatggcttaaaataggccccgcatgcttggttcgacactctcaaatccactttggttcagtggggatttagcaattcaatagctgatacaagtctcttttttacaaggaaataacaagttactcttgctactgatttatgtggatgatatccttataaacagggggaatgtcaaagatcaaaatacaaagaaatcatcactgcttttcaccaaaagttcaccctaaaaatacttggctctggtcactactttcttggttttgaggtaccttgagacactaaagctatctaattgactcaaagtaagtacatacatgatctgttggccaaaacaaacatgcttgatgcaaaacatcaaccaacaccaatgtgtgatgttgctaagctatctctgtcttcaggaactccccttgcagatccaaaataatatcgaagtgtaatagggcccttcaatacttactcatgaccaggtctgacataacctttgtagtcaataagctaagccagtatctttaagctcctacaactgatcattggggtgcttgcaatagaatattaaggtacttagctgggacttcaacccttggtctctccttcacaactgcatcaaatttgaatctgcaaggctactcaaatgttgattgggcagaatgcagtgatgatagaaagtcgacatcaagctattgtatgtttctggaaaacaatcttatcagctggtgctctaagaaacaaagtgtagttgctcgatccatactgaatttgaatatcgagcacttgcccttgccacatctgaattggtttggttagaatcaatcctcactgaactgtccattcctttgtcaacaatcctgtcttatggtgtgacaacttaggagcagggtctttggcttcaaaccatgtataccatgctcgaactaagcatatcgagatagatgttcattttgttcaaaacagagtgcttgacaacaagttggaggttcaatatattgattccccttatcaaattgcagattctaaccaaaccactgcgcaatcctcaattcatgtacctaagagataagttaacactcaagtcaaatgagtgtaacttaaggggggatgttagagacaatcaagactagggtctctctctccttttcagttagtttgttattacatttctattatttcagttggtctgccaggtgttcttttgtttttgtagtttctgttgtaacaaactcttggcatatatatattgttcttagcctgcttttctttgtagatcttcattcatttcgttctcattccatttgtcttctcttttgtctccttacattcaaacatgcacatgctaaaagttgttcaaaatttatcacaaaatattgcatagactaaattttacaccacaataaatatcactttttatttatatttttaccactcattaatataattagattttttttatttttatttattatattcaatataatttttatattctttctaat

SEQ ID NO: 309633 - DNA, 3165 bp, Cannabis indica
tcagcaatgccattttgttgtggcattttaatcacagttttatgtcttaatttgtattccaaattttaaacacaaatcaatgaactcatcattaacaaactttaatctattatcagttctcaatactttgatcttagaattagtttggttttctacaagagttttccaatttttaaattcttcaagacaatcattcttatgtcttaacaaaaacacccaaactttcctactaaaatcatctacaatggacaagaaatattgtttacctccttgagtttttaccttgctagctccccacatatcagcatgaatatattgtaggacagattttgctctgtaattgctatttgagaacttgatcctatgttgctttccctgtacacatatttcacaaaatggtaggttagcaagagtatagttctgtagtaaaccttgtttagataactcaactaaaccttgttcaccaatgtggcccaatctagcatgccacagtttcgattctgagttacacttatcaacagcagcagcttgtgctggtgtgacattttttccatcaaggtgataaagaccatgtcttttgattcctttcagtactagcaatgaacctttagtaatcttgagtatccctttgcttgtcttgtaatcacatccttcatcatctaatgttcccaaagaaattaaatttcttttcaaatctggaatgtgcctaaccttgtgcaaggttttgaatgtcccacatcaaaacttttttttgacaatagaaccaattccaactacactgcatttgtgatcatttcccattacaacattgccaccatttatgatagtgtaatcatgaaccagtccctatttggactcatgttatatgtgcacccactgtctaggatccaatcttgatctttgagacaagaactggtgcaagcatcaccatcagttgatctctcatccttagtttcattattgatgactgtaagcacatctccattagaatcttcaattactgcatttgaatcattgttactgtcctcttcttctttgtctttcttcttctttcttttatctcttaagtcccaacagttcctaatcaagtgtccaactttgccacaatgatgaaacttccttgtttccctaggtcttgatttcaatcttgaattagacattgagtttcctctgatctcgagcttcctcttcttggtaatctgcctcgaaccattacaacatcatcagtttttggttctagcttagcaactctttgccaatggaactcagcatcccttgatctgagtgtactcataatatcttccaaggttaaagtatccctgctatacatgatgacagttctcatttccttaaattggtcaggtaaagcattgagcaaaatcactgcttgatcctcttcttttatggtttcacccatattagtaagagccaacacaatcttattaagttcagcaagattttaatctaatgtaacagtagcattcattttaaatccataaaacttccctttcaagaaaatctcggttgcagtagatcgagccatgtacaattggttgagtttactctgaattccaagagctgtcttctcaccaatcacctgcctcagtacattgtctgcaagattcatgacaatggcaaatcttgcttgcttcataatagtatctgattccttcttctgggattcatccatttcctttcttcttgatgtcatcatcatcagaaccaagatcttcatctaaggctgagtctaacttcagatagatcagtattgctagcatcttttctttccacaaattgaaatcacctttgccatcaaatctttctaagtcaaaactttttgatgaagaaaccattgcagcagcttctctggtttgatatcacacggtttgagttccagaaattcttagattcttcctggtgctttgataacactatcataatctaacaacataaactcaaaccaattattgatcaattaatcaacatgtaaatgagaaattgaataagaaattaaacaagataaataagcaatgaaaaacagagagaaaaaataaaatttatcctggttcggatctcaaactttgagtcctactccagctctcccccaaggagatttctccactatgaatcagcaattacaaacaccaattatactgcaaagcattcaagaacaatcacagttagatttagctctccaacactcaaaactagagcaatcctattagccaatcctgaacttgatccttctttctgcataattctcactcagcctctctctctgtatctttctcactttctagcgttttctattgaatacaatgaggagctttatatagtgttagtagctgacatgtccaacacttagcagttccgccaaatcggtttataactaactaactgacttactaaaacaagaaagtctgtaactgaaatatcagttgaacgcaaccatatttggagaaaaaaccggtttagtttaaaatggattatcttccacattacaattgttcacaactttattcaaaccattctaaatttttccttgccattttcttaagcattacactctaaattctactcttaagatcatatttaattctttttacaattacatcaattttataaattttcatattctaaagagtttcattcctgcaccatcatatgtggtaggttatcgttgctaaagttgctgaaaaaaaattagcgcttaaatttgttcattttcaatctatgcagctactatataatagcctcaaaatcgatactactatagttttctaattcatccacttgtttacttaaatattagtgttattatgtcatttctgtctatatggtttgatatgttaggagggactatatttattttgtaaataactaatttagctagttttgttagatctatgtgggtaatagaatattaaaaattataagatattttttttgaaatattataagatagttaaaatttgagtcatataatatactacatatacttttatacattacattggatagatatctaggtagacataaatgtaatgtatgaaagtatagtatatattatagggaaatttacatcgtatactaacttttgtcattttcttacaaaaatactgccaggcggtatgttttactttttactgtgtatttttataagtt

SEQ ID NO: 309634 - DNA, 1593 bp, Cannabis indica
tgattatattaaaattgattttatttagagcacaaaacccaacactaactacttcatgagtatcattgatgactttagtagaaaagtttgggttttcatgttgagaaacaagaatcaggctcttgaaacattcaacaattggaggaagctcatggaaaaccaaacaggaagaaaactaaagggtgttgaggatagataatggactggagtattgatcagatgaattcaaggattactgtgccaagactgggatcaaaagacacaaatcagtaatcaaaacaccttaacataatggtttggctgagagaatgaatagaaccattcttgaaagagttagatgtatgttgaagggtgtaggattacataaacatttttggggtgaagctgtgaaaacaacatgttatttaatcaacagatgtccttctgttgcactaaatttcataacacctcaagaggtttggactagaaccaagcctaactatgatcacttaaaggtttttggatgtctttcctatgatcatgttagacaagacaaactagaacctagggccttgaaatgtttgttccttggttatcttgatggtgtgaaaggctataaactatggtgtttagaggatggttataagaaatgtattatcagcagagatgtggtattcaaggagaatgaaatggtaatgaaacctggacagaactcaatcatgaatgctagggtacaagttcaggtggatcacaatgaaactagtcaagaaactgacacacatgaagcacctctaccaaaaacaggagaagctcagattgaatctgatgatgaaacacatgccactcaagagaatctaagaagttatcaacttgcaagggatagagaaagaagacaaacaaaggcttctgacagacttggttatgcagattactttgcatcagaatgcacagcttttgcctttgcttttgcagaagagattgagaatgcagaccccatcagctatacagaagaaatttagagcaaggttagagagaaatggttaatggaaatcaatgaagaaatggactcactgatcaagaacaaaacatggattgtggtgaaaagacctaaagggcaaagagtcataggctgcaagtggatatttagggagaaagaaagtgataatggaactggcaaggttagatacaaggcaaagcttgtagcaaaggaattcagtcaaaaagaggtatatattacaatgatatcttctcccctgttgttaaacaaacatcaattaggatcatgatggctctggctgcaaaatttgactatgaggtggatcaaatggatgtcaaaacaaccttcttgcaaggtatgttagatgaagaaatttacatgacaattcctgaaggcctggaagtagaaaactcagaaggcaaggtctgtctacttaaaaagtcgctatatggtctcaagcaagtaccaagacaatggaatctaagatttgatgagttcatgattcgaattggttttagtaaaagcaagtatgatccctgtgtgtactacaatgatcatgtatatctactcttatatgttgatgatatactgatcataggaaagctaaggagtgaagt

SEQ ID NO: 309635 - DNA, 2881 bp, Cannabis indica
ttatttcatcgttttagaaagctcatatttagggtgttaatcaacatacttgtgagtagatctaagatcctggtaaaataaaattccaacagagggcaccctagccctacacgcaggttacctccgcgatctttgagatggaagtttgaacttctataagttgaatccaacccactatctttcagtactttgtaccatgaagacatggaacaacttaacccaagatttaggagctgaaattacacgaacctacaactcagaacccaacctgggcacctaaggtttccacccagcacccaagttaacatccccaactaggatttcaatttttgagaccgtcttagtgcaaagtagccaaaactcatattgggacatcaactagacataccacggacatgtttgaggcatcaaaattagattcagagcaagttgatttctgagcacctagggccccgagcactcagcacccaggttgacaacaattctgaggcataaaaacatggcaaagcgcccaggttgacacctagggctggccatacccctaggttgacaatttgcaaccctgggccacgaaaatggagttttcccataattctttcgagcatcatctccgtcttcagaaaatattgagaacgaactatttctagggaccaaatagaacttccgaaggggcaaaactgggtccaatcccctaggttgacattttgtcaacttgggctgtttccaatttagtttagaaaaaagtgatccaagaattttccccatcattagaaataacaaagattcaagtaaacttagggataaaaccacaaactcgagtccctagaaatagggcccaatgcctaggttgacctggtgttaggcctagtgcccatgttgacaattaaccttggacgttgccttcaattgctcaaatgtcaaatctgatgcgaccattgaatctagcatggtcaaaaatagggggaaatgtcttgtcattaagttcagaagccttggaagtatcaaaaatagaacctcaaaagctcggtttaaagggcccagcaccaaaggtcaataaatggcttgattcgctaggttcttcttatccgaatctgatgccatttcgaccatctgttgagttgttcacaagtgaaatgatccatgaagtcagattaatcaaattcataacttcaattttggcttccaaaaatgaacagtttcgagtctcccatttctacaaatagcaacatctccgagaactaggtgaccggcttcactagaacctataaaaggactaaagggtatcaaatcatcacttatgcatcccaaaggacttcccttggacatttatacacttctacagcgtccaggttgacatcaaatgtcaacctgggcactgaaatgtcaaactgggcgctggatgtcaacctgggcgttgggacctgaactgccttaagtaaaatggccataacccactcaatttttattcgattcacacgatttaacttgattttgtagctatttaagaactctaccaagtcatgcctcacaccccaagcataattatgaagttatcatcatgaaaatacacccccaagagagttacagaaataagctctgagtaacttgcaacaggacccgccatgcaccaaaaattggccttcaccactagaagctaatttttaccggtagatcatcatcaacagtggaaaaaactttatttgtatttttttctcctatttatgtgggcctccttaaccaataaaaggagagctcccttagctcattttgcacattcagaaaactacccataaggttagagcttctctctctagaattcgaagcttctaatacttaaacacttgctgtaattaccatctcataagaaataaaagctcgaagtagacgtagtcctattactatcgcgatatagtgggtgaactactataaatttctatgtttctcattaattacttaacaaaattttcattcttgctaatctagcaagtgggtatggcttagaattctagtccaatttttaagtcaacattttggtgctctcattgagagtcatagtttaagaatgtcactagttaagatggttgcaacacgttctacaagtgttgacagatgaacgccagtagctggccaaacgattgggggtgcgccagttgatagagttagaatcgggactacttttgcactgcaggtgccaggagcaggccttagaaccatctcaactcaccctctaaggccaccaccaacaactcccgagattggcaccaacgaccatatcccacctagggagccacacgtggagatagaagaccctgaggagatcgatcctcaggtagctcaactcagccaaattttggctgatttacaacaacatctatgagactctctcgataagcaacatgaatggtttcaacactagttcgtggaaaattggaagaacattaaaaggcattaagtaagaacagcagagagctaatctgactcaactgattagggaggcttatcgctccaatcgcagaacttcttcctcaagacaaggcatgcaagagaaagcatacaaccacgccttctgaagcctttgaatgcagggaggtacaagtggcggagataacgagcctacaaggtttgaggacccaaccaagggtacataataactactctcctacaaccaggaccacaagcctgcaaccatggatcacaagcctgcagccagggaccacctgaaactagacaaaagtacgaggtacagggccacctccaacacttgcggcgtacagcttaaaagcaacgttttgtcccttagggaccaccttgtactctaggtcattagagcctataaataccctcctcacatgtgtgagagggggttggaaaatcacttggt

SEQ ID NO: 309636 - DNA, 881 bp, Cannabis indica
ttaatcccatctcaagataccaaacacaacattaatattaagtctttggacagtaatattaattgtaagcggtactcttgttgtagtgattaaacattgacaataaattatgtcaaacaatatgcaatctttggactaacatattattcacacaaaataccttataattgtcacacatttatcaccacaaacatgcatgaaattcatccaaatattaactcacctttgggttagttaataaatttatgaattacatacacacaattatcttaatattttcattaaattaatctacacaaaagagatcactttggtgatattttgtttcaattaatttaattaaatattagatatccttaataaattttaaaaccaaaatttgaatttagttgtctctgtattattattattaaaataataaccataataacaataaaatgcaccgtgcattttttacatacgatacacaatataagcaaaatttaaaatgaatatgtataatacatttatactttatactgtagtgaataaatgcctatattgatatttctcatcaatccagcggagataagtgctcatataagtgtcaggaaaaagcagcaaccaacaattgaaatcagaagaaattaccaacaatcgtatattatctaaattatatgaattcaaatcaaaagaaacaatcgtatgtatatatatacattaacaaaagagcacttttatatatatatatataaaaatacatgtgcgcttcaatcgcagaatctgatttcacttcaatggcatatatatatataaactccaatgcatatatataaacgattattaagcatgaactcatcaaatacaaaataatttaatggaagaccaataatatcataaat

SEQ ID NO: 309637 - DNA, 833 bp, Cannabis indica
ttttgtctaatttttataaaaaaattctaacatagatgaaagttcagagaacatgatttaatatatatcaaagtttgaagggcatgattcggtagatatcaaagtctatggagcatgatttagtacataaacaattactgaaacattaaaattaaaattgaataaaattagacaaatgtccttaaatctaacaatttcaataattcaggaaaatttttaacggcaaaaaaaaattcaaaggacatgatttaatatttgtcaaaatttgaggaaaaaattatttattagtcttattataattaaaaaattgaagaaaaataaaatatttatagttacgaattctctcaaatatctttatccttttcaatgccacatattattaatttacgaatggggaagaaaaataatataaaatttaaaatataagcagtttaagcacatccttttatcaactactgtaagaactgcggcttcacactacttgctctttaattacgagtccatataaccaacccaaatagggctcatttagtaagtacataaatgcaaataatgtaatgtattttttctggatgtcaatattattgttagtgtaattaagtattagatttatataatttaatataataccttttaaaaaatatcactaactaattataaaataatacataatacccattaatagtgttctactaagtatgattgaattggattaaactaacaatattggttaattggattcaattaaccaaaattatagggctccggaaatagaatggaataaaacaacattgttataaatattattaattatgtggatgtccaaatctttt

SEQ ID NO: 309638 - DNA, 956 bp, Cannabis indica
agaatgcattttatatgtcatatatagaaattgcataattttgcatattcggtgcccagcaacattggaacgcaatgtttggctattagaatcaaatcttagtatttttagtataacagggcgatatagttagatattgggaatgtcgagaatagtcgggattttagaatttcccaaaatacccctaagtgattttatgattttttggcttaagtgggggcaaaatagtcttttttccctaagttagttttctcctatagtggactttaattgggattgttattctgattttttaggctggttatatgtagataaaaccatttataatttactaatttaatttaaaaatcaagattctcaaaaaagaagttttttctctccaaactctctctctctctttcgtgccttcgagatccagctagggttgaggtatttctttgtgcaattcaagaatttcagcttgtttgttagtgattcaacccaaggtaacctctctagcagttttccctatggtgttcttaagtttaaagttaataatttttgcatgaattgagttattagctactgtgattgctgttgttgtttgatgatgtttttgaagtcaaataatggttagaattgatgattataacttttttggtggtggttttggaggtttgttcaaggtttgagtttaagagctcaaacttttctctcacattgtgggttttgtctatgtgcttgttgttgtgttttgttgccttgattttgttctttgggatatatggagcaggtctggagagtttggtatgatttggggttgttttaagtgagatatgaattttttattctttcctgcagtgaaccggaattccggttcagaggggcctgtaggaacaagaattccggtttgtccccaagaaaccccacagaaccggaattccggttgggaaccggtctaccggttggggcagttt

SEQ ID NO: 309639 - DNA, 1385 bp, Cannabis indica
catgttagaatttttttagtgaaattagacaaaagtctttaaatttacaatctcatagttcgggggaatttctaacggccaaaaaagttcagggggcacgatttagtacatgtcaaagttcggggagaaaaattactaattagcctaaattcatatattattattataatatttttaatatgtcgtgacgtactttttaaacttgtcgcgtgtcatgttttttactttttaggttaatctatccgtgcttacgtgttatgtctttcgtgtcgtgagtaaaaatatatttttcgtgtcgtgtcatgctaatttgtggcatcattccatgtcgtatctaagtccgtattttttcgtgcccagtcgtactcgtaacttctgggctcatgccggtttcataccgtgtcaaaaaaccgaacccgaatttgcagcactaggtgagaatggttgaccgagccttcctttgttttaaataggacacacgaacaacagaccgaaacttgagcccaaattctcaataaagaaaaagaaaaaaaccttgagcccaaataggctctcccgataaacagaaactgaaaccataatctccatagtcatttcactttaataaataaataaataaataaaagagaacccacacaagttgactatattttgcttcttttttaaactttctattttgtattttttattctgcattattctgtttgaaacaaaaacaaacagctaactgcataaaaagaagcggttgttgaggaaattcaaacaatgttttacaaaaactagacaaagttggaaacctggtgcatgactcgtctcccattagcaacgatgaggtaagaactagtttagcttttttaaaccaatcttgtttaaagcacaggcaaacattagaggtgactgagtcaaagctaagaaaccatgttgagctaattgaactaactgaaatagcagatactaactcctataaaatttgagttgttgtttagtctttttcatggctactctggtatttgattaataatcaaataacttataatgtgctcggtatgtatcaacaatcacagctgttagttaagtgtctttgagtttgttaggatttagttttgccagctgtatgagttagttagagtctgttatttggttgttattcagttgcatagtcttctggtttataccagactgttcttctggttttgtaccagattgtatataagctttgttcttgtactctgtattgaatcaatggaaaatacacagagttgttcatactttttctctgttttgtaatatggtatcagagctagactctgtgtaaactccattctcgtcttcttccttcttctttttctttcatggctcgaggtggaggagctcacactcgaagc

SEQ ID NO: 309640 - DNA, 533 bp, Cannabis indica
aggaagagataacaccggattttatagaggttccccgaaattgtgcgggtacgtcctcttgagctcgcctcgattcactatcaatgttcagagtttacaatggctgggatttcaaacacacaggtatgaaatgataatcccaaatatttacaatgtttttctcctctcttttctctcagattttctctctaaaaccagtgctgatgttgttttctttgttcccttgtgcatgaacaacttccttctgagcttggatctccgaaccctacctagggttccaaggcatacccactgtaagcctctaccatgaactcaatccgtccctttttgttgattctgtactggtctggagttatgttcaagatctgaatttttctcttgtattttctggtctgaatctgtgttgatctctctgaatttaaaatgttgatattctggtttatatatatgttgtagtagtggaaaaacagagaaaagagttggttacaaagtttaataaactttgtaacaaacttgctgatctgtcctaggta

SEQ ID NO: 309641 - DNA, 894 bp, Cannabis indica
gcttccgcttttggttaaacaatgatattcttttccttttgccaatcataatattgatatcatgtttgactctagattattggaaactattattccgatggtatttgtaaattgtcaatgactcctttagcttccccttttatattaaggaaacatccttattgttatggcataaaatattatcatatttcaaaagaaatggttgattgttcaattaaacctaaaatgattccttctcttaatgattctggtggggatatttgtgctaattgcacttgtagaaaattaactaaaacaagaaagaagactgctaattgtagtcaatctttattaaaaattatccacactgacattagtggaccttattgttagaattttatgccttaaataaaatctattttaatataatcttatttgcaatcaatagaagattagaagtcatttaagttaacatgttatttttatatttatggtttgatatacaatttctgataaattcaaaacatatagttattcacaattacagtgatgtcatcacagtggaaagtaattgtgattatatgcttcaaaggttaagtcccatgatttataagtgcattgaatttacaatgacgtgataatcagcaataaagtttacttacacttggatactgatgtacttacaatgacattggtaaagtacattagtatcagatgcatggacattggtaaagtacatcagtattggatgtatggagtatttaaacaaacttctagttttaagtccctaagaagagtatttttaaacacaaaagacagtacggcaggtgtgctcggacctaactgggaaggaccatatcaggtggtcgaagttctagaatcaggggcatataaattaagtaagtatgatgaaaa

SEQ ID NO: 309642 - DNA, 1633 bp, Cannabis indica
acccagcttgctaaatcagcagtttgcttctactttttgtcatccttaatagtattacagacaacacgtttatcagtcgtcagaacataagcaacctttttatagcgaggaaaaataatatttttgtctccatcttttaaaatagtttccctcaaaacgaaaaaagtttattaatatcaacaacatttgagttctcttcggtagtcctggcagaaacacaacttcttaaaaatgtagaaaatagttgttgcacaaaataaaaagaaaatggatgtctttctcctattagttatgatgcattatataggaacaaacataatgaagtaacgtgaagaaagtcattttttctgatcgtggggatcatgtgaacgttgctgaatatattgatgagaaatcatctctgattattaactaattaaacacatagaagaactattttaattaatcaaataaaaataataatttatgtgaaagttcagctcgggttggtcaaacagacggcagcggcgcgcgtgtggtggtcctatgtgtgaattctcaccagtgtcatatttcttttaaagtgcatctcagatttctttggaagttttgtcaaagctgtagtagtcatacaaatcatcagataaactattcaggataaaacttttgcacaaaaaatcattcccaacccagcttgctaaatcagcagtttgcttctgcttttcgtcatccttaacaatattacaaacaacaggtttatcagtcgtgtaaacataagtaaccttttcatagtgaggaaaaataacattttctgtctccatcttttaaaatagtttccctcaaaatgaaaaagtttattaatatcaacaacaccagagttctcttcggtagtcctggcaaaaacacaacttcttaaaaatgtaaacaatagttgctgcagaaaataaaaagaacaagtttattgaattaaagtctaggttgagtcataaatgaggtcgctctctttaagacgttcacggcactactcagaactgtgcaagcagattatcagcctcgtcgtccctagaataaaataacctagtcgaaacactatatctgatctctattgcatgatagagaactgtcaaaataccacacacaataattttactactgctcaaatatatttgtaatataatcgtataaaagtgtatataattttatctgagagaaaaggaatgtctttctcccattgaatctgatgcattatctaggaacgcaagagtgaagtaatgagaagaaagttgtttttttatagatcgtgaagatcatgtgaacgttgctgaaaatacagatgagaaatcatctctctttactaattaattaaacatgtttaaaaattattttaattaattaaataaaaataatattttatgtgaacgttcagcttgggttggttagatggactacgacagcgcgcgtgcagtggtctaatgtgtgagtcctcatccatgcacacaaaagtgggtaccctattggccccaatccatatatcaaagttgcacattatatacacttctaataaattgttcctattacattgtggggctcaatacactctgttgaacgataaaaaaaaaagaggaataaataaatttattattatttcattatt

SEQ ID NO: 309643 - DNA, 989 bp, Cannabis indica
ttagaaatatatattatatatcattaacaagtagcaactcactccaaagtatatactgccattccctaaaatccattaataaaattaacttcatgtcactatttaattcacaatatgataaaatcacgtaataatattcaggatcggctttgaaatttagtgggctatgtaaaaaaatatttataaattttatttaagaaaaaaaatgtggtattttgaaaattagtaaaaaaatatataatttttaaaggaattttcttttcttggacccctcaactaagtggaccctaagcacatttctaacctgcctataactaggatcgaacctgctaatattacatgcattctttatattcaataatattgaggttttattttttttaagctttcatagtgtgttttgcatatccttaaatagacaataaatttttatagatgatttatttttttaattttttgtgttactttattacttttgttattttaattctatgattttcctttaataaaaattcaaatttgttcgattaatggtggtaagtaaatgaagatatatgtattaatttttacttaattagtgaaaaatacatgaaatggaatgtatatttgattattattttttcattatgttcattgagaaaaaattaagcctacaattattaaatcaagaacaattaataattttgttctgaactttcgataatattaattctccgatatataacttgttaaaaattctttctaaacttttacatttacatattgggatattggcggctaaaccacttgaattttacggtttgtaacacttaaccacaaaaattgaatttttggcggctaaactacctaaaccctagttccgttttgctctgcgcacctccgtccaaaaatcacagttaagtgtcacagtgtactgtccacgtggcaagtttttagtggtccacgtaatattaattttaaatatactaaaaataattaaaaaaaattaa

SEQ ID NO: 309644 - DNA, 1615 bp, Cannabis indica
gaaatccccaccaaaaaggaccacgtttggaatgaaattttttctttggagtgctctgggattgaggataacaaagtggacatcaccaaactgatcaagcaagagaagttggttttagagctaaggtggagaaacaaagtgccaattcttgggaaaagtggctttggtggttcaaaactgttgggcagtggtgagattgcatggaaagatgttagtgagtcaccaaacatggtgttagacaagtgggtgaccatggctcattcaagtggtgagcttaaaccagctaaacttaaggtgaagatcagtgtgaaggttttgagtgaagagcatatatttgagaacaagaacagctcagtctcagaggagtgtgggtgtaaggacagtcataatcataatcatcctttatacgcatgtgatgaatactatgatgttcttgctctaactgctgctttagacgctctttaatttgccacaaaattctatattaatcttctttcttactaggtttgcaaaattcatttactaatttgggttttggttggatcatggagctaacaattcttgaatacaatatttgtaattaatataacttctttattcaatgatatgcatactaaagattttcatttacgatgctaatcttttatttatttattttatatttctcacaaaatctttgaattaagtgtggttgattacctagcacctcattcatgtattgataatataattgtaaattttatttttgaacaaagtaaattagggacttattaattaatatgaggtgatcatagtttagttcgcgtatattaaaataataataataattattataataatgtgaagataaaccattgtacaactaaaacccacattcattaaaagaacaagaaaaaaaaaactaaaacccaccaagatttgatttatgacaactgaacacttctggaaataccactaaagatctgatagttgatttggtgattgcatatatgaccactttttcatattatacattattaaaggtttttttttttttttttgaataatattatacatataaagtttgggaagaagccctcatatcaaataataatctaattaaataaaatatatcagtttctaactaaaatgtaactctaactgtaactagtttcacatatactgtcaatcataagaaattttatttagaacaaaaaaaaaaaattacacttatttttattctagaatttttataatttttaattagggtgcaataaacagtgttgaatttgtaccaggtaataaccctcccaaattttgaacttatcctctcttacataaaacagcatagggtttatcttgtaaaaaagaatgtcaatttgaattcaagagatgtaaatagaagttttacaatccaccctctaagttcctttctttattgtaaatatcacttttttgggatgatctcggagaaatgttttttttttgaacttttgactctttcctaactcatttggtcctccatttgtaggtggacatgagcttagtttgtctacaggcaatgcaggtggaagattggcatgtggtaaacaaaaaaataattaatttttaattcaatactcaaataatccatttc

SEQ ID NO: 309645 - DNA, 1860 bp, Cannabis indica
ttgatgaaaaactgcgtcaacacttacaaaacatctcacactctgctgttttggtgtcttacctatttcatgcttattatttgtttgtttatcaaatgtgatcgccgctaaatatttatattttatttatttaattataattatgaccataggttgaagctttggctgttctttgcatatgttgtgtcctttgtttctctcgcggcttcagtgggtcttctgatacaagattcactagtgaaaactggcccttcagtatggacaggaacagctggtgtcttgcagtgtgtgtttgtccttgtcaggtagagcagcttctctttaactctattatcttcctgtatttccatgttattcagggccgttttttcttcctctttcttcttttatccttattttctatttcaaaaagaattcttgggacttattgtggttttaatcattcgttttcacatttctattatatataatacaactggaatgttcatatggtgctttcttagttcatcttttgtagagcgcaacaatttctggtctatttgatgcattttgtcttgaatatcctctattatgtctcaaatatgaaattaaatgcaattttcaacgctttatctacactgcactgccattgctcgcactagctcacgcactctctcggcataatgaggatcactgactgatgacataggtataccctttttcatgttaaccggaactttattttgtgcatgcagtgggctgatgtattggactgttcactcggagtaacaggggaattcaaattgctatcaactggttctttttgaatactcaacactaccataagtgagaaatcggttgttaatttgctttgtctcactttcacttattatttgtacaaacgattctataaaaggcagttcgccatgtaaatgttgtatttacaatattgttgttatcctaactgaaaatgatgttattgtggtcatttcaacaagtctatcccaccaaaacatttctttttaagattttttgcacttgatttcttggtcttggtctcgatttctaaatcgacagtctttctattattagtctttcgtgctaccaaatgtttgagggtgtcgatgcttgaagaggaaaataagcatgacgtaaaaagtgcgggaattgaatgagcttgataatttaaagaaaaatattatataaaatatgggtttttaaaaataaaataaaggaaaaagggtttttaggcataaatataggggtttagctactttttttgttttattataagcttataatttcacattttgtacattgacaccgaattatatgaaaatataataaacaatacaatttaatataatattatataatacagagaagattaaatattaaattgtattatataatattactggtgaagttaaattgtattataacacaatttaattactgaattatataatattaaattgtattgtataatattatataattcggtcaactatgtgcccccagcatcttggaaactagttttttggtgattttttcagtaattttaccggtgacaatgtcaattccgacgactattctggagtttgatattggtgtcggaaaagtcgccggagtagttgccggtgtcagaaaaattgtcggagttattgctggcataaaaaaagtcgtcagaattaacattgtcgccagcaaaatcactagaaaaatcaccaagaaagtggttttttcatcaagaaaccggtttcttcaccaagaaagtggtttcttcatcaaggaaggctggggggcacatagatgacctggatgaatgcttcaaggtcctcagaaagtacaacatgaaactaaatcccttaaagtgctcct

SEQ ID NO: 309646 - DNA, 1859 bp, Cannabis indica
ataaaaacacacaaaaacatataaaattacaataaagctaataaattcaaaaataattaaaaacttactaaattaattaaaaacttaagaactaaaccaatttttagtaaaaaaaaatgtgaaaaataactctaatttctagagttatcaagtaatgagtactaaattcaagttcagtacaacttttcaccctcagtccaatggtcagtctgaaaggactattaagatattggaggatattctacaagaatgtgtgttggactttgaaggttcctggaacaagtacctttccctgattaagttttcatgcaacaatagttatcaaattattatcggcatgacactgtatgaaatgttatatggaaggaagtgttgttcacctatttaatgggatgaagctatgaaaggagatatcttggacccgaagcagtctagagaactagtgaagttgttgagaagattcgagctcgtatgcttgcctcacaaaatagatcgaaaagctatgctaatctgaagcatatggatattaaattataagttggggactttattttcctttgggtgttaagtatgaaggagattcagagatttggaaggaaaggaaaattaagccctaggtttatggtttcctttgagatcctggagagggtaggtcaagtagcctatcaactagctttacccctactttttctgaagttcacaatgtgttccatatttcaatgcttagaaaataggtttctgacacgacccatattctaagttacgatgacatcgaacttaggatggacttattgtacgaagaacaacctattcagatcttggataaaaaagagaaagtgttgcgaaataagactatttttctagttaaagtgttgtggaggaataacaagattgagaaagcgacttgggagttagagtcacagatgtgagagcagtatcctgaattattcaggtaacttttaaggacgaaattttcgtaaggagggaataatttcaatattccaaaaaaatataaatatgttaaattggacatattttattaaatatgtagttatataaatattagagtaagattatatttctactaaagccaattatgaggtaattagtgactttttagaaaatgaataaatgagcgtaatttattaattatagagattttatttaaacatttgggtattatatgtactaattttgaaataaaatattttcaggatcgacgaccgtgagaactcaattgtttggctaaggatgtcaggccagtaataaaataagttatggattgtaccagaatgttttactatgtttgaattgtcggattattcaaggtagataactttgaccaaaatacccctaaattataaattttcttaagagttggatttagggtaagatggtaattttacttagtttcaatcttttgctttatttgattgtttagaaaaccttaggctgaagaaaatagatttagtttatgttattagataattaaaagataaaataaaaaaataataacaagaaaatttcacaaacttatctactctctctatctctctcttggctcaaagaaacccaacagaaccaaggcaaaatcaatatctatttcatcacgtcttttcaatttcttcaatcttaggagctatccaaaccttgaggcaagtttcttcatttgttcttgatgattttaggattttgagtctttaaggaatattggatgaattcgggtctgtaggttttggtaagtttagagtatgttcttaggtttaattcaaggttgtttaaattttaatttcaagaattatgagatgttatgctttggttgggtgagttaagttcaagaactcaaaaactcactcaac

SEQ ID NO: 309647 - DNA, 752 bp, Cannabis indica
tttttttttttatcgaaaataggtatgggaaattgaaagatcatgaaaattggaccaaaacccccccaaacgacatcaaaaacagtgtaccgaaggctaaaacctaattggatcagtgatcagatccaaaataaataggtcaaacatggttagcatggcccatcaagaggtttaagatgacccaaaaaaatacttgtcgtttttgtatggtttcaacctctatatgtccttttttcagtattgttttcatttttggcttgattgataaactacatgtcatttttgacttggctgataaattaaatgtcgttttttttttttgggaaactatatatcattttatggatatactacgtcttttccagacaaactacatgtcgttttcccataaattacatgttgttttcccataaactacatgtcatttattacaaactacatgtagttttaatagtttttccgcaagaaaataataaaaaaaaaatttgggcacatgggggcgcatgaagagtccatttcagaccaaattttttaccattttaattttttcatttaattgtgtgattacattttgggtttggtcaattaaaattgttaattgacacataatcacatagttaatttgaactaaatagtttttttttcacaattttatttttgttttttttcattggatgaaaacagaattttttcatgccataaaattatttgaatagatgattgattttttttttataatataattatgttag

SEQ ID NO: 309648 - DNA, 2335 bp, Cannabis indica
tgttatctaataaagcaatttggtcaatcttagaaataggatttagcaaatcaaacatagattaaggctaattatgatgaggacagataggtattattgcagtagctgaagcatgtgtatttggattaggtgtagactaatgtgtgggagtagttttctcataggaaaatgaaaattcctcaaagaccgcattcctaaatatgtacaacctaccatttgcatctaaacacttgtactctttgtggttaagactgtaatctaagaaagtggaaagggtggatctaaactccagcttgtgttttttgtatggccttacgttggagaaacatctactaccaaaagttttgaaagtagagtaaccaagttgaataatgaacaagacttcaatgggggatttgttatctagaacaatagtaggaagtctgttgtgaatgtatattgcagttctaaaagcttcatcccaaaacctaaggggtagggaagcttgagcaaggagggcaaggccattttcaattatgtgcctatgtttgcgctaggctaaaccattttactgatgtgttatggggcaagggcgtttgtgataaattccattatcagtaagatacttggagaaggatctgaactcacccctagtcaatttgcaaggttttcaaagaattttcaagttgtaactcagcttctgccttaaagtttaaaaacaccttaaagacgtctgacttattctttaataggtatagccatctaaacctatagtagacattaacaaaaaaatatagtacttataatcaatgaatgaaagtgtatgtgagggtccccaaagatcataaacaataagttgtaaaggttcagtgataacagtagtggatgcttttaggaagggaaatttgtgaatctttccaaggcaacaagctgaacaaacaaaatattgagaaattttattgctaataggcatacatgattccatgactgtttgtacaattttctcagaggggtgtccgcacctattatgccaaagagtgaaccagggtgaatgtcaacctaggcgcagggcccaacactcctgtcaacctgggtgttgcagccttgttttggcgccctaagaatctcatttgctccctgagatcacttgtatctttgttatttttgacaacagaaaagatgcccgaaacacttttctcagaaaacacttgaaactgacccagattgagaaaataaaaacaaagaatatgcctcgaagacttctcaagagaaatgtttggtaatggcccaagttatgtcaacataggcgttggatcccaatctgactcccagatggctctgtttgtttcccaaaagcaccatatcttaattactgatggaaatagagaatatgcatggaagactttatctaaaatgctcaaaatggcccatgttgacaatatgtcaacctaggtgctgggaccaagcaccaagtcaacctgggcattgggaccaataactaggtcaactttggcactgagtcctaattttggcctccaagtcaatctgttcctttcctgaaagcacttgatttcttattttggatggagacaaagaatatgctctggaacttcttcaatattgttgttggaagtgcccaaagtttacaatatgtcaacctagacgctaggtgcatcactaggtggcccgggcaccgggtgcttaggtactccaaatggaaaatgttttgattctatttgtgatgcttctaacatgttcgtgacatgtcttatttatctataagtgcaaagtttgagtcatttgcactaagacagactcaaaaactgaaactctacttgagaatgtcagcctgggcactaagtgaaaaccctaggtgcccagattgaattttggggtgctaattcatctttttccagtttttaggcctcaaaattagattcttcttgtcttctttgttcggaataatgaaagatagtgagttggaaataacttggtaatttttaaatactcattctggagttcctgaagtcaactacttaactcggagatattttctttcttgacacgtgtcaaacattgatgtccacgtcactagaatcagtttctaggtaagcaattgggctttgagataatgaaaagcacaaaactctagcccttttattatagggttcaaccactcatgcttgaagagtaagcattgactttcttgtttccttttttatttatttaatttattgttaagaaaaaggatttttagtttccctttttcttgtaagacctttggctataaaagagataaggagagacttctacacactcaatattctgtcgaaaaaatttctctctctctctctct

SEQ ID NO: 309649 - DNA, 1573 bp, Cannabis indica
gtaaaataattccaacagttatctcacatgttgtagctgcaactgccctgtattcagcctttgctaagcttctgaaatagtaggttgcttcttagttttccgggagataaggcagtcgcctaagaaaatacaaaaacctgttgtcgatcatcttgtgattggacaggaagcccaatcggagtcagaaaaacctctgaaatgaaaagatgagttggctgagtatagaatgccttggctaggactgccttttaaataccttatgagatgatgtaaggcctgcttctgaggagtccttggagatgccatgaactggctcaggacatttacagcgtatctaatatcaggtcttgataatgttaggtataggagttttcctatgagttgccagtagttggatgggttggtcaacatttcaccttgttggtcatcgagtttgtgccgtggatcaattggggctttggcaagtttgctgccaatgtatcctgtatcttcaagaagtggcaacgtgtacttcctttgagagaggagtaggctatcttttgttcgagctatcttaaagcctagggagtattttagattaccaagagctttgagcttgaacttgtcatgtagagagtcttatagttgctgaagaatggtgagatttggtcccgtgataactatatcatcaacgtatacgagaagaccgatgaagttgtaattctggcctttagtaaaaagggtataatcagcttgagattggtgaaatcattcttggatgagggcctcagtcagtttcttgtaccattgcctggaagattgccgtagtccatatatggatctttgaagcttgcaaactagattggtacctacaagagcagaggcaaacaagttaagaccaagtggtaaagtcatgtagacctcttcattgaggtctccatttagaaaggcattattaatgtctatttgaagcatatgccattgttttatagtggaaatggcaagcatcaacttaaatgtgaccattttggccacaggagaaaaagtattaaagaaataaaggtcttcttgttgtgtgtagccttgagccaccaaccgagccttgaatctttctacagagccctcactattgagcttgatcttgtaaacccaacgacatccaatggctcatttatttggagggagtggcacgacaatccctgtcttgttgttgcataaagttgttaattcaaagtccatagcatccaaccagtgttggaattgaatgacttgttggtatgtttgtggttccttaagagaggtcactgcaacaataaaagctttgtaagatttggttagtttattataagacaaatatatatcaagagaatgaggagtatgttgggtgttatgccctaaataaaaatctatgtcaatgtaatccctatcatttaaatatcaataaaaaaaaaacagaagtattttcatcacttatttgtgtgtcatttggttcatgttatcatttacttgtgtatttgatttataaattcatccaaacccatatcatatttatattcttgtttattgtgtcgtcagcacagtgcaaagtaatcaa

SEQ ID NO: 309650 - DNA, 2241 bp, Cannabis indica
agatataacggtaagtttaggatatcttatctaagatcaatattggtcccttccaacgtatactccatacatctgatactggtaaactttgccaatgccctggaaaggacataacacatatccaaagtgtaagtatacctatcgctcattatcatgccagtctaaatccaataaactgacaaatcagggaattatactgtgggccaaatggtagacggctagatcctgccagaccgtcctttaagaggaattacacattccaacaacttcaccactactgaagtctctggccaacctatcggccaaataagtcagacaccaaggccacctgatacttcagtgtttgataggttgggtaccgcacatgacctcaacaccaatctgaatcagaaaaggggtttggatggacaaaatcttccaccaactatccaaccaagtatccgtacccaagatctagttcaaagagatcccaatgtgacacaagtctgtcaacaagccgaataagttcattcacttgtgcaagcacaaatagatcaatttaaaaatatggtacaaggcctaaccggccaaaactcatcgatctcgaactcaaccgggcacgcggatcaccattcttgcctaaaatcgaagttcttgacctacccccaaaattcaaaatgccaacctagaaaatgtatacaggaaaatacgatcccttatcacacctaaaatattttgagatgcaaatggatatacaaggggtaaggggtgatgtactttgtagaatctttcctgccacactcatagaggccacccaacaatggtattttaaactacctccaggaaggtttaactcatggaatgcttcctcctcagagttccattcacaattttcttcctcctgtcagcttccctcacacctggaagacttggtagaagtgaagcaaatgctaggagaatctcagagcttatattagcaggtttatgaccgaagatacaaaggttaaggggctgactgaagaaggaagactagctgcactactggggggcattgagcctctcggagagttatggaaagacattaaaagactagctgtgggatcaatggcttaatttctagattgagcagatggattcattaagctcgaagaagttgtacagcgcgtggatactatccagcaaaagaaaaataaaaaacacgccgcaacagcagggatgtccatccagaatccacaatatcccagcagtttgaattcaaataggaagaggtcaagcaacaataataggcatggtaacagaaagaaaggaaaattctctggcaatgccgaacaacatcccagagaacatgcctctaaattgactgctttcttagtcctaagagacgacatagaaataatctatgcaacaactcagtctatggtgttgtacaagaaaccatctcttatgaaaaaagacataagcagagagatacaaccaagtctaacatgcatattccacccttccgaccacagtacaattaatcgtagaacctacttcactatggatgaatatctaacatactcaaactctactaaataaagaattttaaaattttagtgattatacctttctctaataaaaatagctacaattatgcactcttcagtcaatacaaagaacctgatacatataagtatttaaaatatcaaattaaaagcttccattcataaactcatcaaattaaagtaaaagtagataaaaattcaatcattataactattatcaacttatatatcaatatgcataaactaaatatacacaaatatatagtacctataacacctaaacttcactaagtatattaacaacataattttagtaacctaccaagtctaataaagctaccaatcaacgtagtcgaaaaagattaccactaatgcctaaatataattaaaattaataatgtcaaaacacttaaataaaaaagtttaagtagcttaccaatgttaatatagcgttccaaattttttcaaacatcaagaccacaaataaacacctacagaaaattattaattaacaattaattataggtttgaatcaaactaattaaacttaaacttattgcataaaaaataattaatcatttaactaaacttttttttttaccttaataacaatttataattatgcataaaataaattcaaaaaattaattaatttttgttaacgcagattttcgttaaccaaatttgagcctcacgatgataattcaaaaaaaaaaaa

SEQ ID NO: 309651 - DNA, 1323 bp, Cannabis indica
gtggataattttgtattattaatgttattttgttattattgtattgtttaatgtgtttattaattattctttccatgttttaaattttcgagaatgtccaattacagttgttatgttgccgaaatttcgctaaatcgaattaggataaattttaataaaatgcataaaatttactaaaatacatatgtgtgtggtacttaatttaactaattaattactacacatatttaaacaaataatagaataaagttactttttttagaagtttcgaaatggatagaaattggatgagtgcgaataaattatcagcggagtatagtgaaggcgttgaaaatttcttggacttttgtaagaagtatgccaaaattcctaaattggttctttgtccttgtcttaaatgtggtaacatggagcgtatgaacactactagacaaatgagcattaatataggaacggaatagacaagagttataaggtttgggtttattacgagaaaaaaaatagagttctaggcgagggattgtctaagtctaacaaggttaacacataaaaatgataatttataattagtcataatttttttactttaagttacaaattttgttgtgactgaatgtaagattttttgtagtgtgttgtgatttcgagaaattataaaaattacatttatggtttaattcaataaaatacccaaaattcacaccaccgacaccgtgaacattcaactaaattatgaacgcatattaaaaaaaagttaatacataataataaattaatatatatatatatatcatacatgtacgtttacaaaattgtttaaaaaatttgagaaatgtaattttagaggaaacataaatatttttgtgagttgaatattttataagcatatttatatatatatatatatttatatatatattatataaaatttgagcattaaaaaaattgataaattattatgtaaaatattttttctcaacatattcatatatttatacatcttttaaataaattatttttaataaataaaatataaaaataactaagttatataacaaattatatatacaagttcaatattctaaatgtatttttctctaaaaaatatttttattaatttttttagttgataggatattatgagtcttgggtataaaaaatgattatatatatacactacttgaaaattgagttttagtgacactctatacatgttactgaaactttttagtgacacttcaacgcgtgtcattaatgaggctgactggaaatgcagtttttagtgacactccacacgtgtcactgaaacctattgcactcgtt

SEQ ID NO: 309652 - DNA, 1876 bp, Cannabis indica
tttgagtcacacgtggagagcattttgaggtttggacggaacatactgattgtctgaaaggtagtaagaagcttttgggcagaaccagagcgtgactgtccgagcatgttctcaccattcagcaatgtcaaatgtttcgagcaggataacacgattgaaacgtatattcaaggagatttttttttataagtacgtgtcctcatttatagttcaatcaaatccataatttagtgagattgacacgcatcagaagagagattgtaacgcccgtatttaaaaacttgctaaaacaaaattaatcttatcatattataattatatagccatatagttcgggagttcaaaacaaattgaaaattacctttacaatatatagttacataataaatttttttttaccaaaatatagggcaactcaaaatattataaaaccgaaaccctccaggttgcactgccgcgatatgtacaatccttgccaagctcaaattcactgctcctccaacatagcctttcccttacctacacatggtagcaaactgatgagtcaacagactcagtaagatatgcatgccatatataacagtaatgatgtaccgactttatgcttaagccgtcctgagctcattaattaagcccaccaaatagtgaagaacgttcttaatggaagtacgaccactataccatatgcactaaagcaccgactctgtgctcgtgttggtaggaccgaccactgtaccatatgcactagagaaccaacttcgtactcgtattggtagggccaattgtactcccatgagttaccgagtcttgtaccacatgcactagagtaccaattctgtactcgtgttggtaacatcgtaactattctaaaatcctacattgtactaacacccttaaactacatcattactagtgttagtagtccaaacaaataataacatacattcattcacatatatatgctttatgctatcttacctcgtttccgtgctcaggtgtgtcggtcagcctgagtggaattgcagctcgacgtttcacaggtccctaaatcacatcattataattttggtgagagacacgctaaaacacttctcggggactttaagatcaactaggaataaccctatcaataaaagacatgaccataccctaaaatcaacaatttgggggaaaactagggttcctggaaaaacccggaccgaaaaaccggttaaccggtttactgggtttcctgagggaaaaatcggtttaccagtttctcaagtcccacaaaaccagaaacccaaaaatcgaccccttaacacaaatcaacccaaaactcaaccatactctccagaatacctgtatatactataataaaccaatctccagcaaaagaaatcaataaacgactcaagaattaaaaacaccattaaagcttaaagcttaagctctctaactctaacttcacccacaaattaccaaaccaagtcaaattagtttagaataacctaaacaatcacaacctaaccttagaattcgaaatcaaaccaccccaaatcatatagcaacttaaatccccaaatcaacctcaaactccaatttaaactattaggcatttaaaagggttgaagacaagaatgcaataccttgaaccaaagctctcaattccttcaagaatccacaaaaataagcaaaggaacaatcaaaccctagtttccttctagcacaatcgagagagaaagagaattgaagaaagagaaatgtttctccccaactaaaccatatattctcttttctttatttcttaatttaattaaaataaaattctttttaaaaataaatacctatataaaacaacttaaattaacttaaaaaagtaataattaaaattaaa

SEQ ID NO: 309653 - DNA, 1829 bp, Cannabis indica
aaatccgtatgaataagttctagcggttgactggcacgactggtggaaatgggaaagggaagtctgtgatttttgccttgttgataggctgtgcaaaactttaatgttttaatcaaaccagtgtgaggtatttgaggaagtaatttggttaatgtggctaaagagggatgtccaagtttacaatgccatatattaatatcagtacatgacgaagtagcagtaaaggctgctgaattggaaatagaactactatctttattcatgaaagatggattacatgaaacaagagcactattattgtgagagtgttgtatgttatcagtacagggatagtgttcatcaaaaaaagatgttgtagtaagatgacattgtagtgctgagttggaaatctctgaatcattgctgagcatatacagaccagctttacgctttcctttaaggagaggtgccccggtttgcttgtccttaacaaaacaacaatgtttgtgaaattcaagaaatatgtcattatcatcaacaagcttagatacacttacgagattcttagttatggaaggtacttgtaacacagactttaattgaagagggcaagtgggattagtagaagggattgtagaatgaccaatatgagaaattaacaacttcttaccatcacccacggccaaagtttcagtaccattataagtgtgttggctgtcaaaattggtggcatcaaaagttacatgagccgtggctcccgtatcagcataccatgagttatcatcaccaaaatcttgaactaatgttgtggaatatgcctgtggttcatactcaaactccacttcagcaaggttggcccgtgcagcatagggattggtgcgaggaaccacccaatttttgtcaaagcgatagtgacacacgggggcagtatggcctgatctgaggcaaacttgacagatgattctttgagagttgtaacgtgggtagcctcgaccacggcctatggatgtagaagaagtgtcagatgggggattcttggcattagcatatggtcgaacaccacccgatcgaccattaccaaaggtgagattggcttgcatcttaactgcaagatctgttaacgattgatgatgcgcaagtctgctttcatgagtcaagagcagggcttgtacctcctcaattgttaattcatcacttcttgaagttatgcctgagacaacagaatcaaaatctggtccaagaccatttaatagttgtaaaactaaatcttgattactgaccggagagccagctacagaaagagcatcagaaatcgattaaattttatcaacatattcagagatcaagagacttcccttttggatgttgcagaattggcctttcaattggagaagtcgagccttagtttggctagcaaacttttgttccagggcatgccacactgcaaaggagctgtgataatttgctacagatgcaagaatcgactcggtcatcgacgatcttaaccaagaaagaagtagctgatcctttctgcgccacacagcatattcaggatttggatcattgttgacaagcagcttgggtggaggaacaccagtgaagagtatttcgtctaggtcatgaccgatcacgctagggacaacttgagatttccaagaaaggaaatttaggtgatcaagtttgagggtgagagaggaggcgagtgaattggagaatggattccaggattgagtggaaggagcagcgggagtggtggcagtagccattgttgtaggagcaggatccgttgtagacgacgccatggacgaatgatatcatgtaagagttcaagcatatgttgggttttatgc

SEQ ID NO: 309654 - DNA, 829 bp, Cannabis indica
ctagtaaaagtaatttttaccaacgcacaaaaatgttaaaagtctaacttttaatgtgctagaaaaaattatatttgctagtgcttttcatttagcgttggcaaaagttctaataccaatattgatttgccaacacagaaaataaatttcgttttgctagcacaataccaaatttttactagcggaaaaatatacggataaaagtgacatttttttagaagtattaagtatccaaacctaatgaaaactctaaaagaaagatatattggtttaatgtccacaataataaaggagagatcttaagttttaaaaccaatgtaaaactatatatcataatataaatatacgtatcgcattactgtaatttgataaagataaccaataaattattacatattttacatctcaaagaccacccttttagatttttgaaagaaacattggctttttctatgagtcaagggtcgttaccaatagatcaacaccgatagaaccaatattaggaaacaaaaatagaatttaaaagagaaaaagacttttagatgcaaaattgaggatcaatatttaccttgagaaagtcattaatatttgaaggttagattaaaaggcaaatgataaaaatttaacatattcatttcgattttgagtcaaatacttcatgcgaggttaatattgtttcttgtattcttggcaaactcttcaaaaaattcaaataagttattccatactcttggaagggtttccatagacatgttgacataaagaagtttgaccccataaaacatcatttgcaagaacaaaaatcttaaagaagaatagttttgagatt

SEQ ID NO: 309655 - DNA, 993 bp, Cannabis indica
aaaaaaaaaaataaaaattcatcatttgataaatgaaaaagataatccaaacataataaaaatatccaatttaataaaggaataaaatttgtagtatatccccaacaataattatgtgtacactattatcctggttatcccttatattcatagggcttgtttggtatgcctaattggattgtattggactattagttttttttacataacattgatccaactaccaaaactctattattacgttaaatcttggtagctaaatgtaatataaataccagattgaactattagttaggattggattagaatatattagtaccatgttatgttttgggtaggacaagactcaggtcggcttaacataagacaacttaggcaattgtctgacacctcacagagtttaaggactacattttacaggtaattgttgaattaaaccccatcataagcaaggacagttttatcatgaaccgctgcacacttaatcactcaagacacaactaaagtcacttcaaatagaactaaacaaatcctatgcgacataactaacttaaaagactaggctgctaattattctttctcaaccgacttgaacaaaagactttcaatggatttgatctcattgatcaaagtagagcaagaagttctctccaagttagtgagagaagctccaagattgttagagaaagagagagaaaagaaaaagagttagtcaagagttttttttttgcaagaaaagagagaaacctaatcaacttgtaatcaagagatcattgagagattatctctcaaagagtgtgataagaaatctccaccattattgaaactatccaagcttagatcatagtgaaaagagttgttcttcctaaggagagctcacaaggatgtagcccaaagtttaaagggaatattgccaaaattcttgtgtttgatctttatctttttgctttatttcatcatttaatttttgttttattgcattacatgtttatg

SEQ ID NO: 309656 - DNA, 1959 bp, Cannabis indica
tttaggtacaatacatataaaaagaggtatgtttcaaataaatataaaattagaggtaaatttaattaattaatgaataaaagaggcatttttcaacttacccctattcagttaccactttcaatctctaaaaacagaatatgtaaaagaaaaaaggggattatccaaaaaaagacacaaatatgtatatataaatatggttatacaaattttaaatatttttacaatttgatttcaaaaaaataatattttttataattttatttacataagattattttaatgttttactattattttgattgttgattttttattatttgtatgttaatttgatattaggttattattacttttctattattttcatgtatttttttgttatttcttgtgcctttatagaacaccgtaaaaaagatagctttgaaggtaaaagtgtaaaaaatttactaaaaataatgtaactttaccaaaaaaaaaaaaaaatacaattgaaaatgtaaaacaagtaaaaaagaaaaagaccataaaaattaaaacacaaatattgatcaaactcataggataaaaaagaaacgtacctcgcgtaatttttcttataaaaaattaatatagctcaatttatttatgaaattacaagtgaaatcatcatgcttaatcaacaatgccatatttgccacatttttgtagatacaaccaatagttatttttcttaatgttacacgatccatcatccctcgtatcattttttgacaaattttgtttctcaattgggcctaaataataataactagaatttagaattaatttttaagcccatacttttgggcccgttcatcgatccactctctcatatccttcaacacaagagtaacgttctcatccgtctccccttgtactcaacgagtggtacatcccatcgtagatcttcaaagtcttgtccacactggatgctttctcattacaacagctttgatgacgaaggacacgtcaccccgtcatcagtaccatgaacagtcaaaaaacggtgccgttactttagagaaattatcctgtatgtactggcacaccctagccaactccctcatagtccccaccctacggtggaccccgtgtaccttctcggattagatgctatgatcttaagcttctcagggtcttgatcgatttcccaaccattttctgtcaggcatagcggcccacgtgtcagccacaccgaagagaagaccgtagaggaataatctcaccttactgggcttcatatcctcaggcataacgaaaagtggtgccgaaaagatcagcccagtccacgcgtcgggatctgattggaagtacatgagcatggtggctgcgcctcccatggactcgccgaaaagaaaagccggaagttccttgtaaggctcgctacggcgaacatggaggaagaaagataaagaagtggcggcgactttctccatgtcaccaaggtagccacgtagaccttcggatcggccgtggccgaggagatcggcggtgaatacggcgtatccccaggtagcgtagttgatgcagatcttctggaagagccagccggcatcggagccgtagccgtgagtcatgtaaacagagcctttgagttttgagctggtggaatccaatggaaggaagctttgtgtgaagatcttgccgtttggtgtttcgaaatatgatttggtgtttcgcaccccttgggaggtatagtactcctcctctggcatgtcaccccagaaatttggtggcgcttgggacgccatggcttctcaattccgagattgagattcagaaagagagagagagagagagagagaataagaaagttgagtttaatgggtaaggatgagtttgatgacataaaagaagactgcatatgatgagtttgatggggtccattggagttggtgatatatgataatttaatttaatttttaattaatttttatt

SEQ ID NO: 309657 - DNA, 728 bp, Cannabis indica
tattggtcaaacctttggataccatttgggcaactctgggttcgtaagatagcaattcatatctctgccattgccttcatgctagtgtttcttattccagttacctttgttcaaggcatgactcaactagagcagttacaacaaacatttccatttcttaaaggaattttaaagaagaaacttgtaagtgggttgtttacaggttaccttccaagtgtgattttgatgttagctctgtatacagttccaccagttatgatgttattttcagcagtagaaggaactatatcaagaagtgggagaaagaagagtgcatgttgcaaaatattgtatttcacaatatggaatgtgttttttgtcaatgtctttaccgggtctgtaatccgccaattgagagtcttttctagtgtgaaggacatacctgcacagcttgctattgctgttccagctcaagcaggtttcttcttgacttatgttttgtcatctggttgggcaagcttggcatgtgaagtcatgcaactttatcctctcctttgcaacttgataaaaaaatttatactaagaatcgactcatcgtcagtctcaccaagtgatgctctctcctttccatatcataccgaaattccaagacttttgctatttggattcattggcttcacatgttctatcttggttcccttaattttacccttcttgctggtttattttataatggcattctttgtcta

SEQ ID NO: 309658 - DNA, 520 bp, Cannabis indica
tatttatctgcataaattagcttaccaacatgctcatcatcattgccatagatttctgccattaattaatctatggctgtaacaagaaatggctcatcatagactctactaactaccactgtgaccttaagcccaaaaatcttcttctcgacgaaggtcgcaaccttaaagccaccgactttggtctcagtgctttctccaaacacctgaaacaggacggtttgctccaaaccacgtgtggaacccctgcttgcgtggcacccaaagtcatcagaaaaaagggttgcgacggcgccaatgttgatctctggtcttgtggtgtcatcctctatgtcctcatcgctggattccttccattccacgacgataatcttgtcaccatgtgcagaaaaatctacagaggagattttaaatgcccgtcgtggttctcttcagaagctcgccgtttagtcaccaagcttcttgacccgaaccgaagtacccgaatcacgatagcgaagatcatggactcttcctggtt

SEQ ID NO: 309659 - DNA, 978 bp, Cannabis indica
tgacatgtgataacccaaattatatttattaaatatttaccatcatatcactctctattctccccaatcccagaaatagcactaagggcaaaagtgataattcagtcatgggtataaaataagctcagagctcatcgcttctcgtcatcatttgtttaagaataaggttttgctctcaagtggattagggtcaggtcgttctctgaagaatggccgcctgttcgccttgattgcatgcagagccgatgatttttctgtcgttatagcacatggcacatcaatgtcctctctctttcaaaaaaaaaaaaaagccaattgaaagaaaagtgaacttaattttgactgtgacgaacgtagatgtatccaaatgacaaggtatccaaaagaccaaaatgagatcttgctttacatttacatgtttctggttcagcgttttcatttttctcaaccactcgattgtaaacagagttttgatttctttcctagatatattttggttttttttaatttattttatatctaggggtccgaaccgtccaccaacatttttttaactatcgttgtaccttaagatctcttgttaaaaagtgttaaattaatttaaacttttgactaagttaacaaaaaaaattaacatattgaatataaattaaattaattaacttgttagaattagattagtactttttaactggagatcttgattctccttgcactagactacctcttggtttgagtaatgatatttgcaaacaaaatataaacaaaacacctcctgacttcactttaatattttgatagactcaaactcagaaatttaaagaaacatgctaaatgctggttgggtgcatatatcattacttagttaattaagatttttgtctcttgaaattttaacttgtactaaatcattttcgggtaaataccattttggaccctctgttttacaaaagttactaattggaccctgtgttttgt

SEQ ID NO: 309660 - DNA, 1608 bp, Cannabis indica
attttgacgtctaaaatcctaacaggagaccactgtcatcagttgataccaaaagatgacagtggtcacccaaggcttgtgagaagcatttgatagtgtttcttgcttattttagtcatatagatgctagaaaaatactttagccatattagttcttggccaatggtagaagagagcacttccatcttttggttggtttacattataatttatttaacccaacgtaaacatcgggtcacaaaaatttaagtgcaacccaaccaattaaaaaaaaatatttcaacccactcaataaaaattagtcgatttggtcgggttaactcgcccaaaccgagcactaatgtttatttttttcacatttaattgttatattttaattaattgtaataataagacaaatataaagattaaattcaaagttcaaatcaacccccataaaagaaatataatagtttgaaccttctatttttttcataaatatatataaattatataatatagagattatatataataaaaatatatatataaaaactcgtaatcgagttggtcgggttagttcagattgattgggcgttgatattatttttaacccgtccaatataaagattggatggttatatttttttcaagtttttcagtttgcatttttcgtcgagttatctcggtttggtttggacggattgttcgggttgggcagtttacaaaaatttatgtacaaccctagtgccactcatttgtgcacaaagatggcacatgtcggctaggtaattccttggtgagaattaatttcttttacttgtgttgtactttttggtgttgagggaacacattttgacaagtctcctttggtattttgagagtagagagcattggcatcctcttgtggcagtgctctccaaaaaagagagagtacttccatcttcatgtggcagtggtcggccatgcattgttgagtggtctccttgtgtagttttgactttatgttcaagttcaagcctttttatgcttaaataagtcaagtccttattagtttccttgtcgaattgaggtctttagggtgacgctcatgtgggctcataaatcctagtttgggcgcacacttgggtgtgtggaccccaacacgaaatggtcgttcaatattttcgagtctcctagaggtgtcatggagccctaaagtagaattttttaaattatttggccttggtaagtcttggtcaaagtcagaaaattgactttttttatttcttaaaattcgggtataacaataccattatcaaagaatactaagtttatcaaacattttcatgggaattatactaaactacaaaagggctattatagaaggcccaattctaaaatcttgagaatttttactaaaaaagtattgcatggaagatttgaggagtggtccttatgccatttagaataaataagatgtatcaagaagtgcccacacttgaaatatttggtatttttgcaaatttttgatatagaattgatgtttttcaaaattagttatttgtgcacagtgtacagactactcattattatgtggtattttagcaaattttgaatgtggcattacaagaaatgtcactttaccta

SEQ ID NO: 309661 - DNA, 957 bp, Cannabis indica
tcactgtaattgtaaatgactatatgttctggacttaacagattttgtacatatattaaactataaacatgaaaactacatgtaaacataaatgacttctaatcttttattgataacaaatcagattagattgtaatgggttttatttagggcataaaatcccaacaccacctcctcaggattagataaaaatgaattgtgatgttagagtgggcttagagagtatgtgcatagttgttgtagcaaggaatcatctgggtagggtgatttgggttcacaggtctcggttagacttctcggacgcgttatgcggagaagctgcggcctactgtttggttgttttgttggctttggatttagggtataagtatgttattgtggagagtgactcgagactagctatcaatgctctcaataggaaggagttacattgggctcttgataactatgtctacttttgtattaagtcatctccctattttattagttgtaatttttctaatgttagcaagacttgtaattttgttgcccataatttggctaagtggactttcacccaccaattgtacggctctattttgatctcctccttaccggaagagctattttgtaatgaccgaaagatctaacgacttctttatttaatgcatgaatacgcttatttatttatttttttttgaaaaagaaaaagaaatgtactattgcttttgaagtagcttatatatgtttttgaaattttcttctttatttatttatctatttttgaaaatgtatatggcctaaaatttcataaccaacacttcattgttgttgtgatttatttatttttccactatattttcatttatttattactgttattttttcatcatattatatttattttttaaaaagtatatattattgtattgctatttttttttatttttttttctactgtatgcaaaggctgccatg

SEQ ID NO: 309662 - DNA, 1279 bp, Cannabis indica
tgtgtcaagttatttatttttctgctaatattttatattctgcctgttttgttttgctgtagcagaattactttctgcttctgcaaacgcttacagttttatattttcttatatataactgacatttaacaaaaacacggtttttaaccagtgtaagaaccccaaacccatttttgcaaaatcgaaagaagcccacaaacacggtttggaaatcaaagagtaagcaaaccaaacaagtgtaagaaccctaaacccatttttcgtagaatcaaaggaaacccgaaaacacagattagaagttgaagataaagcaaaagaaaccaggtttcgttgatgaaatggtctttcgttgtcggaataaggatgatgctcctttagactaccgtaagtgtgattttattcttctagtagtttttagggttttgacaaatattgggtatgagtgttgggtttatagtagtttttaattctagtagtggagttaataatagttagttagtgaggttcgttgaattgtggtccatacacaggtcaagtgggtagatgaaatattaaagtattacacttttgggtcaaaatgtagtcaaaggctgttagggaatcttattcctttgtcttctgcaaaaggaacattttcacatgtttttttttttgtctgcatctaggatgtgggggctaaatgtttaggggattttgtcaaagaattgggtaaagttgtttggttttgcctagtatacatctaccattaactctgtttatattatctttgcaggattgaacttggataatttcacagtaaaattattccgtgggagtttctagtatacctgttgtggaaataagatgtatgagggtggtcgaattgtatattttgatcactatgagtttgaagggttcaacagactgcatttagaagaaatggctctgaaattgggataccgattcctatttggatttctttttaagcctaaagggaaacacctaatatgggataatttgtgtaaataaatgataagagttctatatttgtaataaaagaaattttctgatattttttaattgattatgtgataatgatacccatctttagcattgaaaaaattaattaaacaataataatttatcttcaaaaggattgttaaaaacaaaaaatactttcaaaattgaaaaaataatgataattgttgtgaaaattacttacgcaagtgtacacaatcgtcaacaagtaataaagtgataaatcgagtatcgtctccacagggattgaaaattagaaatt

SEQ ID NO: 309663 - DNA, 2038 bp, Cannabis indica
ttcaccatatgctgcattccagtgaggaatgtacatctgccccaaaccccctgttttctttgggcagcacaccttttcccaagctacagccctagctccgttcatcaagcttttccctgtccataagaagctcctacatattgcttcaagctccttaatgatttgcttaacgaggaacataatctgacaccaatagatgtgtatggagagaagacccgatttaatcagcactaatctccctgcaaaggacaggtgcctcgagctccaaatcctaattcttgttaccattttctgaaccagactgctacagttagaagccgatatcttcctagcacagatgggcactccaagatacttgaaaaggctcattttgctttgtaaaccctgacatgtcaagcacccttctaatttcattttcttccataccactacaatacactgcagatttggcattattaggtaccaaacccgaagtgatagagaaaagcttgagagcttgcatcattaagtagatacttttgaaatcccctctgcaaaacattaagacatcatccgcaaaacttaaatgattcaactccatatcagtacatctctcatggaaaccaaaatcttctttcttcccaaccttcctcatcaatctactaaaatactccatgcccacaacaaaaagcaatggggacattggatctccctgcctaagccctctcttagttgcaaagaaaccatgcatggatccattgaacataagagagaacataggcgttcgaacacaaatcataactagttcagtaaacttcctagggaactgtaaagcatccaacatttcctctagaaagtcccaatccaatgtgtgtcataggccttttgcaaatcaagtttaatcaaacatttaggcttagctccttttcttccatagttcctaattaggtcttgacagatcatgatgttatgtgctatatatctacccttaatgaaccctccttgatttagagaaactaaatccagaaggatgttcttgagcctagaacatattagttttgtagcgattttatacagcacattacaacatgatataggtctaaattcactcaccaaattagggcttttgatctttgggatgagcgtgatcactgtagagtttatctccttcagaagctttcctgaatgcagaaacgatctaatggcttcacacacctccttcccaatcacttcccaattgtcttggaagaagaaactcccaaacccatctggtcccggacttttgtttccagggatgctaaaaacagcttgcttgatgtcttcattggaatactcagctaatatggcttcagcttgagctctagaaacagtaggcccctctgctataacagacatttgcactttcctcctgttttgcattttggtcctgagaagctgcttgtagtattgcagaaacgcctcagtgacttcttccaaattatccactctatccccacttgcattcacaacagatgtgattttttttactctcctttctcttaggctagagtgatagaatttcgtattctcatccccttccttaatccaattcactttggatttttgctgaaggaaagaaatatatgctttatatgaactgcctggtattcctcacgagcttccatttccttttgctgagcaccccgatcccttgggttcctctgaatctcttcttgacattcttccaagtgagccttggactgcaattcttgattatgtatatccgagaagccttgatggtttaaatgtttcaacatacccttcaaagccttcattttggacaccaccttgaacatacttgacccctgaacatcaatctttcaagtatcttccatcttttgctgaaagagggatgacttgaccgcatccgaaaatatttaaagggtttcctaccatttagaatagtaggtaacatagtcaatatcgtcggagtgtgatcaaataacccttcattgaggaacaaagcttcagcattctcatatgtatccaaccacctctgattagccattattcggtctat

SEQ ID NO: 309664 - DNA, 3128 bp, Cannabis indica
agggcacaaaacccaacatggatcatattgagaaacctttcggcttgttcatgaaggcagccctaagaagacgacatcattccatagggacgcagtggctgagaactggagcggtgtcgaagtcggataactcaggcggtcctggtagttcctccgctagtggtgacaagggaaggcatgaatctggacatgttggtcaaactcaagttaatgctacaatctctctgctgattggagcaattaatcccacgaatcctgggattgatttggtgagtaattcggtcaaaataaaattaaaccaaggagatatggtgcatggaaaatcaatagttcttgatgacaataatttgccacctgtcaaaaatacacaaagtcaaagcatgttggttttggacaataaaagaaggaggcccaattctgaattggaatgtaatgggcctgatgacaattttgaagaacatatggattgtactggagtggatggttcaaaaaacttgtctagggcaggttttgtttcacaggcccgccattcatcatgaatgtgttaagttggaattgtcgtgggcttggaaactgatggactgttcaattccttaaagagattgtatctcaaaagaaacccaattttttttatgtgaaacaaagtgtaacaaagctagaattgagtggcttaagaattatttgggctttgaaagagcttttagtgtggaggcccaggggagtggtggtgggttggctttactttggaagtttaatgagtttggtaagcttttgggcttttctaaccattacattgattttttggttgaatccgaagcaaacaacaactggaggctaaccggattttatggagagcctaaccgttctcttcgtcggagttcctaggacttattgcattggttagcaaacaacaacacaactccttggtgtgttattggtgatatcaataacattatcagtcatgaaaaaaaaataggtgggcagagatacccgaattggctcatgaatggcttcaattcggcattggaggattgcggtctggttaatcttgagctcgttgggtacccgtttacatgggagaagagtcgggggactagggaatgagtggaggttaggcttgatcgtgccttggctaatgattcttggaacatgaaattcccctcagctaagctttcaaacctggaaacgtcgacgtcagatcactccccctatttctcgaaccaaaaattgttcaggaagttgttggtcagccccggttaggttcgaaaatgcctagctcaaggaacctatctgttatgagattgttcgggataattgggacaatggttgttcaactggtttggttggaaaaatcaattcatgtgttgtgcatttatctaattggggaaaggaactcacaagtaatttcaaggcggaatccgtagttgcaaggttgtacttcgttctttgaaaaataagagagatcccttctctctgcagcagtacggggaggctaaaaagaagttgtttgaggttcttgatcaatgtgaagctttttggaagcagcgttcaaagcaattttagttgaaaaatggtgatcaaaacagccgatattttcatgttgcggcatcaaacaggaaacataacaagaacattcaacatctaaaaaatgattaagggcagttggtggactgggagaatggcttatcaggtataatccttgattattattcgtctctttttactgcatctaacgtggagtttaatgaagttgttagtgaagttcctactttggtttcaatggagacaaatcatgaattattaaaaccagtttctgaggatgagatcaaggtggcggtgtttcaaatgcatccagataaaagtccaaggcccgatggcatgacacctgccttctttcaaaagtgttggcctattgtaaagaaggatgcggttgatttggtgtgcaatttctttagaacaggcaacttggaggatacttgtgggaatgctcacatcgttctcatcccaaaaaagaagaaccctgacttgatcacagacctgcggtctattgctttatgcaatgtaatttacaaaatcataactaaggttaggaccaatcgcatgaagccgcttatggactctatcatttctgaagcacaaagtgtgtttgttcctggccgccttatgacggacaacataatggtttccatcgaagtgttgcattacttgaagcgtaaaaggaaaggaaaagaaggctttatggcactcaaatggacatgagtaaggcatatgaccgcattgagtggcgttttcttgaagccatgctttttaagcttggttttgattcggtttggatacgtttggtccttaaatgtgtttcctctgctaagtacatggtggtacatgggagtagagaggttggtcctattcttcctacaaggggtatccgacagggcgatccattgtccccttttttttcctttacgcggaaggactttcagctattattcgtaagtacgagttgaggggtttgattcatggatgcaaggttgctaacggagctcctagggtgtcccatgtgttatctgcggatgatagctacctctattgcaaaggctattgaaagggaatccatgagtattcaggaactccttcacaagtttgaaatggcatcgggtcagaaggtaaatttcaacaagtcatctatttttttcagctccaacactgacatgggctctcgaacacttatctatcaattgcttaatatgaaacctgcagatgagggtagtttttacttggggctgccaagcacaatagggaggaacaaatctgctttactttgctttttgaaagataaagtgcgaaaaagacttcagagttgggaagggaaattactctgaagagcgggtaaggaaatttttattaaatcggtggctcaatctcttcctagctatgctatgagtgtgttcctacttccgcttgagatctctcgtgacattgagcaactgatgacaagtttcaagtggcaatcctctaacaaaacaagtaaaggcattcattggatgccttgggatggattaagccggtccaagaggagtgtgttgggttttatgccctaaataaaactctttacaatctgattagttatc

SEQ ID NO: 309665 - DNA, 545 bp, Cannabis indica
catagtatttttgtatttttttttccttttttgtatttttctgtttttttcccaaaattctttattaaattccatgtaaaacaaaaatagatttatttcaattttattgtaaatttaataaatattttaattaatcgtgtcgattcgaggcacctcgtgtgaagagtgcattacaacataataatcacactattttcttctatggatatactttctaaaactaccacataaaaatataagtttggaaattatcattttatgcttttggatcataaattgtgtttgattatgcctttgtatttttcaaattatttatttattgagatatatatgcatatgtaatgttgttataaataataataaaaaaaggatcgattttagagccaatttgtttttcatcttattttatttacattcttcaatataagtgtacaatttaaatttaaaaaacaaaataaaaaaaaaataagagaaattatctcgtatactattttttaacgagaaaattacactctatatcctttttatattgtccacttttattt

SEQ ID NO: 309666 - DNA, 1007 bp, Cannabis indica
acattttttgtaattattttgtttttgttgtacatttatgaaaaaagcccatagattaaacccaaaagaaatcaagattcacagtagaaaattcctccctttcgaagttctgcctgccaacttgacaaattcaagcgaacttagctaaaccatcgacaaaagtaagacaatctcttttagcaaaaacaacacaacaacaagtaaaagtagataacaactgtaaaataaaagaaaaaattgcagtcaacttccaatccggagctttcttcacacgaatagcctccaccagggatttagaatcaaaaatgatcgacaaattatcccactgattcatagacgcccactttagaccaagcaaaaccgcctgcatttaagcttccatagcagaaccacaaaagctagaggaagagcacctccaccaatccagagaacctttggacagagtaagcagagcgcacccataactcctttcctgaaaagaagtttccaccaaaatacatctgtccgtagagagactagggggaatggtagacagggcctggaaaggactcatctgcaaaacactatcagcatccgcacacacttcatggtatctgctaaaaatttccttcctaacagaatccacacaaggccttgtactagtggaatgaataatcctatttctggttttccatatacaatcaaagatcacaccggcacaacaaagcatattgactctcaagatagaatctagagaagaataaagagtacataagagcttacctatgttatcgccaagaatcgactcgaccctaactggcaatggaccggtaaaccagaccgcagaggcaaaactacaccttgcaaacagatggatgggagtttctgaggcagcatgacacacagggcaaacgttctcccacgaagaaaagaacttgtcacccgtgggaagagtcttggtgcaatctctccaaatcatgctcaaccacagatgaacttttgaatcccaaatccatctccaaagcaca

SEQ ID NO: 309667 - DNA, 528 bp, Cannabis indica
aactttaaacattgcttaaaacgggaaatacaactagattttaactttgtttccataagaaacaaaaggtggggagtttgctcacggacaagcaaacacaagcgacggaacgcactcagactcccttggccccgtgcattttaactaacgacattcatgatgaagagtgggattgctgagcaatcaccgctaaaacatcctctgaaccagcagaatcatcaatgaagtctgaaacttgcgggttggcagtcacttctactgaggaaggagaaggactatgagcattggaggcgcgacatcttttaagagtttaccttagagagagactgtcgaattgtctcttgaaaattctgtttggatgactattctcctggtcttcgaactcttccatatcatcagggtgtaagataggttggtgcgaagctatagtggctgcaattgctttcccagccttctttgaggataagtccatattaatagtctggcataatggtttttgagggatattagtgttggaaatattttacc

SEQ ID NO: 309668 - DNA, 1417 bp, Cannabis indica
tgagggtcagtagacgcaaagtgtctatgctttccactaactctgagcgggtcgaccgaagaatggtttaagaaactagagccaggatcggtggactgttagaataagtttcaagtaagtttccagcagtaatttgttgcggcaagaaagatcaacctcggggtcagtgtcctaaccagcataaaacaactgcccacggaaaccctaaagaacttcataaagagattcaaggaggaggcctcgaaaaccaagaaggtggaccacatacaacagctggcccttcttcaggctgggattcgtacgggaacccctttttggaagaagcccaaatagtggcttacagagggtattacccaaccggagtatcaagatatgcatcaggagcacagcctacaagagctccacctcctgccactccccaaacaagcggaatgcagttctccactactccagggtacaaccaaagcctcactttaactcctgcattgtcgcattttggtgcgcccatgagcaacccctctggggtgagtgtccaaatttcgtcccagtccgcaccaaccaccagtatgtaggagctccgcaaagctcccggagtaagagatcctttaaaggtagcatgcgcactgataacaaaaaatagcgaaggggtaatactccataatacactcagtacactgagcttacagattctcaggaacgtgtgtactttgccacccagaaaaatacgcattaccgaaagccttcgcccttgtataggaatagctcccaagagaccccaacaaaagatgcgactatcacaacgacattggtacaccacaaacaagtgtaaaaacttgaaggacgaaattgaaaatctaatttgattgggtcatttgtatcagtggatcaaaaacaggctaccacatttaaacccagcccaagggggaggccccttacctaagggaagggtcgagggtacgctcgagggacaagtacctccgtgaggggtacctcctcagcagacgcccgaattaccaccccagccaaatgggagagtcgccatgatctctgatgagcctcatatcagaggaaccaccaggaacgagttaaagcgctacgttggagccctaagcatgatgaagtatgggaggtcactcaactcccagcgcagaggcccaggcttatggatcaacccattactttcacagaagaagacgcgaagccagtgcgcttcccccaccatgatcccctagtcatagaaactcttatcgccaataaggttttggctaggatattggtagataatggaagctccgtgaatctattgtttaaagaatctttcacaaacatcgggctcacggatagggaccttttgcccagcggttcacatcttacggggttcaacgtgacaactctcatcccgatgggaaaagtaagg

SEQ ID NO: 309669 - DNA, 2103 bp, Cannabis indica
ataaaaattaaaacataaaaagattttaaccaccaataacttcacaccactgttaaatttccatttgcattaattaacatctttctcgtttttattttccaaacaactctctctccaattgaatatctctcacacactcaaaatctatctattatttatatacttatataaatgtaaatactaaggtgatgacgtggacgtatatttccttttacgttatctttttggaatattaaccgtaaaactacttaaattttgtggtttgtatcacctatctctataaactaattttttgacaaaaaaaacttactgaaaccttcattatgttttactatatttacacttctctatattggaagactgcttagaaatgtcaattagtattactaatgtatacacaaatgtacacatggcatacaaggccggctctaagtaataataggcctaagaaattttttgtgtattatatctaaagtaaagtaagtattattggccctcttttcacaaaattttataaaaatatcattttttttcaatgcaaaaaagtaaactatataaaaaatttgggccttgagtttgggtggaccttaggcatagccctaacccgccttaacccagggtcaggcctgatggcatgtttttattgatccgtaatgttactgttgaaaaaataaattacagaggcacttagcgtcatcactacttactcttgcaacttgtatcatccggttgtatttggataggtgggttctagggtctttccggccatcatacaactctatctgtggcattttgaagttttagggtagtggaacttcgatgatctgtctaacgcacggctctgtatcttcgtcttccgagtctaaaagggccccaccttgtttttggaaccaacttggtaagagcagcaatctgttcttccagtcttttggtttcactgtccggaagatcgcatccgcgaaccttatcgttcaaatgattcctcgggtcgttccctcgtggtctcaccttttttcttttggctttttcatatttggcatgaaaatgcctctggaggtctacagtagaccaactgtcttcggggaaaatttcctccaccccatcgtcctggttaatggaatcactagggcggttttccttcccttaggctagtactttcatataggccttttgtgtggcgcaaccttgccttgtggagcataagggcatccaagcccggaggcgttggtggctttctacgtctgtaagagctggttggttgtgttcacttttttctaggaggcaacatgtaacgtctccatttcaagctttcattgggcctttccctatagatttatagctcttatacacgagtacattactctgttgctatttggactgacgactggccctgtaaaccaacaagagtatttctatagcgtgcttttgtcctcactcgtacgttttttggaaacttcttaggaggtcacacattctaaaaactcatcctgaaattagcctaggtcaagcaagatccaatctaattagaatccaatttttaatattcaatttattctaattgtaattaaatatctaattttttttgtaatttaattagattagatcgatttaatttaattgaattgaactagatattgcccgttccaattctaaatacaaataaattcatgattgttacttgaaatttgctagtgggttgagataagatgggtccgagtgtagatgatgacagatgtgacatgtcattgatagaaagaaaaacatgagtaatattttcatgtgctttggacataaagatataaataaatgagactggaaatttgggtccacatgattttattctaaatccttaaaatatcttctggagaatgtatatgtgtgattgtgtggtaattattggattgggagatagacacaacgtacttaaattttaaaataaatagaatttattcacataaattattattagtcatatgtctctcaaacttttcttatttggcagtttgtttgttaatgcttacttacatcaacatagtgtgccaagtcatattatcatcaaaatattaataaattcaaatagctttgtttaaaaatatcaagcag

SEQ ID NO: 309670 - DNA, 899 bp, Cannabis indica
atgactctcgcatgcacgtttgtacaagaaaggtcactgggggtacgatacgtctccaaccctccttcctggattggaaggactgcttaaagtctatcttactcctcgtgatgctttccctttagtcttttcaaagcagactctaggcttgaactttttgacgactttggttttccttcctagaagacgaagcctgcctcacaaaagtttaaaataactctacggatccagcgatacttcaccttttggtgtctacaagcaaatttaatgccccagctcatgcacgcattccacctttcttagtgaaagccaaaagcttgccgccacaagactcgacatgatttttgttgtaacaaacctctgtgcaaggacgattgcctaagggcggaggcttagctttccccccaggaaactaacggcacccaggctataaatagcctaaaatttcccctacggggtttgcaccatgaaaagggtcgttggaacatccaatcgagttctcgcccaaaactcttgatttcacttcttgggagccgaaaggtaagtgtgtgcttctcaaaagatctccccagaaggaagatacaaggcaaggatatgtcagacactcctcttcaaaagttggaaacagacacaagtcagactcaaagcaaatgaccgagaattcgagccccaaaattctcagctcatttgggaggtatgatatatctgattggcgacagttacaacatcctacttctgtctgcccaaatcattcaacctaacatacaacaaaaatgagaaacatatagagagcgtatctataaaggatcattgattattgggattatggataaaatacattgaaagggtgtaacagtcattttatccctatgtaatgtagatcatctatagaggatcat

SEQ ID NO: 309671 - DNA, 1742 bp, Cannabis indica
tgtggtttacaaaagaggtgcaaataatgcaggtacttgaccaataatgctcattattcccttcacatttctgaaatttaagagtcgtaggttgcttaggctattttgtattttattagacaatacgtaaatggtgctatttttttttttcttgaaagaaagataaacttcaataatataaatttgtttttaaggaagaattaaaaaaaaaatgtaaagaatcatccatccaaatacaatctcctaaattaataataatatatagtaatagtaaaataatataagagccttggataattaaaatttttttagtattataataaaaaaataattataatatataataataataaaatatctaaactaattttatattatttattattattatttcatccgtcgttattgttgtcaccactactttcttttccaaatctcaatcttattcttagattccattctaaatttcaaatattttcttaacacatttgagccttaactcatttcttaaatacttctcctagaattggacacttaattaaccaaataaaaataattaatatctataccttacgcatataataacacttgtgtcatcatatttttcattttcttaagaaaacaaaaaaaaaaacattacaaataaatacattacacataatatacctctgtttaatcattagaaataataatataacagggttattatttaacatccatggatttggtttagttagtttatataacatatatggttttagtctacttaattattattataattattattaccaaaactgtttaatttcaaaataattttctaaatattatggttttagtactttagttagttagctaatttatttttattattgttgtaagagtagagaaaaagaaaagagaagaagaaaagagaaagattgagagaaaaaactcaattgaagaagtgaactgcaattgtattatatagtgtttgtaacaaattcacaattacattacacaatgagagagagaatacagaaagtaataacaaacaatataatcgaaaatagcagaattctttgaccactaattaacactaacacctcctctcaagttacatttggttctttcagagttaagttgtctcgaaatttatcaaattgaaggtgtggaagtgttttagtaagaatgtctgttgttcgatgatttgctaagacatgtctgatgtcaagagagtgagcaagcactctatccctaacaaagggaagatccacctcaatatgcttcgtccttcgatgaaaaatagggttagatgcaagtgatgtagctctaagattgtcacaccaaagtatgggacatgaggaaagttgaatgccaagctcactaaataacgattgaatccatataagttcagtggtggcaagggcaatggcacattattctgattctgtacttgaacgagcaacaacaatttgttttctagagctccacatgatcagattgttgttggattatattttaccagtatctagatttactaccatgtaagttatttaaaatcctaaatatgaatgtctaaaacaatgtaatttaaacacacataaagtttgagaaaccttacagtagttgcagcagaattaaatgactccttccgctgagatctctaacccttgtatcctttctgtagcagagtatcaccaagatatgaacccgaaactccttccttgtgtttggattcttcacagtcttacatactatga

SEQ ID NO: 309672 - DNA, 1131 bp, Cannabis indica
tccattagtttatctttgcctttgatgttcagatccctattcccagtatacaacaaagagttaggagtaggaacctggttaatggtggaattccgattgttaattctaggcaatcgttcaggcatctttcctcgactattaccaaaattcaagatcaaatggtccaacgaattcaccttcattctttcctccgcttccaaactgtcgattgcttggttcgagttcttgttctgttccaaactgcttccatagtcattccggttagagttcctttctttacccctggaagggttctcttcgaattttaaccacgccccatatgcagcagttttctttccatcccctaagtctatttgttcaggattcttcgcacacgaccggtgatcatgacccacacgcccacagttaaaacacatatacggtagtctttcatacctgaacggaagccaaatacgattcccagaacaggggaagagatatcctgggcaaatgggtttttcaattgaaatccataccttgaaccagaagtattcattgtacgcaatcttcattacatcttctttctgaatgtctataacctcccctgccataccagctaatctcatcatgttgttcttggaaatggacttcgtaggaagattaaggactctccccgaaaggggaaaacgagtcatctcttcttcccaatttgttggaatcttggagaatctctgtaagagtaaaatcccattattcagtagccaaggggatttgtctataattcgatttaggtcattctctttcttgaatgagaacaccatgaaagtggcctctgttgtgactcttttaatctttactccccaatcacttcctcaagtctccaaacccgtcccagaatggttcgaatgagggaccgattgacattcttgttggagcaaaatctccccatcagacaagatttgcccacctccatctctctgttttcacaaacttcccagccatcctcatccaccaccttcaacttactcgtgagatcaaggagatcctccattattagatcaggcttattaggcattcctgtaggaaaggctcttctcaatcgagagagcaaaaaaaatcatgtatatgtattatcaatcttatttttaaatt

SEQ ID NO: 309673 - DNA, 1817 bp, Cannabis indica
ggggtgttcctgggtgtggatggtacttcatcaagagtagggttaggtgtgttggtgacaggcacactttgagaagatgaagtgtcatcagaggttggaactggtgagatttcctcggtgggagtatgtgactgtcctatagaaggatgtaaagaatgtgagaataattcatttattgatgtggatgacatagtttctcaaagtggaaaaacatcttcgtgaaagtaaacatctccggattgaatgatttcttgagtttcaatacttaaaagattataagcttccataccaggagataacctatgaagatataagggcgagatcttggcaggaacttatgtcgtttggtttccaatgttgaagcaaaaacaagacaactaaaaacattgaggtgatcataattgggagctttattataaaggatctcaaaagaagtctttttgtcaagtaatttagatggagtacgatttataaggtaaacagcagtattaataacatgacttcaataaggtaaagataaatgagattgaaataataaggctctaccaatatttaatatgtgttgatggttttgctcaatgacggaattttgttgaggacggccaacacataattgttggttgaaattccctttgtggcatagaaggctgttaaatttagctctttagcattgtcacagcaaacaactttgatgttgactgaaaatttagtggcaataagagaaaataattgaggaataataaatgaaacatcggatttggaagtgagcatgtacacccaagtatagcaataaaatgttgggattttataccctaaataaaatccatgtcaatataatcttatttgttatcaataaaagattagaagtcatttatgtttacatgtatttttcatgcttaaggtttgaaatacaatttctgttaaatccagaacatatagttaataacagttatagtgatatcaacacagtggaaggtaattgtgcttatcgcttcaaaagtttatgtcccatgattcatcagtgtactggatttacactgatgtgacagtcagcgataaatattacttacaccttggataagtgttttgtgcttttcaaagcattggtaaagtatgctagtatcgaaagtatagagtatacattagactggatcgatatggaacttggtaaagatattataaacttaccgttgtatctttctaagtaaatatcattggttgatcttagatcaaaagaccttaatcttgatatggttaatttcgatcttaagagtgttatttatgttcttagagttgttcattaaacttacaaattagttcgggcaatacaaacatcttaagaacatgatagtataattgagtggcagcactaatcatagatgcagaatctatagcttctatctagacatagaagtgaaactatgatttccttcgagcttggcttaatagagataaatggaagagctcttatttcaataattatattagtttattgaaatatcatttataaaaagctaattattttaaggataaaatacattgaggggtaaaacggtaaatttgtccgtactcgatgtaaatcatctatagaggatctttgattatttgaattagaacgatggataattcatagcgtatctatatcttagaacatatagagtgttctatataattaagagtgcaattccaaatctatagtggcgcaaggaggaattaattagagaagttacttggtaaattcaagatctacttattgcaagcttgattatataggcccacgatccccacactatttgagataatactgcttgtagact

SEQ ID NO: 309674 - DNA, 1623 bp, Cannabis indica
tgggacatcagggcttttgctgtgtagtagttaggcgacaaaactattttatatgaatagcaaacttttgtaaatgtattttgtaaacgggatcccaagattttataaatatactactttatgtttctaattaaataagcaaattaatctcgttaattagcaacgagctgcacagtacgttaaaaagcacgctaacatgcctaattagttagggtgttacacgctgggaagtcattaatggtcaataaaatagtagcatgcattataaacacagtcccatagtaagcatctcgagcttggacacttaactcccacaactctttcaattcattaatcaatggtctcatgaaaacatccatgtcttttctaggtgtagtgcaccctggaatcaatagagacaacatcaacgactctgctttcatgcatttccaagggagtaagttataagagactaaaataacaatccacatactttaagagttactcatgttaccaaatagattgtacccatcagtggccaaacccaacctcacatttctaggttcaagtgcgaaggatgggtggcgcctctcaaattgcttccactcctctgcattcacatggtgtctaagcacaccatcttcatttggtctctcttagagtgatgccataacatatcctcgattgagtgtcttgaactatatgacatcttcagtctcggagttaggaaaaagtactgcaaaattaactttacgagcaactttttttccatcttcttttttctttttccaacgactctcgccacaaataagacaaaaatactttttcgcattctccttccaaaacaacacaaagtgatacttgcatacatcaatggagtcagaacctaaactaaggttatacaacttcatctataactcgtaatgggacttgagtaattttgtaccctccaaaaataactcaatcaatatggagagtaacatatcaaataaatagttactcaacttattgagaattttgtagtgcatcaacttcagcaaagcattgagtgtttattttttgcaaactgggtacaattcactttccatatccctgaataaatcgtcatacttaccactaccatttagtgggggctcgttgaataaatttgtagtagtacttgtatcgttaaaaccacgattttctcttaaaatatcagtcatcacatctccaattcttcttcatcgttgtctactatttctacagtcgatcgcatgaacgacacccatcaaagtaccaggtcgtgtacgatcgttggatgccatgcataaacaaatgtacccaaattttatctagagtctcgaagttcactttcaaacatctcatgcaagggaatcgagtaagtccagcagaatttatttgcatttgagcaactccaataaactcatccacacccctgcgaaactctacagactgtctgtttaaagttatccaacttttgtcgctcaccatatttctacataatataaaaagagaaagttcaaaacaaacttcaaaatgtgcacgtgtcctaatctactttcccactccattactaaaaggataaagaacttatcccattcatatttgtaatgtacatatagtacaatctatgctcttaagatt

SEQ ID NO: 309675 - DNA, 1186 bp, Cannabis indica
tatggagggattatcttcgagttcgtgtcactttagatgttacgaagcctttaaagagacgaatgaagcttcgtaattctaacgggatagagttctggactaatttcaagtatgaacatctttccactttctgttttatttgtggaataatggggcattcagatagattttgcccacgtcagtttgaagttggagaaggtcagttaattaagtcgtacagggaatggataagggtgaagccgcaacgtaaaaaccacatcattgaggcaaattggttgaagcaatttatggtttccatggatgatggtccacgtgtgaatgttgctccaccagtttctggatatcggtcgatggagatgtcgacgatgagtggtgtgagcccaggtgctttggcgacatcgggacaatctggtagagagatattgagatccaaggaagttaatgggattcctatttttgtggagcaaataaggctaacagataaaaatcaggattcattaaataataatatcaatgaggaggcttgtttattggtggttaattcaaaaagaagaaggactgatttggaaggtgatgatgggccacacggcatcgatgatgtggcagtgggtcaagatgttagtgagtcaaaaaacttgaatctggtgggtgcttgtatccaggcccaccgttcattataaaaattttatcttggaattgccatgggcttgggaacttatggactttacaattccttactgatcttgtgatccaaaagagacccagtattgtgtttctctgcgagactctttctagttgttcgcagatggagagagtgtgggttatgttgggctttgagggaatgatggctgtggatgtggatggtagaagtggtggtattgttttgttatggaaagctgaagaagaagtatatttgcttggtttttcgaatgcctatattgatgtgcgagttactattgaagggatgaatgagtggcggtttattggtatgtatggcgaactaaatagaagtcgtcggtttttcactttggaatctcttgcgtactctggctgctaactctactttgtcatggtgtgtgatgggtgatctagataatgttctctcacatgatgataacaaagggggtaatagatatcctgaatttttaattcaaggtttttaacaagctttggcggatagtggtct

SEQ ID NO: 309676 - DNA, 750 bp, Cannabis indica
aaaaaaatacaatggtgcgctattagtgtgtctataatttttagagtatgaaaaagtgagatttttgaagtctatagtgacgctctgtgagggagactaaaatgttttaatgacctatattggagggtcactaaatatttttagagtctctgaaaatgggtcagtgaagcacaattttgtagcagtgcgcgccttaacaataatcctaatatgttatgtttcttgagaaaatgttgcttatatatatttatatatttagaagtttttgtagtacaccctctaaatagtcattttggtagacctcctattcaacatagctttttaggccattttttttttcatgattgctttttaggacaatttttttttcatgattgcatacattgtagctatttaagactacttataaatttttagaaaatttcgaataatttatagtgctgataatgatgtttaaatagttacttactacacatataagaagaacaatcatatgtgcaataaaatatataaatcttttctctagcattttaaactattcaaaaatttctaaaaatttataggtagtccaaaataactataacgtacacaatcataaaaaaaataaaactaaaatattttttaatttgtatgctaaaacaaataggagatctaccaaaatacccttttaaggggtgcactgtaggcttaccctatatttttgagcacactctaaggactcgttgttggatttttgtgccctaaataaaa

SEQ ID NO: 309677 - DNA, 3443 bp, Cannabis indica
tcataagggaattgacagtagcagatcaaggacgggtgggaagaaataaccttaggattttcttcatgtggaagccaaggctcaccagtgatctgaattcgggtaccatctcccacacaccatcgaattccatgtttcaaaagcgactgagattccaagatacttctccatacaaaactcgggtttgaacccaattgagcattaaggaaattaccattagggaagtaccttgctttgaacaaacgagaggctaaagactgaggacgagtaagcatacgccacccttgtttgccaagaagagataaattaaagtctcgcagattacgaaaacccatgcctcctcctcttttatgtaaacaaagtttgtcccaagccatccagtgaatgcctttgttttcatcttgtgaagatttccaccaaaacttacacattgctctttcaatatcattgctaatctcaagaggaagtaaaaagacattcatagcgtaactagggagcgcttgaacgactgattttataagaacttcttttcctcctttagacaaaaattttccttcccaactctgcaatctttttttcaccttatctcgtaagaaccccagcactgaagtcttgtttctactcattgtactaggtaatcccagataaaaactgccttcatcagccacggccatatggagatagttgcaaatctgcatttgggtaggatgatccgtgttgagactgaagaaaatagaggattttgcaaagttgacttgctgacctgaagcactctcgaacttgtgaagcaattcttggatacgttgagcttcctgaagagttgctttacaataaagatagctgtcgtctgcaaagagcatatgagatattcttggtgccccattagcaactttacaaccatgtatccacccatttctttcatacttataaagaagggaagataaaccttctgcacagataatgaacaagtaaggagacaggggatccccttgccttatacctctagaagggcatatcgggccaacctcataagcatcatggattactttatacctggctgtcgaaacacaagtcatgattagacgtatccaattttccacaaagcccatctttctcaacattgcttcgaggaaaggccattcaatcctatcatacgccttactcatgtcgagtttaagtgccatgaaacccgtcttccctttcctctttctcttcaggtagtggagaacttcaaaagacaccaacacattatccgatattaaacgacccggcacaaaggcgctttgagaatcagctattatctcactcataaacggcttcatccggttggtcatgactttggtgatcactttgtatagaacattgcacagagctatcggacgaaggtctttcatatgttgcgggtttttctttttcggaattaagacaatattagcttccccacatccatcttcaaggacaccatgctcaaaaaagtgttgcaccgttcgagtaacatccctcttgactatttgccaacatttttgatagaaggcaggggtcattccatcagggcctggacttttgtctggatgcatttgaaaaattgccttccttacctcctcctccgaaacaggctttgataactcttcattcgcttgagtcgaaaccatggccgaaacactatctattacctcctggcaacgtgtattagcagtggcaaaaagagatgtataataagcattaatcatgttagctagcccattattccaatcaacccaggtaccatgatcatccttaagttgtaaaatagtattatgttgtttacggctactagctgttttatgaaaatacttactatttttgtccccaccttttaaccaaaactgctttgctctttgtttccagaaagtctctcgctgctcaaggacttcaaacaaccggtttctagcttcatcatattgcttgaccgactcagcatccatcttaggctttaaaatagacatggttgttttgcaatgtttgattcgagccttgaaatctccagttacttctttcccccatcgagctagaacctcagcacacttgctaatcttacccgagatgctctcatgagattgagtatcccaacaatcttgaacaagttgataacacatgggctcagaaagccaagcattctcaaaacgaaaacgtcgcggggtacgaaaagagactcttacagtcggctctagaaaaattgggcagtggtctgatgttgaagcttccaaattcgataaacaagcttccgggaacagagtacgccaagagttcgtgaccaaagctcgatctagacgcacctcaatccattctctagttcctctacctctttcccatgtgaacgggtagcccaagagctctaaatcttccaaaccacattcatctaaacaaccttgaaaaccttgtagtaaccattggggatatggccgacccccttttttgtcctcttgactaagaacattgttcaagtcaccaattacacaccatggaagggttgaattcctttttaaagtcttcaaaagggtccatgtttgctctctttggtttcgggtgggctctccataaacccctgttaatctccaccaacttccatcaagagcagcaactttcatgtcaatatggttctgagaaaaacccagtaaagagccctcatcttcattcttccaaaggaaagccaagcctccactaagcccatgggcttccacaacaaaaactccttcataacccaaagcccgtcccacccaattaacacgatctttttgacatttggtttcgcacaaaaaaacaaaattaggtttcttatgagaaataatctcttttaggaattgaaaggtccgttggttcccaagcccccggcaattccagctcaagacattcataatgcttggcgggcctggaaaccagaacccgccccattcacgttttttggactcacactctccactgttggcatactaacatcttgatctagcatttcaaaaatgccattatcatttgaaatgttgcccagcccaactaaaggagtattcggcccatccacactctcacctaactcctttgccacatcagttcttctccttttgttttccacaaccaataaagcattattacttaaaataacttcagatgccacatcattcccaccttgaattgacttatccttagccttaggatctttttccacaaaatgaggaacatccccacgtataatctgttgaggattgccaatattatgaagatcggcaatcaatccctgattattctcttccccatgaatattccttgatacgccagcctgtgtgctttctcctccaccagtcacgggccctctgtaattagcaccagatcgcagccatggtgatccgatggtatgttgtctcctccgtggtgccgcctttagtgagagatcgaacaaggttgctttatat

SEQ ID NO: 309678 - DNA, 1145 bp, Cannabis indica
ttttattattggttttgttgttttacataattggaatgtaagttttaattttttatttatttatttcaggtaactttttttatgtgttactttttaatttagaaattttacataattagtttctttgagttagaatttttaattagctaataaacggaagtggtttcttagtgtctaattctaacatccaactttggtgacgacttcgacgtctaactctagttactttttagtgacaaagaaaactcaagtgattgttttggtgatgatgacaagtccaacgactttctaagtgacttttttggtgacgagacaatttcgttaactttttttagtgaatggaaaatcttgtgatattttcggtagcaataccaactctgatgacttttcaatggaaatggcctcttcaatgactctttggacaaaactttttcttggaaagtttattattttgttgagaattttatttttaattattttttatataaaattactatattttatggcattacattttttactatatttttgaaaattcctcagtagtttcataggacctaatcactatcacgctgccttttgtcattttggaagtgtttagatagattatgggcttgtgggcctatcttacatattggatgacggaagcacagattgtgggctccacagtataacatgggcactgtcccaatttatcaacccacttgtagagattcctcttcgtcatcctagtatctatcaggcttcttttgtattctcttgaaatttattaaataattgtagaatcaacttgcatctttttagattagacacccttttgtatactatgtggagcatctttcttcacctatttatttctcattaattttcaactgatataaaataaatgtaataattataataggaatctcacgtttgcatctacaactttagaagtatgtattattattggggtttttataaaaatactagattttgagcaaaagtttacaattttactgtggggcagaatttcttacaaaaatactatctttatataaaacaaccgtaaaacaacacaattaaaataatagtggaacaaccgtgaaaacttaacacaatacacagtataaaacttacacaagatatttgaaaaagaacaacac

SEQ ID NO: 309679 - DNA, 1745 bp, Cannabis indica
ggctattaccactatcacggggttgatcctctataaatcatggtgttttctttacttattatttttttctttctattgtttatttaatcaaatcgctttaattaagactcactgtagttgattagaagcaaagtcaatatttaggtgctttcattgagagcaaacacacccaagttttttgccttacgtttttgaaaggatacaggatggttgtaaactcgtgggggaattcaaactgatccagtcaatccgatgatgacagatccaagagtgcaaacacatggaaacataagagatccactagggacgacccctagacaagttaatactcaaccaccaacagtaggccgctgagtgacttttcctctggctgggttcactccaggtatacaagaaataggaaataccagaacggcggccgagtaggccactcctggcactaaaatctcatccaccacaaatactaaaaggccagtcaaagatgatactgagcttcagaacttgtgagcagcattagggctaatgcaagaccacaataacatcctgcaccatgactagaaaaatatccgagcagctatcaatcttgcctttgatgaacaaagatgccagttcatagagtggagggatcgagagatggagaaaatgagagcctagcaggaagccattgacaaacgctttaggtaggccaccatactgatcaaaagggcctatcaaatcaccagtcaacaataagtaactgattctagtatccccttgggatcttagaatgggtcagaaaagtatgtaactgatcatgtcgcatagacttacatcgatcaagcatccaatccaaggtcataggttcaaactgtgggccaaacagtagataaataaatcttaccagggagtagtcagctaaacaaccatacccagatagagttattaggccaacctctcaaccaagctggtcagacacaaagacctcttggaacatcggtgtttgaccaaataggcaccttacacgacctcaaaaacaatctgaatcacagaagaggactggatgggaaaaatgttcctcctaccgtccagccaaataatgcgaacaactatgtcctaggtccagttctaagagatcttaatatgacataggtcggccagcaggctagccaagttcatccacttaagcaagcacaaatatatcagcttaaaagcatcgtacaaggcctgatcgacccaaaactcactaatcttgaacttgatcgggcaagaggataacccttctcacaagaaatcaatgctctcgacctaccacccaagttcaaaatgccagtatgggagatgtatacatgcaaagaacatcttttatctcacctgatatactttgagatgcaaatggacttgtaaggggtggatggtaatgtacagtgtagatgttggaaatattttaccaggatctagatttactaccatatatgattcattaacatcctaatatgaattctaaaacaatgaaataaacacatataaagtttaggaaaccttacattgggtgtagcgaaatataatgactccttccgttcagatctctagcccttgattcctttctgtagtagagcataatcaagatatgaacctggatctctttctctcattcctttgatgttgattctccttcttgttgattggtgattagtggttaaaaatacacttttatttattttaaatgataaaataaattgagttttaattgatattttcatgaaatt

SEQ ID NO: 309680 - DNA, 1291 bp, Cannabis indica
gtggcccttccagcatgatggtttcgtctcttataactgacaatcgggaatggaacttggagctcttaaatgactggtttttgcctattgatgttgacaaaattctaaccattcctttaagtttctttgcaacagatgatagattgatatggcatcattcctcaaatggaatttataatgttaaatcaggattccatttggcaaccaccttggaggatcaacttatttcttccacttcagatgttaatcgtgattggtggaagtatttttggagtctcaagttgccaccaaaaattcgtatctttgcttggaaagtttttcaggaaatccttcctactgctgctggtttatttaagaggaaaatcattgactcagccgcttgttctctttgtacatcaagttgggaatccataggacatgctctttttggatgtcaacatgcaaaggctgtttggaagaaatcgaaatttagaatagacttcaataaggctcaatccatgtttaaaggagactatctgcactatctctcaggtgtgtacaatcaagaggattttgagctttttctatgtcttttatggggtgtttggacaaaccgaaacagggtttttcatgggggaaaatcgcgtgatacctcctcaataattgcctacaccactgggttctataatgactttagcaaagccaaaactgccccaaaaccagtagcagttgcaggcccgaatcactcacaccagatggcatcttcacccgtccagagcaaccaaataccgtggtctcctccctcatcaaatggtttcaaactaaatgttgatgcagcaaccaattatgaacagaaaaaattaggcattggagctatacttagagatcacgatggcatggtagtggctgccctttcaaaggtggttcaaggcagttttcgctcagatgaaatggaagcaaaatcactttttcatgctctcaattgggctacacaatcgcaattgactataacgcatattgagacggatgctttgagagtttctactgctttgaattcagctacaaacgatttatctagtttttcgagtcttattttcgatgtaaggtgtcttttatcctttttccctggtgttttagtgtctcatgttaaaagatctgctaatcaagcagctcatggacttgctaaatttgctttagggttggatgatgacataagttggatgggagaaataccctatcctattttctctattgttgtaaatgatttcagtttataataacagtgattattctcaaaaaaaaaaaaaactaa

SEQ ID NO: 309681 - DNA, 3599 bp, Cannabis indica
caagggctagagatcttgaacgggaggagtcattatattccactgcaatcaatgtaaggttttcttaaatccttatgtgtttatttcattgttttagagagattcagatttaggatgttaattcaacatacttgttagtaaatctagatcttggtaaaatattcccaacagacacttggctggccagaccctgacaggcacttggtgggcagcttgagcctaggacagcgattcaagctacgaattgggctttaacaacccacgaaaataagggataaatatcatctatttacctattcgtgggggataattaacctattaattatttattgttttattatgtaacaaataactaattttctattttttaggggtataaggttattattctcttgtaaaatctcctatataaagagcattaacctaaccctaattcatttatgtctcaagtaccctaaagctctaagtcttaaaccctaactctctctctcttcctctcttctacacgccctaggcttgtagaagagactaagtctttctctcttacttgtgatttgcctacgcattcttatattgtaatcttaagagaaccacctcaaaatccacaacacttgtgatcttagtggtattatcagtgacattaatacaaccaaaagggaagtaggtcattatccgctaactaagggatcaaacctctataaaattaatatgtctctttactttctcgttcttattatgtacatgtggtagcatcagtaataaatacaactccgttgtcagttgaccaaatttgaggtcaacagtttggtgctttcattgagagtgttgtcaatttatctcatttaacaccatggttaacacaaggagagctccagctacaacttttgcctcattggttcttcctcaagacactataactactgatcctaatgtttgtgttctagccacaactggaatctctacgaatctgacaatttaatgttcattacccgctaactaagggggtcgaacctctataaaaatattatgtctctttactttctctttcttattatgtacacgtggtagcatcagtaataaatacgactccgttgtcagttgaccgaatctgaggtcaatagtttggttctttcattaagagtgttgtcaatttatctcatttaactccatggctaacacaaggagagctccagctacaacttctgcctcattgggtcttcctcatgaccctatgactgttgattctaatgttcgtgttctagccacaactggaatctctacgaatctaacggatgtggccaaccctaccaacccggcaagtacaaaaaacttgatcaccacaactggttaggttgacactaccaaccgagttggtctcaatggccaatcttgctgccaagggtagttccaccattggcaccttatactgagggtttggttaatgtggagcaacccccgggcacataggctgcactagccagttaagggagaacgggcgaccagacattacctagcataaggttggccgaccatggccaattaccttacctagggctggtcggccaaagccagatgccagacctagggttggctgaccttaaacataccctctcccagggtatggccggctaggtcctggctaatctagggatgcagcccaattgtgaagggccaatcaacaaggttcttgcagcatcagatccttctatgcaagcaaagttggatcaaataagagacatgataaagggcttggatggcccaaaaccatcaaaccttgaactggatagctcaaggggctcactgttctcagcatacataaatgcacttccccttccaaagttcaaaatgctaatttggaagatgtatacgaggaaagaagatcccttaggacacctaaaatactttgagatccaaacaaatctcccacaaatatctagagatgtgcgatgccgaatctttcaagcaaccctagctaaaatagcccaacagtggtatttcaagctagtcccaggaagatttaattcttgggaagaattctcttgagaattctatacttaattctctgcctcaagacaaatatcttcatgactagaggatcttgtcgaaataaagcaaagacaagatgagcctttgaaagactacattcaaatgttcatgattgaggccaccaaggtcaaagacctgatagaagaaggctgatatatgaccatactcggaggcatcttaccgttgagtaaattctggaaaattaccaaaaagatctcaaagagcaacatgaaagaatacctcgagcaagcagatggtttcatcaagttagaagaagttgtccgacaagtccagacaagagggtaggttaatgttgaatagacacatggcatcatactgccccaagtgttgttccacatgccagtcagcacagacaatatctacaaattctccaacaaagagaatattggaggcaagcgcaacaatgatggctctggccaaattaatggcaaaaaggaaaattcaatgattcccttatgccatgaagtctaagggacatgaaggagacgtccacatacttcactctcctactaagactcccaaagcaatgcatgcccaccggccatggtgataagtgtcaccaaacctgaaccacctaggccatcaagctcggccaataaaaggccacctgtcaacctagcatggccataaaaggccatcctcttgccatcttcatggctaaatatacaagcatatctccccaatctctaagatttgggagaaaagtaagagctagagatgaagagagagttggagcaagacaactcaacctagaaggtgcattgaccacctgcccagtgtaggcatggccctcaagacacctgggggcaatgaaggccagttcaaagcttttaataatgaggctaaatatgaagcgattgctagcctcaagctagcacacgaagcacgggctgaatacctagacatacaccatgactctcaactagtcgtaggtcatgtcctaggtgaatgcacagctcaaggaaaaaagatgatggcctatttgagctatattcaagacttgttaagttaactcaaatgttgtactaaaaggcaagaccctaaagaggacgcaacaactaatgcactcgctcgactagccagcaccaccttgacagctaaggtaaacttagtacccgctcaattctttaaagaactaagcatcccaatttcaaaagaaatagacatgctggacaaccatcctatatggatgacacccataacaacatacctccaaatgaaaaccttcccagaaagcagggataaggataatagctgttgggtatccaatcctggatagcgtaacgcacagacgtgatatcccaataccacctctaagatgtgttacgaagaaagaagctgaacatctattgacaggagtgcatagaggctctatggcaatgaccatgggaaaatctaactaagtgtagatgggattgaactgcagcactgacctgacctccaaaaggctggtcaaccatgtccttagtaggctggtcgtgtaactccctaatctatagggacgccacgtgtgtgattttataaactagttt

SEQ ID NO: 309682 - DNA, 2339 bp, Cannabis indica
tggttttgtggcgtgggagaagtgtttcacttcccctttttgccactatttcttctagagctattattattgcgcttgtccctagtgtttttgccactagaggtttaggcaaagtttctagtgccagcctctacacttgacaagtcgtggggtggcaagatgctcgcgactgcctattgtcgacttgccctgtctaggcttatcggacagcttcctccagcatgataaagccatcatctctgtcgagtaactccttcatgttgttggtcgagatcctccaaatatgtttccaaaagtcactcaatggaaggatgccccctagtatgttcattgtctttcttctgttaggcctttgaccttggtggcctcgaccatgaatctttggatgtaatcctttaaaggttttccttatcattatttgactttgacaagatctttcagcggtaatggtatcatcctcgagaatgagaactatgtgtagaactctcggaaaaactctttccatgaattgaatcttcttggggccagcttgaagtactattgtggagttttttttgacaaagttatcgagaatatgcgacaccgcacatcaccagtaatttttttgagatcaagttgcatctcgaaatacttgatgtgtgctagtgggtcttctcgtccggtatacatctttcatactcacatcttgaactttggcaaggataaggtatttatgtatgctgagaatggtgatgcccttgacctgtctagttcaaggtccgaaggttttggacccgctaggcccttgatcatatcccttatttggtccaactgtgcttgcataaaaggatccattgctgcagggacttggctgactggcccttcttgaataggctacaaccctgaatgtgtcaaggtctggttggtcatactctgggagagggtatggtggaggccagcaagcttttagctctatttctctccttggccggccgctcttagatagggtgactggccttggctagccaattctatgctaggtagggcctagccactcgtatccctcgattgctggtacatctggtgtattaagagtgggtagatcgcataagttgttggacttagctggatctagatatcagaagtgactagactcacttctcaagttgttgttttgggtgtttccacccattcctggacccagacagttgaagatcagcctttgggctactttctcccaaaggccccggatcaggagttcaccctgctggccaaccaggggtgtaccaccaaaaggctggccggccagaggttgtccaagtgggggtgttgtagagcctgagatccctggtcgggcccctagattgttggttgccgagatctagctattctcaccatcaggccttcatggcaaggcttttcctcctttgggtaggggaaggtctatcctagttccttaggaacctggttggacagtctattggtagaccctccccgatttgttgactagtatccctaaaagtggatctttgattagatcctgacctctccaaacagttctttcatttaaccgccttatcaagtcgctagcttatggattgcgacggtctagcttcgcctagtgagattgaaggatgtacttctagtcatccatccatcctagaaattcaagtctctattgtgcacatacatcatagttaatagcgcgtggttcttcagtctagctgacttggcagacagcctctctaagtctagctaacttgagatcttttcccaagtatatatggggctcgccgattcctagccccgtctctccagcataatactggggacaaggtctggttgttttgtttgggggccgctccacgtgggtccttccttcaatgggaggcaccaatgaagggtcctccataggaggcatggaccgattatttagatccactagaatagttgtgtcaacctagccaggtgtggtggccagattggtggtgcctgttgagatggcaagagtggccatatgtgctgttcgtggagattccagttgtaactgaaatacaaatatcaggatatgtaatcatagggtcttaagaaacctgatgaggtagatgttgtagccaaagttctcctcgtgttaaccatgacgtttgatcagataaattatcaatttcctctcaatgaaagcaccaaactgttgacctcaaatttggccaactgacagcagagtcgaatttaatgttgatgcttgccatgtgttacacaattagaacaataaagtagatagacatagaattttatagagctttgaccctcttagttagcgggtaaatacctactccccttttagctgtattgataccgag

SEQ ID NO: 309683 - DNA, 1704 bp, Cannabis indica
gggaagaatgacatgagattcggaaagatagcatttggacttattaccggcttacctatgggtagtgcccctccagaggaggaaagagaagccaagtccaacgaccatctagttcggacatattttgaagggaagagttctgtgcagttggattcacttttgctccaacttgagaggtgcgaagtaaaagatgatgcctacaagcttggactgatcgctttcattgaaagtgtattagtatcaaaagagggcaatgtccaagtttggcctaagatgttaaaagttttttaacgatcttgaattcttcttcaagtatccgtggggcgagcgtgcctttcataagttgatggagacattgaataaggatatgcgcaacattacaaggataatgttgacaagaagaaggggaagaagattgctcaggatgcaaagtacattgttagtggctatgtacctacctttcagtactaggcatacgaagccattaagaaagtgggcaagaagtatgctcaatgtagcgggaccaagttccctagaatggtgaattggaaaactttggagggccatcagaaataagatgtgaaggcaaccaacatcgcactattgttctacaggcaggtatgtttctattctcttctgaaaaaaaaaaaaaaacttgttaattcagtcaaaatgcttgtttaaaagatgaatttgttattcgcaacttactccacgacgtttagtgatttgatttacgatatgttgattaatatttttatttttaaatactgtgttgattcgcggctttatttcgcgatatatttcgacaatttgcgattcattcgggatgtaggattgtatgcattgtccagaaatgccaatgatgtttttgcgacatgtttactaataattgcaatttagttcgcgacatggtttgcgacatttcttaattgtttttaatgcttgtgtgtttttatttgttttgcagttggtcgtaaagaagtacttatttccccggcccagtgaagaggaatatttcaagaacattaatgagggtaaagccctctttgttttaagatggacatcaaacaaatggtggagggtgatgctacacaagagtctttgtttgaaagccaagcaaagattattaacgaggtcgtggcaaaagcaaatttagttccaccaccacccgcagcagaagtaaacgagtcatctactttaactgctccgtctactccaaccaatacatctgtggataatgatttggcaaagagattggatagacttcaggcccatcaaaataaacatgatacccagcaggaagccatcatattggcgcagacggagttagtaaatagccatatcaatatgaggcggtccttcacgtagagtcaaaaagatctgaaggagactctgttggctaagatggacatgttgatggcaatgttgaaaccaaaggagggggaaccacagcccaccccggtagcagaagattgccgaccaatggagagcaataatgaagatgtcttcctagaagattgggagccagatgataatgagggactgtaaactccattggatgcaattatcacgaccattggtgatacacaaacacaggacaatgtcctcctaatgactggacccccaaaagatgtgccatttgtgaggaagaggaagttgttggaatttattttaccaagatcttagatctactcacaagta

SEQ ID NO: 309684 - DNA, 965 bp, Cannabis indica
ccctaggcttgaattagcttaggttaagcaccaagggcattttggtcatttgggtaagggggaggattaggtcactgttttagggcttgacacctagccaattttatttcaccatatgataaattaaaactaatgtttatctacttagaaaaaatagagaaaatcaaaggaatttaggaattcaacctctctttctttctctcttggttcggctcccacacaaccagaaagcaacccagccaactcttaatttctttgaatttcagcaaggtttcaacaagattggaggttgttcaagccaaggcaaaccctagaacattacctttgtgctatttaagttttttagttggtttttagcttgtgattttatgatgtggtggctgtttagtttaggttttactctagggtatttccagaggttgttttatgtttgaattgataatttgttgttcgtttgtttgtggtttgagaaagtttgagcttgcgagctcatacttggctcattaatggtgaaattagattcatgggttgtatcttgctgttattgcttggaatatattgtttggggttggttcaagtgttctggaaggtttggattggtttggacaagatttgggcatgattttgaattttttgggttacttggtgcaaaccggttaaccggttttacaggccctgtaaaactagttaactggatcagggttaggtttcccaaattttttgtgttgtcaatttgtgttatttccagtgccatagttggttatttccttgatactttgggtattggggtattagttattaatggcagaaccctaagttaaaggtttgggtttcctgaattaggattttggcacatcatttacccatttatgtgttgggttttatgccctaaataaaactcatttcattataatcagatttacttattaatatagatcagaaataacatttaatgttgcatggtt

SEQ ID NO: 309685 - DNA, 1847 bp, Cannabis indica
ttttactaattgagttgtatatattttcatttatcttccattgtaataatatctctaacaaaaataataatgtaagagtacaaaaaaaataaataaagtagttaaaattaagttaaaaaaaagaatttcgtgattaaaaaatatgttgaggagttgatattgttttgcctattgtaattaggtcagtattttattatttttctgttattctgtatttgcctttgtgttattttatagttattttcattttatttggtaagttgttctaaaattattttttagctgtcttagttgtttttaagtttttttatttattttactgaaactttaacactatttttgagaaattagtacagtataaatgtaaaaaaaaaaaattgtaaaaatataaaatgaacaaaaaaaaaatgtatttttataagatgcccaaaaaaatctgtaaatatatatatagaaaaatcatcaaaatatacataaaaaatgtgattttgaatattttgtgtaaatttccaacaataaatcaattatatagatgggcccttaggccgttttatggtttgattgaaccatttgtatttgggttaatacactggatctgaaatcaaattttgggctaaatatgagttgttgggccaatagaattggttctagcccgaaacttatacaagtcttcttctacaaactaagacttcatcaaaccttacaagaaaagaaatgttcttcaaataaatacattcgatccaatctaatttgtacgatttagtccaatctaatttacaaaatgtaaatatttacacttatgtagattggattggattaaaaaattcaaaattcccacttgtgcgaattaaatattgagtgacatgtaaaaataacctaaaaaaaattaaaaaattatacatacaaataacatttaatgtagagaaaatagtaatttaaaagtataataaatataaaataattatatttcaaaacttagtagatcaaatatatattttattcttatatataattattttccatgtacaatttaaaacaaaattaaacatttttttatacttacaattattttttctttgaatttattatttgttattttatttattttaatttattgatgaagacataaataacaatattttattttattttgttgttagttatgtgaaaataaataattttttcataaatattaaataatttaatataatcaatctaaaataaccgttccaatccatatttttgtcggattgaatttgagctattgtgcggattggattaaatccaaaaaataaaattcgagcggatcgaatatactatgagcaaaataatacagattggattggataaatatccctaattcatatcttctattctaccttttttttctttttcctcacaaaacttttaggtagagatgaacgtgaaatttttatatgattttaattaaaaaaggttgcatataatgtatttttccaactacttaaaagcagacattatgagattacggttactggttaatttaaaggaccttgtttctatgtttcacatgttctaattatagctcccaagaaatatgctaaagtttcagatccacacctaaaaatgagacctttaatgagtgcttggttggaaaatgagtagaattataagattattattttatgtattgtaattataaaatcaaaattacctttcctgaaaaacttacaaaaagtagtaggtggagcctacaaaaatctctaaaccccaactaaaatatcaaccaaataggagtagttttttatattctgactttgtatatctttggctagacaattgcctgtcataatgtgattcatatcact

SEQ ID NO: 309686 - DNA, 1502 bp, Cannabis indica
cttaataaaatgtatacattaaatataatcataaaataaatcatttgaagcatgcaacataaaatgtgatttctaatctttattagtaaatctgattgtattgaaatgggttttatttagggcacaaaacccaacaacatacacatgatcactatctaataagatagtcgatgactataaaacttgtcatgccaagcagtacattatacttttcttacctcaagttttggttcaggtatgttggtcgacctgcttggagtacgatcaatacccgggccctgtgtcataacaataataaactaataagtgtttacccgaaaacactacttaataaatataaaggaacacctagggtgtcctaccaaaccccgaggtaaaaaaaaattatattttggctctaaaacatataccatatggtaaagctcgtcccaaactaaaaaatagtatatagaacgtcccaaacagacactttagtgaaaagttatagtgaaactatgattctagagttcaaagtgtgcccagaaccggttaaccgcttctaccaaaagctgttgactggtttcgaaccagttgactagttggtcaggagcaaaaagtgtgaatttccaagtttacgcactcaccaaaacgctaccgagacctatccaaaccaccccaaacattatagggcacatatataccatacatactactatacttacgtaatagaattaaaaatagagaccataactggcaaatgccactagtgtttaaccttaagctataaaaagtctcaacctcaatttctaactcaaaataaccttaaattcaacaagaaaacatcagaattagtctcatgactaataatccaataaggtcagaaccttcataaccattgtaattcataaaatctatatacaaaactaattgtttttaacttaaacataattaaaccttaccttacgttttcctctcaccaaggattattgttctgcaaataccggagcttagatcgctaggttttaggttaaaaatcaaagaaaattgagtgaggaagataagattcgtcaaagggggagaatgagagttttgttctatttagttttactatttataacttataagatataatatattaataattatcctatcatttcttagccactaagaaatctctattcctagggcgctaagtcaaattccacgtactcctaattaacctaatatctacattattaacttatcacaatattctcctcgattttatcgttaaacctgttatgatatttttggcccaggatccagtctccaaggtcgccaaacttacaaatattttgattcaacatatagctcatattacactcacccatgctatattcatctcctaatctatatacgcttatttacccacttatagctgatttaaaatttttgctaagatatagttgtagaatcataatcctacttattacctgattaacccataatataaatataaaacctaattacttaccatttggctt

SEQ ID NO: 309687 - DNA, 1415 bp, Cannabis indica
aattagaaaataatttccataaataaaatattctaataagagttccttccaacacttctggcaatggtttatacgatttcattccacttcgttctgccccctctaaagtagtagcactcggcaggctcacaggtaatttatatatagttattaattaatgattaataaaacacctatagtcatttttcactactaattaaatcatatataatataatagaggagaatcaagaatcgtcaaatgatgaagatggaaaatgcattagtgcgaagcttgtcactgctttccttactgaaaatgcttatggtttaacaaacgatggtgagtcatgagattatcgagtgatttaacattattattgattacaactaatgatttattcaaattaaataggtattttgtttactgggtatccagtaattggatctcaacacaaagtccaagcatcaggaacatgtttagatagttttgaagatgcaaatatgacagcgtgtgcatgggaccccaacattaagggtgagtttttctaccaaaccacatttagtgtagccttgtccttagtcaagagcttcattcaagatgttcaaaaacttgtcaagttaaaaccaaaggccttatgtggcatagaacgctacaatggaattctcatgcgttatgtcacggcctcaactgcttatttgggtaaagatggagatgcaattgattttgatatcacttattatcgaagcaaagatccattggttccaagactttatgaagacatacttgaagaaattgagcaattggctgtgtttaaatatggagctttgccccattgggggaagaacaggaacatagcttttgaaggagttttaaacaagtacaagaatggtcaagagtttttgaaggttaaaaaggcttatgaccctttggaattattctcaagtgagtggagtgaccaagttttgggacttaaggatgggttatgtatagtgaagaagggttgtgcattggaaggtttgtgtaggtgtacagaggacgctcattgtgccgctagtaaagattatttctgtcgaccaggaaaaatttatagcgatgcaaaggtttgcactcgtttgaaattcaacaataatttatttgaacagatcatagactctgtcatcaatgaggtttgatgttgtttggagttctcatcatgttcttcatcagattattcaatccttttgaatgattaagtattagctagcgtttatggttcggaatgatcactttcactcccatcaaattcttgtgattatcatggttttgttgtttcattttgttattatcattgtaaatgtaatgttattggttggtgagaaacttgaaacttttaatcatgattatttaagagatttttaaattattaattctttcagttttttttttttaaaaaa

SEQ ID NO: 309688 - DNA, 1266 bp, Cannabis indica
cttgtgtgatttgggagcaagtatcaacctgttgcccttgttagcattcaagagattgcaacttggatcagccaagccaacaaccgtgacattgcaactagctgactgttctttggctcatccaagggggtaattgaagatgcccttgtcaaggtggagaattttatttttctagctgaatttatagttcttgacatggaggaaaatagcagtgttcccattatccttcagagaccctttttggcgacacacaagctctaattgatgcgcaaaagggtgagttaaagctgagagtataaggagatgaagtagtgtttaatgtactcaaggctataacttatcctaaagctagtgacaattgtttcttgattgatgtagtggaaaccaggaagcctaatgaagaccctctcaatctaactttagtgcgagaggattttgttgaccagttgggaaaggatgcgagggaatttgcttagtggctggattcttatggggcattgaacagaaagtgttttgaagagcttggagtgattccaataaagttaattccatccattgagaagccactagaattggagttaaaagtccttcctgatcacttgaggtatgagttcttagatgtgaacaagacactcccagttattgtgtttgcttccctttctatggtagagacaaaaaagttgttaagggtattgatgaagcacatgagagccattgggtggacattggctgacatcaaggggattagcccctcaactgtaatgcatcgaattttaatggaggaaggagtcaaacttaccattgaagcacaaaggagactaaatccgcctatgaaggaactagtgagaaaggaggtggtcaaatggttagatgctggagtgacttatccaatttcagatagtaagtgggtgagtccaatccatgtggtgccaaatataggaggaatgacggtagtcaagaataagaagaatgaattaattcccacaagaactgttactgggtggaaaatttacattgattatcgaaagctcaacaaggctaggggtgttcgcggtatgggtggtgcggtttttgacaatttttccaaatcaacccgaacatgcgttttttctaatttcccaaatcgcacccgcaccgcgaaattgaaaaaccgcgaaaaccgcaccgcaaaaaatagtgtagtatggtatggtttttgtggtttttgcggtttggactatcaccaataattaaactatcacataaacaacaaagcttgagcaacac

SEQ ID NO: 309689 - DNA, 1055 bp, Cannabis indica
ccgggcaccggaaatgcaaaacatgaaaaactactgaataacataaccatgcatttctgaattccataaataacagcataataaattatttaaatagctataaataatttcataaataatcatgaacaactgataatttccaaattaactaagcgggctttacattacagaacttccaaccacaacattttgaggtcggaacgaaggttgcttaacaccagaggcagaagccaaacctttcccacggacagtagagtcaggttggccctagaaaagattagttcccatagcagggtcaccaacaggggtggaactttcaaaaccagccactggaaaagtaggtgtaggagatagactgtccatttggctagcagggctatcagccacaatgagagaatcattagaatatgaggtaaaagcagatggccgcaaggaaatatcaaagttgggtctattggaagggaatgcaatgtttgaagtgttgggattcaggggtgtaggcatcatgataacaatagtggactgtggaggagcaaatggacctgtgaagttggcattaaggttcagaaacaaagggaaagtgatagagtgacccgagatgtgttgaggtggtaagttgaggttcactggctgataattcatcatggtgattactagaggatgaggatattgaaaaggttgagatttatccgaaatcttttctttgcctctgagaaggatgttatatgggaataaaggttcagttaaaagctcatcacacttttgcaggaaagcaacacaatatttttttggtatgatctaatttcccacagaaaaagcagaaatctgggagtctctcatacttaaagtctaaccatttgataaactcccaccccatcctaatgaatttaatattcattccccttctaatgggaaggttaacatccaagaggattcgaagacgcatatagggaccagtaccctccttaatggtgtccttatctacttcaataagatcacctacttccatggctatgaatctagcaagatcataggatttacacataaatgggatt

SEQ ID NO: 309690 - DNA, 1316 bp, Cannabis indica
aaattaatataatcataatttctagaatattacattaatgatctgagaatatttagggttatttctataatctgccatcacttaaagaaagaaaactaataaattaaattaataattgggtaactgaaatgacaggattcatattcttaacctttcatccatagtcaaacacattaaaaattatttcttttattttcttttattttttctatcaattattctccaacattattttggatcaaccaaatagaaacataaatctaattaagtagtagtcaattttaattttccgtagttcgaccttacctgtgtgagtaaatacttgcaatagatacgtacacttgcgtaatttataatttttagtaacaaccctcatcgtcagtgactagtttgaatattcaaaacccgcaagaagctcaatgatggttacaaacccacaaaaatagcatgatatctccatgaaaatcggatttcaactacctccaaaaataaaggagaggattaagatagctctgcattggtcgtgtctcttgaagcgagaagcaccgacctttttccccatataattaggggttagacattacgtgggaaagggatccgaaaaaaagtcaaacacttagagagcagaaactctgccatttttattccttgcactcaagagcttgttcttgactttgcaacttcggttaataagacacaaggggagtaggctattatcgatatctggggccaaacctctttaaatatcggtatcattatttacatttattattaaaattttggtttaaatctcatttattacaactcgatgttggttggctaaaaatccagtcaatatatatctatcttttataaaatttggctatgtaataaaatttttggtttaatgatattttttaattttttacgttaattttaacagaatattccttattaattttataatactattatatggaggatgtttcaatgattacatcaaatatgtaataattatggttacatttatttttagtctttagattactatttaatggttgtgattaattagtttagaaattaaaataaataaataacttgtaacttgacagtaacctgatactttattttcgtataaaatcttaattaaaattaaattactaataattattaatttattttttgcaatttaatactaaataagaatcttttagaaattaatttgtttcacttaaattattgaattatttgtaataaaacttttaataattcaaaattattacacccataactttaattaataaaaatagtaagaatgacctctaattaaatgtaat

SEQ ID NO: 309691 - DNA, 981 bp, Cannabis indica
caggcggtgtgggattgcacagcttacccggtattccccttacggatcacgggactactgactgtcttttttttaaaaaaatatgggataatgttattactattatttaaaacgtgtattgtgttttctctattattgtatgaaaagacaattcaagacatgttgttgtcatataattttgtgtgaatactctttgccatactttcttctctctatatatatagtcatcatctatataaatttcttcaacttcaagtacttaataattattccttaattttcctttttttttctttctctctttgcaaaagtactatataataaaaactattttatatttattaatatttatatatataatggaaaaaaattcaaagataaataagcttgggagctcaattccagtccctttggttcaagagttagccaaagaaattggtaataataaaaataaagtagttccattgagataccaacatccaaatcaagattcaattatttacaataataccactttttcttcttcttcttcaaatataccaattattcacttcaataaattggtttcttctgacaaatccactatggaatcagaactccaaaagcttcacttagcttctaaagattggggtttttttcaggtaacaatttatacaattatgtattattttgtgtaataataataatattaattaattgataataatattaatcaattgataataatattaattaattgttttaaatatgaaaaattaattttattagtttatatattgataatatatgcatgaatgtaaagttataataatagatcttttggctaattatgatttttgccccctaaacttttgacatgtaccaaatcatgctccctgaacttttaaggttgttaaaaataccccctgaactattgagactgttagatttaaggacttttgtctaattttagtaaaaaagtctaacattgatgaaagttca

SEQ ID NO: 309692 - DNA, 3097 bp, Cannabis indica
aggtctatccccaacactgccaactggcaaaggagactacatttcgttgagctcattgggtggagctcttgctatcctcaaaattctctggcacttgtcacattttttgacatagtccatcgagtcttcgatcattgttggcaaaaagtacccctgtcagagtatctttttggataggctttgcccccggcatgattgtcgcaaaagccttcatgcacttctatcattagccgttcagtttcaacttcggtgacacacctcaagagaggcatggaaaaacttcatttgtacattatccgtctaggatcaagtgcctagcttcttttcttctcagtttacttgcttcagttttgtcttttgataaggctttggtctggaggtaagttacagtaggcgtcatccatgttggggtgtcatccaatatgtcaacttattctgggataataatgttgggttcttctaggaactacatgggaacaaagtttgctttgttagtaatggtgttgctcgccagacgagcaagtgcatctgctatggtgttctgttctctagggatctgcctgatcgtgtagcttttgagttgacctagcaagtctttgatttttctcaagtaggccaccattttttcaccttgagttgtgtattgaccaaggacttgtttcacaactagtggagaattgctaaatatgtccaggtaggcccatacttcacgtgccaacttgaggctggctatcaaggttttgtgcccagcttcattgtttgatgctttgaagccgaatttgattggtttgtgcagttgctgcccctaggtgttgtaagggcaatgcttgcttcgaacaattaatcagtgcagcttgatcaacatggagtttccatgttagtcctttgggattttgttgctactcttgctctcgcatcttctctggctctttcttttctgctgagtcttgagggatctcaagagttaagttggtgcactcaaccacgaagtctgaaagggcttgaccctttatggttgttcttggttggtatgtgatcttgaacacgctaagctcaatggcccatttgagatgcttcaagtttttgcaaaacctactgcagtggttaatcggtgtacacctatatggggtgtgcctaaaagtagggccttatctttttggaagctaagagcaagttttaggtcaacttctccatgagtgggtatcaactttcagcatcaattagccttttgctaatgtggtatacagggtgtgtacactgtctcttctcttgtgaggacaacactcacacatgctctatgattcctgatagtatgggcgacttcatgtccaaaatggcttggatcttgtctagatttgcttctatccccctggcgttgactatgaagccagggaattttctcgagcctacaccaaaggagcatttaaggggggttgagctttcatgttgtaattgtgaaggatttttgaagcactcgcacaggtcctccacatgcccctagcctttttggacttgacaagcatgtcgtccacatacacctccatgttgcagccaatgagatctgtgaacatcatgttcaccagcctttgatacgtggcccccacgtttttcagccataagggcatgactttgtagcagtaaaggcctaggtccatcatgaagctagtgtgctcctgatcaagtggatgcatctttatctgattgtaacatgaatacacgtccatgaaactcatgattttatggccagctatggaatctacaagctagttgattctggggagtggaaatcagtcttttggacatgctttgttcaggttggtgaagttcatgcatactctccacttcttgttggattttggcaccaatacagggttggatacccactgaatgtagaatgcctccgttatgaagtcattggctcttagccttttattctcatatttgagtgcttgggcacgttctttgtccagcatccacctattttgttgaacaggttagatgcttggatcaatgttgagtgcatgggtcattacagaggggtcgattccgaccatgtctccatgtgattatgcgaaaaggtccaggtttaccctaaaaaattctactagtattgattcaatttctagagccaacccttttccaatcttcagtcttcttgttagaaaagtgggatcaacctctactttttccaactcttctatagttccaaagcttcctacaggatccccaaagcgaggatctatatatgtgtccctgccttgggctagacttcattgccccttgttgggctcatcttctaggcttttgggggcatcttctcctttttagccttggattgggccaagttgtaatagtgacgggtagactgctggtctcccctcacgtatgccatcccatgcctcgttggaaatttgaggcataagtggtagatggatattaacaccttcaggtcgttgagggctagtcggccaatcatggcattaaaagtcaagggaacgtcaatcacgacgaattgtgccatcaatgttctagtagtcgaattttctccaaccgtgaggggtaatctgatatacctggtaggtccaatgccttggccaaagaagacatacatcacttggttgcaaggcgccaggtcggtgagttagagccccatcttttcatatgttgatttaaaaagaatgcaggaggagtctccgtcgtccaccatacatctttctatgtcatgttcctgatttgtacagtaatgaataggggtcattgtgcaggaagctgatcgaagctgcatcttcttcagtgagggagatcgtgagctctatgggcttttattgcttaaagctcctgtctttgacagctaggatattgcctttgggctcatgacagagtgtcagagcatagtgctccctagctttgctagtttcgcccgcaatgtggggtccaccattgatgaccctaggtgtcctaccataggcggtgggactggatctccattctgggcaccttgtgccaaagtttggtcatcttatacacaacaatgcaggtggggattgttatgccttatcaggtactcaagctccctcttcaaattttgacactcatt

SEQ ID NO: 309693 - DNA, 709 bp, Cannabis indica
aaaaataagagcagaatttaaactttaaattatttacagaatgaaaatataatttgtaactatttaaattttacaaactattcaaaatattacatgcatttcgggatcccgtaaaaattttcacaaaacattacaagttacttttatatgtcgacctaaacggtaaaattcgagaacacataatacaccaactggtagatccaacccacgtggtgtaatatggcccgagcatgcacaatccaccgccaagccttcaaactcatggctgatcacaaactgatttactatttcctgcaccgtagagcacccatgagtcaagtccaacaagacagtataaataacaataagataattatgataataattacactttataccgtacgctactgcgtatatactatgccactgcactttgtttcacattattccatatataatgatgctactgtaatgaaggtctatattgcataatctacgtgttacattcacatgtctattaatgtctatgtagcatagacccacgtgttacactcacatgtctattaatgtctatatagcatagacccacgtgttacgctcacacgtctattaatgtctatatagcatagacccacgtgttacgcttacacgtctattaatgtctatataacatagacccacgtgttacgctcatactgttggattttgtgccctaaataaaacccattac

SEQ ID NO: 309694 - DNA, 728 bp, Cannabis indica
atttatatatatatttatttaattttgttgatgatggattcttgagccttttatgtttagatcttggagccgcctattgtgattgaccctaggcttgggtctagatcgggcccaacccacaaatttttttactaatcttaattacactttttttagctttaccttttagttttacttctaataatcatttttgtaatggaagattgctagtaataatcttaggctgtttgataaggagggaaagtaggatggatggagaattttgaaaagatgaggaataggatgatggagaggatagttactcttcttcgtgttgtttgatattaaaaataaaattggaattatggtaagtaaaataaatattaaaattactattttatcatttttaatataataatatattttaatttgaaaggagtaaaagttattttatgtagcctttttgtctatttcgtcaattctcctatttctggagggatgtgtatttgaagggaaagaatttttctgatccatcaaagaaaattcatcaattttctctatccctctccttctcccctcctctcccatctactaaatatagtgtaagtcgaggaaattacattgtatacccactttactactttatctattttaatttttacctttattaggcaactcactcacacaagtaggtacatttcaatgaaatataatataagagtattttttattaatagatacaaaaaaga

SEQ ID NO: 309695 - DNA, 2006 bp, Cannabis indica
ttttttttaaaaaaaatagacataccacaaatgaaattgttaacaaataatttataaaattatcacaaaaactagttacttaaacaatcaattaaaaaacatctaacattgacaaaactatttacttaaagcaactaaattaaaaactaccacacaagaatcaattaaatgatagaactaaatcataagctaaaacttacaatccaattacataaataacaaaatcaaaacttaaatacagaaactagttaccaaatacgatcaattgaaaaaacagaaacaaatatataaatcacctaaaataataaaacataaattaaaatacaaaaatcaattacaaaatcacctgaaataaatttataaattatttttgtaaatgctagttacagaatttttttagctagtttattacttcactctggattttgtgcaatatcatcgaatgagtttgagtcttcatttttagcaaaatgcaatgtttatgaaagtgtacgattgaataccttttaagtagattctaaagtgttacgactaaagatgattagatgatcgatagggttgagcaggttgctgtgctgtacttatgaattttaatcaataccaaaatattttgtgaaactttttcttggaaaagggggttatggtaaggtttacaggtttcatatgattgagttgagtgaaccattgtaaccaatgattttattgtgctgaaaaaatgataaccaatagattgatagtagttattattatttatttacttgcaaaacttaaattctttgtttatgtgaacaaaattatgaagtatatatcatttacatctcaattcaccttgttgcaaaaattttggtacctcaatcaatgtagtaactagtaactagtttccaaactgtaattacttatagtcatattttgtttgtgcagtgaagcaagggatgaaggattcaaggatctgtaaaagacttattggtcaacaagattaagcttctcaaagaaatgcgcaccaggcataaatattccccacaaatatatttttttgcattgggtaagaccatcttctatttatataacaaattaaggtcaaataaggttttttttttttttggttggggggaggaggcaagggaaaggtcaaataattctttaacgatcttctatgtgcattttttcccatactcattcaaaatttatcaaaagaaaaatcaagattaggtgtagcataatgaaatgtttatttaatttaagtaaaattaaaaaagacataaaagtaaaattaaaaaagacataaatctagttcaaaaaaaaataaaaaaaaaaaaaaaaagacataaatctaactctaaaaattctattttcaatattgaatgactatctactacaacaagaagttgactttcaatatgttcatttattatatgatccaaataaaaaacaaaaatcaataatacaactatattaagagatattgtttccgaggagaaaatagttaattagaaataccacgtacgtttcgatccatccatattctctagttcaataatatgtattagatataaatctaataattatgttttaaaatgtgaaaatacttttggaaaaacaaatgatacacgtggttaatgagcctcaaatcactttcgttagcttaaaaataaaggtgtgtaggaccaattaatctaacaactcaataattataatatatatgacccatatttattataaatattgtagattcgttatatgtataaaattgtaagaaaaatgtccaaatgcatgcatacaaatctatatatttatatatgagcattgctattaggcaccagtcgtgcctagcatcttctcgacatgtcgtcgcgtagcgattgactagcgatactccctaaaaactattatattgaattatatgggactcgatacttagttggatcaatagcgatattgatacataggagggtgctaggcaccaccggtgccctttaacatttctctttatatatctatatataaat

SEQ ID NO: 309696 - DNA, 551 bp, Cannabis indica
aataaaaactaaaataaaattatcatatgtgacttagcacgtaacatctatctagtatataaatatatggcagaagatgtgtcaaatataattaggctaataattaggtaatttcgtggccaaaatacaaattaaatagttaagtataataatttagaaattacatataatgataaaattattagaatttacttttttatggcataattaaataattcaatagagttatggattttttttttttttacattaatatggacttttttatgttatatttttgtgaaaaaaatagaaatctcatatttgtaaaacaataaaaaatttcaccagaaaccggcgccaaaaaagttaccggaaaagtcgctggtgtcggaaatattggcagaaaaattattgtcgttggaaaagtcatcatcgccgaaaaagtcaccaaaaattcatcgtcgccgaaaaaatcactagaaaagtcatcataagtagatgtctcagatataataattagaacttattttttaacataatgaataaaaaaaataacacaaaataactca

SEQ ID NO: 309697 - DNA, 916 bp, Cannabis indica
tgtagtaaaatttttattttttaattttaaatatgaattaaaatataaaaattgtcaatattattttaagttttcaattttacaaaagttatcaatctgtttatctatttttgttaaatgacaattgttgattgatatattcaataactaattaaatgaatgaagatttagagctggaaaaggaaagagactatagactttacggacgttgatgagccttaattcacgagtcaaagatagagaaaatgaagttctctctctaaaatttgacaagtattttggcttaacatcattgagagagaaagataagagcccctttacctgtgacctctggaagtgtgacgaaggtcgccgagcttcttacggaggatggggagtgggatattcctaaactccagactcattttgattcaggaactgtgcgcgacataatcaaaggaggtaaacctggtggagtaggaggagacatgtgggtatggaaaaaggagcaaaatgggctcttctcaactaaatcggcttacctggttcaggctttgggaagagctcctgactatgtcgttgcgccaggactttggaataaactctggagctccaaaatccaggagcggcataaggtcatgtggtggagcatcttgtcaaatgccctccccattaggggactcctggtgaaaagaatcaacattgacaagctatcgtgtcccctttgtggggcagatgaggaatatatggagcacttgttccttcattgtgattttgcgtaccatctgtggagagcttccctgtggggaatctttcctgtccccgactttgggggcagggtctgggattgggtaacatttatttggaacctgaagacgaaagggtggatacggacaagctgtttctgttgggttttatgccctaaataaaactcttt

SEQ ID NO: 309698 - DNA, 2689 bp, Cannabis indica
atactactatgcctttcgaacttgttttctctgatgtgtggggtccctccttttatagttctagtgaaggctacaaatattacttaagctttgttgatgattttaccaagtttgtttggatttttcccatgaaaaccaaatctgaaaccaccaatctgtttttacagtttaatgcctttgttgaaagacattttcaagccaaaataaaaagcatccaacttgatcttggcaaggaatatgaacctttataccaaacacttaacaatatgggaattttaaaaagaaactcttgtccccacactcaccaacgacaagggagagttgaaaggaaagataggcatgtggttgacatgggtcttactcttcttgcccaagcccacatgcccttatccttttggtgggaagcctttacctctgctgcctatctcataaataggcttcctacacccacaaataacctgctctctccctatgaaaagttgtttcactccaaaccagattacaatatgcttaaagtgtttggctgttcctgttttcccttgctacggccatatgaaaatcacaaggtgtcttttaggtcatccaagtgcttgtttataggctatagcatttcttccaaagggtatcgttgccttcatccaagtggtaggatatatgttgctcgaagtgtcaccttcaatgagcaagaatttccctaccctcatctatttcccacatcacaatctgcatcctcctcactgcctgtagtcattgattctgcagcctatactttcccttacagtacttatgttccaccaagtaccaacagccaagatcatgtctgccaacataatcaagatcctcccactcccacttctgtgtccatactccctgatgtcaactcagccatcaataattcttcatttaacaacacaccaacctctcctcctattgtatctggtgctgacagtaaccccactatcaccattcccacaaatattcaccctatggttactcgatctaaacatggaatatttaaaccaaagtcatatcttgcaagtactaatattgagactgaaccaaagtccctaaaggctgccttagctagtcccatttggaatgcagcaatgtctacagaagttacagctttgaaaagaaagaaaacttgggttcttgtgcctcctacttcagacatgacaattgtccacaacaaatgggtatatcgggttaaattcaacaaggatgggtctgttgatcgacacaaagcccgccttgttgcaaaaggctttcaacaactccctggtattgatttctttgaaacttacagtcctgtgattaaaccttgtactattcgagttatttttactcttgcagcaacatttggctgggatattcagcaagtagacatcaataatgctttcttgaatggtgaacttaaagaagatgtctatatgtatcaaccacaaggtttcattgatccggactacccaaatcatgtttgcaaattgaacaaggctatctatggccttagacaagctcctcgcgcttggtttgataagctcaaaacatctctactgcagtggggttttcacaacagtaaatcggacaccagtttgttctacaccagaaaaagtggccaacttttactcctccttgtgtatgttgatgatattctcatcacaggagaaaacatcacacacatccagcaagtaatcacccagttacatgacagttttgctcttaaaaagctcgggtctgtgagctactttttgggttttgaagttcatcgatcccaggattctattaccttgactcagcaaaaatatacaagagatcttctcaccaacactcagttactggattcaaagccccaaaccacgcctatgtgttctaccactaaattgtctgctacagtcggcaccccaatgcaaaacccaactacatatagaagtgtgataggggcattgcaatatctcaccatgtctagacctgatattgcattccctgtgaataagctcagtcaatttatgcaatccccaacctctgaacattggagcgcttgcaaacgcatcctccgatatcttgcaggcacattggacagaggtttaaccttcaaagctgctacacaacttgacttacaagggtttactgatgccgattgggccggctgttacgatgacagaaaatccacttcagggtactgcatttttcttggaggtaatcttgtcagctggtgttcaaataacaaagtgtgtagcaaggtcaagtaccgagtctgagtatcgtgcacttgctttggcacaactgaactcatatggatacagtccctgctctcagaaattaaaattccagttccaaattgtcccattctgtggtgtgataacttaggagcagggtccttagcctccaatccagtgtttcatgcccgcacaaaacatatcgaaatagacattcacttcgtgcgagacaaagtcctagctcaagaacttgatgttcgatatgtagactcgcaacaccaactcgctgatctcttcacaaagcctctggcagcatctccctttctattttttcgagacaaattaacacttggtcttacccagtgtcatttgaggggggatattggagatgtaggtggttaaatcagttagttagtcttgttaagcttactgtacctaactaacttttgctctgttaagttagttatctgatt

SEQ ID NO: 309699 - DNA, 1643 bp, Cannabis indica
gtttgagtctttttaaactgaagaaaaaatactaaaaaaaagtaaaacatccagctacttttgcgcttgtaaaagtaatttttatcggtgcattacactaatactggtgaaagtgatattttcccgcctattttattaatgcactgacaaaaattacttttactaatgctcttttgtgctaataaaaaatattaaggagctgttatttacacggctagcttgctatgccaacacaaatatgagttgtaatggtaaaaatatattttgccaatagtaaatctcttttatcagcactgttcacaagatgcattgagaaaaatgatttttacccgtacaattatgagttaatacttttgtgagatatataatattgttattggtggaaacacataatgataaacaagatgaggctcttgcatattctcatcttttcttgttaatgtataaaaaattaaaataaaaattaattatataaaataaaataggtgtctatactaaataaacatatataattacatttatatgctgtattattttgaagttttattctagcagcgcttgaatgaaatcttgggtgggtgaaaattaatagtaagttcaacttattttattttaataaaaattatcaaaaacaattaaacatttaataggacgccactaaaatggctgtagcaatttaggctccgttaagaaatatataataatgtcgacaaagatcgagtacttaaatttgaaaagtcaaagtcaattgcttttctcaatgtagtttggtttgtatacactcaggtctacgaagatagctacttgaccccaactaattgccaatcaaaatttggtcgctagttcggagaaactaattgagaacgctattaaagatcgattaataacagtgaaagtctctcatatgtagaacaccacttttgaaaaacaaatacattgaaagtggcctcaattggaatgaatacaaaaacctatctatcaaattgatctagaagaaaacaagaacgtaatgctcagacaccaattaattagtccaagagaatcttgatgatgttgtggatgtgaaatgatgagtagactaaagaccccattaatgaacacacaaaagattgaagtaagtgtgaatggatctcatgcactgacttgactaataacacttgcccatcaaaaaacaaaatgaatgttccactgaactttcctatatagctatagcttacattactatatctatatatatatatatatatatactaagcgagttggccagagtttatatagccacttaattatatctctacttaatattaatattgaagttttcagtagtatattgtcaaagttatagaaattcagatgatgatgaagatttcatcggtagtgttggtggtgatggtggcattattggtggttgcagcgccaatggtgaaagcagtgactacaaatcagtgcaaaaatgagaggactcagttggtgaacgagtgcaggccagtgatatttgggcaagacccctccaacaactgctgccaacgtgtgagggtcatccacgtggagtgcatctgcccctatctcactccaaagtttgctaatctcattaatcttgcacgaacagccaaacaaatccgaagttgtggaagaaacattcc

SEQ ID NO: 309700 - DNA, 1634 bp, Cannabis indica
ctcgtactctctctctctctctctctctctctctctctctctctctctaagttttttttttctggttttctagtttcttatgatattttatgatgtatttgcaatgatagaccaaatatgaagttagggatgcaatttagaaattattagcgatgttttgcatatttagcgatgattttagccatgtatttgtgacatgagaccaaaaaatgcaaagcacattgctaattatcgtaaaaccctgagtgtgagatttagcgatgttgtgattcaacgacatttagcgaggtttaatgatatcgtgaaaacaaaaaaaaaatgcaaaaaatgaatgatgggttgagaacttcaatgatgggtggtaatttcaggggttacagggtagttgagcacatggattttagggcttcaaaatggaggcggcgagacttagttaaagtgagagagtgagagagttaaagagaaaaactttcttgaaatgtaagaatattccacatagctataactttaaagcccaaacctctatccttttcttttccgacaaacatcttcccaagagagataacgtgacccattaatcatcttactacccttccaaagaaaatctctacaaacttgatcaatcttttgaataaccatcttaggaaggataacaatttgagacaaaaaagtaagtaaaaccaaattaatcaatacaattctaccagcaaaagaaagatttctactaatccaaaccttaattcttttggtcattttatcgactaagcactcccactcaacccttgtaatcctcttcgaatagattttcatacccaagttgtaacaccttagtcgtttaggcgtgttaatgtgatttttaacttaattgtgtagctcattacaaatcaatattaaaaatcgtgaataattaaaactttatataactatttataaatatcaaaatattatacttatatatatgaaccgagatcccgtttacaaaatatttataaaagtttcataatgcataatacaaaagttgttacctagcgactatacaaaatacgcccagctgtcccaaataccgtacactcaaggcctaaccgtcccgatatgtcaatcttcatccgctcgctctcagagttgctcaacccaagccttgcccttacctacacatgcaagcaataactgtgagtcgacagtctcagtaagaaaagcataatcagaaacataaacatatattcaaaccgcaaccaggcgcccatacacctaatcataatcatctactaactgagtcatgaaagttctcgacaaagtatgactaactgcaaaagcctatactcagtaccctagtcgtactgatgtggtagcagttagttcatactatctgatagcctagcatacatctattggcatctccgtgcaactctatgtacaaacctcactgatgccctgatatgctattctgaaggttatagatttgcctatcctatatatgttggtatctcggtgcaactctatgtacatctcaccgataccctggtatgttattttgacggcaactaacatgtacgctaaacatgtatacataaatgcaaccattataccaatcttacctcgttttcgaattccggtgtgctggccaacctgagtgg

SEQ ID NO: 309701 - DNA, 3328 bp, Cannabis indica
aatttatggagtaatcattaataaatgagataaaacttttagtgaaatacgagtctagatctacatgtgttaattgacttgtatgatttcaaatatgatagaattttaatgtgcaccatttcagcttgttggtatacttttccttaatacaatccaaataagctctaataaatttagtacaattaagtgtaatgagtattctcactatttactaatatttattatatttatggaggtatgttctataatttttggtatcataatgtagaggaattcttattaataacacacttcttattgctagattgaacatgcatatctttatgagtgatatcatttttcaaattaatgtagtaaagacctttaaatatgtatctaaataaagtttgtaaggaaacttggagcatttcaggataaaattttaataagtttttctttactcttacactcgttattgttgtcttaaaatctcaccttacacatctcgaaaaatcgtgaaatttcatagggaggaagtcaagattgttgtccatcattttttatttggacccgtggagtggaaacatagttttcaagcactaataatcatttttatcgaaatagtgaaaatctcactttttagatagtggtacacctctgtgaaatgtggtccagacccatctcagaatatttttacacggtaggcacaatgaatttgtactactaaatgtagataggtttcgcattaaatttatttaaaatggcccctaattaaaaaatcgaaaatgttcttcttttcagggtaaattgtaacaagctttttacttacttttacacttgttagtgttctcttaaatttacacctacacatctcgaaaaatcgtaaaatttcacagaaaggaagccaagaccattttctatcacttttttatttgacacatatagagaaaacgtagttttcaagcactaataaatatttttatcgaaatagttaaaattttacttttctaatagtggtacccctttgtgaaatatggtttggaccaatctagaaatatttatatccactaggcacaatgaattcatactactaagacatgaatatgtagataggtttagcattaaattttccccttacactagtttgttttatcttaaatcgcaccatatacatcttgaaaaatcgtgaaacttcacaggaatgaagtcaagatcgttgtccatatcttttctattgcacacatggagaggaaatatagttttcaagcactaacaaccatatttattgaaatagtgaaaatctaacttttctaacagtggtactcatttatgaaatgtggttcggaccaatctcgaaatatgtttcccagctaggcacaatgaatttgtactactaaaatgtaaatatttagatagtttatgcattaaattttattaaaatggctcctaatttaataattgaaaataatcttctttattagggtaaattttaataatttttttccttactcttatactcattagtttcctcttaatatctcgctatatacatcttgaaaaatcgtgaaatttgatagaggaagtccagaccgttgtctatcacttttctattggacatgtggagagacaacgtacttttcaagcaccaataatttctcacagtttttttatagtggtactcctttatgaaatgtggcccggaatcatcttggaatatttttccttggtagacagaatgaattcatactactaataagatgtgaatatatagataggtttcatgttatatttgtttaaaatagcaacctaattaaaaatttaaaaatattattatttttcaggataaattttaataagttttttccttactcttacactcatttgttttatcttaaaatcttagcctacacatctcgaataattgtaaaattttacaggaatgaagtcaagactgttgtctacatcttttttatttgcacacgtggacagaaaacgtagttttcaagcattaataatcatatttatcgaatagtgaaaaatcttacttttcttacagtggtaccccctttgtgaaatgtggcccggactcatctcgaaatatttttctcagctacgcacaataaacttgtactactaagacgtgaatatgtacatagtttttgcattgattttttttttaaaaaatgaacttctaatttaaaaatagaaaatgttcttctttttcatgataaattttaacaagtttttttcatactcttacactcgttagtgttctcttaaaatctcaccctacagatctcaaaaaatattaaaaattcaatagggagaaaaccaaaactgttgccaattacttttctattggacacgtggagagaaaacatacttttcaagatcagaatagtaaaaatctcacatttctaatagtggtactcttttatgaaatgtggtgtggacccatctcgaaatattttttcccactaggcacaataaattcgtactactatacatgaagatgtagataagttttgcaataaatttggttaaaagggccccctaattcaaaaactgaaaatattcttcttttaagggtaaattttgacggttttttccttactcttacactcgttaattttctctaaaaatctcaccctacacatctcgaaaaatcatgaaattctacaaggaggaatccaagaccgtcgcttttctatgacatgtggagaggaaacttatttttcaagcactaataatcacttttatagaaatagtaaaaatctcacttttttaatagtggaacccatttgtgaaataagatacggaccaatctagaaatatttttacccactataggcacaatgaattcatactgctaagatatgaatatgttgataggtttagcattaaatctgtcttaaatagcctctcaaaaattaattttttttcttttcaggggaaatttttacaagttttttcttactcttacactcgttagttatctcttaaaatctcaacctacacatttcgaattatcatgaaatttcacagggaggaagccatgactgtcatccatcacttttttattagacgcattaagacaaaacatagttttcaagcactaatattcatttttatcgagatagtgaaaatctcactcttctaatggtggtacccctttatgaaatgtggctcagacccatctcagaatatttttcccgcaaggcacaatgaattcgtactactaagatatgaatatgtagatagattttactttaaatttgtttaaaacctaattcaaaattaataatattcttttcatggtaaatattaacaagttttttccttactctta

SEQ ID NO: 309702 - DNA, 2392 bp, Cannabis indica
ccacctccgatccccaccgccgtcgacagccacaaccccgccgccgaaagggtactctctctctctctctgttaatgttatctacccaattcgagtgctgagaagaattttgtggcagggaatttttgttttatttattttgcagatcgattaatccagttttccggtcgatttgattttttttgagaaaagggttggaatcagattcagacgtgatgggttttttgattacaaccctaatatttgctgtggtgggcataattgcatctcttctggtcagaatctgctgcaacagaaccccttccaccaatttgtatgttctcctgatccaattcaaagttttaatttttcgtctcttttaattcaattgccaagtagggtttcatctgtttcatcatagagtaatgtttagattgtaaattggtcttattaggatttaccagatagaatatgatttgagtgcttcttagtatagtttgaaattttgaagattggggactttgtgttcataaggaatgtagtacatattaaaatttagatatttgagtataattaattgaaatttagatatttgagcataagtctctgtaaagtgaagaactttattataagcatccattagtaaatattgaaatttagatctttgagtgtatgtaattgtaaagtgaagaacttgattataagcatcgattatcattctttccattgttttctctgcaatttggaactgttattgttagcatatttattgatgagtacgagttaaatgtgttcactgctgtttcaaacttatataaatcctccaattatacatgatgtgggatatttctgctgatctacactaagattttcaagtcagttgttgatagggatataaatgagaactgaaatttgtatggctgacagatttttgggttatttaagttgcaaactctttaaatttcttgctcttttggaacaccttgaactcctcagatggctaattttattctttattttggtgcaggcttcacctgacattggttgtcacagcagtagtatgctgttggatgatgtaagttattgcctttttctttgtttatttgagtttctttcattattttgagtatgcattgttagtagctaccactttgttgtttagcaataatgacaccaagctcagactatgataatgtacattatatctctaacttttacactttgtaacaactaactctcaatctaaaattttagtggcaatacttctcagactctattttcgttcgcaaatctaatgattcattgaaaataacatgtggatgatccagctcggcaaataacacagagggttttcaactgaaccttaaattggcaaaatagaaatggagtttgggaggtattgccaccaaaattttaaattgggggtcagttgttactaagtgtaaagattaggagtttagcgatcaataacccttgaatgaaaaaggaaaaaacaacaacaaatttataccaaatcttcaaatgtttctgatccactctttagcagtaaacctggatttgaagcctactattgcattgtttgaaattttaactaacaagtcctctcatttcgtcacacattcttttcccaatctagattttactaagtacttggattggatttcgcttcctctagcttatgcttggagcagagaagaatcgtttgtacagataatgacttattttttcgttttcatatctgtaggtgggcgattgtttacctcgcgcagatgaaaccgctaatagttccaatcctcagtgaaggagagtaaagtgtagacaacacaagattgttacccttcgttgtttcgaactccatgctgagtaatgtgtaattttaaaagagaaattcgactgtaatatttatatatttagtagtgcatttttattaagttgttcattcattctttagaacaagttgatcagtgatgttggtcaatctgggtgtctgttactatgtactctaatttcgagttaagttaaataaaaaggcctatattggagtttcttggctatttaattgggctagtgaaaattaaagcgcagatttttccgtgatataatttcacttaatttattataaatctatgatcgtttatgtttgcaaagtataattcatgattgtttactaattaaaattttcatataaatatatatagaacttctcaattacaataagagataatggtgatgattatgcatatgacacctaaatcatatgacatcataatctcatttttcttcttattattaaaactcaatcactgtgaaaaaatcattggctaaagaaaattggataagtattattttagaccctgtgttttgtaaaagttattaattgaatttttagttttgttaaataccattttggacc

SEQ ID NO: 309703 - DNA, 1439 bp, Cannabis indica
ttaatattagagtattgttattaggtatcagtagtacttaatacttttcttgacatgtcgtgttgcgattgcatggctaccgatacttcctaaaagctattatattaaattacatgggctccgatacttagtttgactaatagcgatattgacacataggatggtgctaaatactgctggtaccatttagcatttctcataatattgtagttcttaataattatttaattaaaatgtaattacaatatgagcattgctataagctaccagtgatgcctagcaccttctcgacatgttacgttgtgattggttagcgatacttcttaaaaactattatattaaattatataggactcgatacttagtcggactaataacgatactgatacataggagggtgctaggcactactagtgccctttttctcatacactaattataagtatgatgattcttttaacatttctctttataaaaatatttaacaaagattagaataaaaggtgggcccacaccgggccatatgatgatgttgatgaaaactatagaagaaaaccatttaaggaagccgatgatgttgttgaaaaatgttattaacacaaacaaatatctattataaagtacagcaatacatatactttttatgttataaatatatatttattctatataaaatatataaaatataattatgtaatagaatttttagttaatttaaatatatttgaaaaaatttaagcctaactttaatatatattatattattatttaatattaatatttttttattaatttttaatattattatatgtatttaaaaataaaaattatgtaaatcattctcttgattcaactaaaaaaattatgtaaatatcttatataataaaaatttaaatttaaaatattataaataatttttattacatttttaattttattaatttaactttaaattaaaataaaagaaaattctgcttaatcggacacacaagaattcatcatgatatcacttgagttttattgtatatatatataaaatacgtgtatatataattacatctaaatgacatattaatatagtcgcaatagctaaaaaaaatcttcaaatattaaaattttaatctctattttaaaaattaaaaaatatattatttaattaaaaaaaattaaacatacatatattacatctaacattacttaattaaacctaattaaaaaaacttattatagattgcacttaacataaaaatatatttgtacatcttagagaagatagattaacaaatgtttacacacaccaacttgggccttgggcctaaattaggataattagtctggtcttagcacatgtagaaattcttccattagtggagttattaatcaaaggattacttatattgggcctggttagtccgacccgattctatgggcctataaat

SEQ ID NO: 309704 - DNA, 3409 bp, Cannabis indica
cccttagttaggggtttggcttccctagattagggcttttgcgtgttatttacccgtatacgtgaatgtgactagggcgtccatctagcgcgaagtattccgttcaggtcggccaacttaagtgaattcaaaaacgaggtaagaatcacatagaacatattgtatatatgcaaatgtatgtatgtgttatatatatgcatgcttgttgtgattcgtacactaccaacactagtacggtagcggtacagagtgcattggtaaagtatacgatgtctgaagagtacactacggtattaccggcactagtacgagtaggtacaaggtgaatgtggcagttgacttaacagtactggggtacgattcataccctacctacactagtataatggtggtactgagtgcatgtggtatagtggaacatggttgtatcttagttaagaacattcttactcatttgttgagccctgtagataggtgtatgagcgcctagatacaaatcgatattatattattcgttacatgcttttcttaccgagtctatcgactcacagtgtctacttccatgtgtaggtaaaggaaaggtgatggctaaataagagtgagttctgagctaggatagtgtttgtacatgtcgagacaacgtgacctagagtatttggtctcaggacatcttggatcttattttgtagtcgctgagcgaccaatttataaatttattttgataatctttgtaaaaattaaaagtacgggatcccggtctatgtaaataaatatatataatttaataaaatttaaagtttatcagagttttaatctagcatgctttttgaggaaaaatcctttggttatttttggtggtatgtaaatggtaaatcactgtagcgcgcctaagtatcagtgcgttacaattttggtattagagctgccaggtttatctaccgaagattgtcaagacatgtacaatcatcatcagagaaaagctcagctcacggttcagtaagcctttacttgtttagtaatttatgtaattagtaaagcatgctaggacgcatagtagtttataattttttattttaatgcattgccttcaaatttataagtgcagtggtaaaattgcaaattgagtcgttgcctgaccagattgacttacgaattgacaggttaatcctatagaatggacacatggtgcaatatggagagttagaacaacatggtcagggctagtaacaattggagagaatggaatctaagttgtctctgtaatcaaggtaaaagccattggagggctttcgatgggagtgatgattatctaccacaggctccattagattttgagcaaaggtcacggagatggaagctataattcagcggcatgaagaggaaattctttttctgaaacaataaaggtctcctgtagtacctttacctcatatgccaatcattttcaatccagaattaccagcggaccagtatatggccggtaaccaagtggaaccattacatgggggaaatcgaatgcaagagtcatcagctttttggggagattcagatgtgaaggacgttttttggactagaaccgtaaagaatttattctaaaacctcatgaggacatgacaaaaggtcgggttaccactcctcttactcttatttatgggggaggtggtagaggttccttgattgaatagaagagggaacctgcatcgatattggtgggttcaagacaaaacaagtgactctaaaggaaccaaggtagaggtgaatgccaggattattcttatcctgggtgctcacgttgtaagaaacatcatcttggacaatgcaaccgaaaagcatgcttctaatgtggcatggttgggcatttcaagaaaacttgccctcaggcaaagaaagataagtagaagctggaagcaaagcctgtacctgctcaggtatttgttatcactcaagctgacctgcagtcagtccttccatggtgacaggtcagcttcttgtcaacaactcttattttactgtgttatttgagtcgggggctatacactcatatgtggcaacatgggtattaaatcacttgggtagaccttgtaactttattgaaagagggtttggaaccctaaagcctagcgaggaaatggttgtctccaaaaggagaattaggtctatgtcagctagagtggaagatacggaattgagtactgacttagtaaagctgaaattagcagaaaatggtaacttttcagtaggagggaaaggatccatttgtttatgtgggatctgtccagggtcttggatcccgattattttagtcttaagggctaaagatttactacatagtggatgtgtgggatttttagtggttgtaattgactacagcagacttgaaacatttgggccttaggtagtcaaggttgtaaaagaatttctcgatgtatttcctgaggagttgcctggattactccctcaacaagaaatagattttgaaattagtttggcacctggtgtgggacttatttcaaaagcgctatataggatggtttcagcagaactcaaggagttaaaaatacaacctcagggaatgctcaatttaaggtgtactcgacccagtgtatcgccttggagagctctagttttgttgtgaaagagaaggatggttcccttgggatgtgtatggacaatcgggaactaaataagttaacaatgaggattatgtatcgattgcccatgatggatgatttgttcaactagctttatggaaagactgtattttcaagaatcgactcgcaacctggtcatcattagctcagaattcgagaagaagacaatcttgagattacattttggaccaagtttagtcattataagttttcgataatatcattcggattgataaatgctctagtggtctctacagatctcatgaacaaggtaatcaaggattttctccataatcgtgttatggtggttatcgatgacatccttgagtactctcagacagatgaggagtaggagcaacatctctgaatcgcaagttgtatgtcatatataaaatgagggaattctggttatcggagatgtcttctctagggcacatttttggaaaaaaaagaatgggaaatcatagttgacacggggaagatcgagttagtgaaaagtttgcctaggccaaaacagtaacgaaagtgtgaaattttttcggtttagtaagatattatcggcatcttgttgaaggattttctaagacctttatgccattaactgggttaactaaagagaatcaacagtttgtatggtttgataagtgtgaagcaagtttttacgagttgaaacaataattgataacaacaccggtgttagctttgccatcaaatcgagaaaagtttgttgtttattgtgaagcatccagacagggtct

SEQ ID NO: 309705 - DNA, 678 bp, Cannabis indica
gtgagatattaagaaactaagaaaaagatgaatgttgattacaattaatgataataaataaaagatttgaacatccacataattattaatatttataacagtatcttttatttatttaatatttaactttcctttttcccacaaaaacacacgagtatctaaatacagtaataatatatggtttatgtatacacgtaacattgattataaaactactttctttttcaaaatagataaataaataaaatccaaagacaataataataatcaatatatataaaagaaattaaatacaacatgcttaatatcttattcgaggggggcctaagctgatgtgatagcttcagaaaaaattaataagtttctttttcgtggtgtttatttgtttgtttaaaatggattgattgatcttccataaaataaaaaaaataaaataaaaagattgattgatcaacaaacaataataaattacaataataaattggtgagcaagtttctattgaaaaatatatattaaaaaataaagagttgttactattttattttctttaataataaaaatacatcttgtattttttaagatgaacataattagttttgtaataatacttaagttttattttaacaaaaaattagttttttttttttagaaatcaaaatcaagttacagcttacaaa

SEQ ID NO: 309706 - DNA, 2658 bp, Cannabis indica
tgtcaatattggtccagtccgatgcacagctgatacatccgatactagtttactttgctaataacctggaaaggacattccacttatacaagtgtaagtaaaacacatctccaattatcacattagtgtaaatccactacattgataaatcgtgggaccaaatagtttgaagcatttaatcatgattattttctactgtgtagataatactacaatcatgaataactatatgttcatgatttaatagaatttatataataaacatataactatgaaagtaatcatgtgaacaatgcagcataacatgatttctgatcttttattaattagtaaatctgattatattgaaataggttttatttagggcataaaatcccaataataacatcaattcaccatttgtgcttaaagttccgaagcattggaacaatcaaaggagatcaaaaaagtgtaggaattttttacaatgtttttaaccaagaccatttcaatggtccaagagagaaatcatgaagaacttggaacatccacctagccaacattgtgggtagtttgagaagaagatgaattagacccacgtgtgggtatggaaagaataattgaacctatggaggagatagaagaggtgtgcatcagtgatgaagattccactaaagtcatcaaagttggaaagaatttacctccagctgctagaaaaagaattgtctctacactaaaagagaatagtgatgtgctagcctagagccattctgacatgactggaattattccagatgtgatttgtcatgctttgaatgtagatcctactgtagaattaatccgtttggagttaagaccattagatccaataagatctgaagtagtgaatgcgaaagtagacaagctaactaacatatagtttcttcgggaagctttatatctattatggctagccaatccagtatttctcccaaagcctaatggaacttggagaatgtgcatagacttcaccgacctaaataaggcttgtccaaaggactattttccacttccacaaatagatcaaattggttgatgctacttcaggataggaacttttgagctttatggatgcatactccacctataactagatcaaaatgcacgtagctgaccaggaacacactagtttccaaactgaaaaacgaatctattgctacatagttatgccattcagtttaaaaaatgttggagccatataccaatgccttgttaacaaggtgttcatagaagatctggggaagaatatgaaagtctatgttgatgacatgctggtgaagtcaaagacctccatgagccataataaagatttagaagaagctttctccatcatctagaaatatggaatgaaattgaacctagaaaagagtaattttggagttttctcaaggaaattcctagggttcattatcagttccagagtaatcaaagtaaacctggaaaagattaaggctcttctagatatgacttcaccccaaaagcataaagatgtgcaaagtttagctgggaggattacaacactcggtagatttgtttccaaatcaacaaacaaatgcatttcgttctttaatgtcctttgtggcaataacaaatttgaatggacagctaagtgtgaagaagccttttaaaaacttaaagaacatttaactaaggccccaatattgtctaaacctgttgaaggggaaccattgtttttgtacctggtagtgtcacatcatgcaataattatcgctttagtgcgagaagaaggaaagttacaacatgttgtatattatgtaagcaagagattgtttggcgcagagtctaggtatccaatgatcgaaaagcttttctattcgttactaattacatcacgaaagttaagaccatattttcaagcccatgccaatagggttttgacaaaccatccctttcgtcagggttgcaaaagccagaatcattcaaaagactcttgaagcgggtaatagaattgagccagttcaacatccattaccagccaagaatatccataaaaggttaagcttttatagactttatttctgaatgcacagggatggacaacaaccctgaagaacccatcctggagctagaagtttagtaaataaatgtagacagagagtgcactctgttttgagtttgaagctttcaacaacgaagcagagcatgaagcaatgattgctagcttataattagctaaagaagttggagccgtgaacattgagctctatagtgattcacagttggtagttaactaaatttctagagaataccaaactaaaggggagaatatagctaattacgtagcaaaatctaaagagctattgcagcattttaagcattactccgtcaagaaaattcccaaagatcgaaatgcctttgcgggtatgctagaaaagttggcaacagatccaaagatagaaaagtatggattagtctccatcgcccatttttctgctccaagcacgataacactaggggtaacaactattgatctatccacttcttggatggctccaatccagaagtatctagaatctggaacacttcaagatgacagagcaacttcatggaaagttcaatacccagccctaagatatgtgctcatggatgggaaattgtataaacaggcaatggcaagtc

SEQ ID NO: 309707 - DNA, 3344 bp, Cannabis indica
attattcatttatcaaataaatgcaaaataaatctcaaaaatatatttcgggcctcgaacctggttcggcccaaaatacccggttgtgactatactgcgctgacttgtcaaaaaatacctgcagatacacagaatacatatactatatagtaatatagtccataagcacgatataacattaaaattacagttttacccttctcaagttaaaataacgaaaaaatacccctagctcgccaacgggatcttaacatgtcatctaacggtataattccatatattaaattataatataatttcacatcaattcacatttaactagttagggtttgctaattcgattccttaattttagagtattacagtattagttaggccacagtcctttagattggcaggagtaaatagatgcttggcagtcctttcaatgtaagaaaggtcgtagaattctccaaggccctgcgagagtcagtgctaagcttgggaatattcttggtcactgcaacaaagaagtaaagcataagcctgcagtaaagagagaaaaataaagcaaaagtaaggaaagtgaatcacgagtttactaatttaaactctgagatgacgccagctggtatgccctctaccatgaaaaatctagaggtcttgatggaaattgtagaaggcatccttaataaacattcgacgtctttagcacttactatcctaaagaaataagtatcagtcattgtggagctatggggattgttgtagaccgaatggaactcttctactaaggggaaatgaccatttgcccatttgaaggcaatggcaaagctcgataaaatgatgtagcagatcggagccaactggagtggagcaatgccaaaataagtcgaaactgcaataagaaatggatgaaggggaagagttgcaccgcacgtaagcagctgatcattaaaggaaactctacaagccgcatgatgagtagctctttccccatcactggcaactaataaacaaaaatgggcattaggtggaatgcagtaagcggccccaatatcatgaagttcataaggtgatagaactggaaacatcagcatgagcaaatgggtccaacaacataggcaagctagggaccaccctcttcttagaaggcatacctacaaacataaggaaatgatggtgagcacgggcttcgaactttcaatttctttcaagaactttgtgagctcgagtcttaatttgagttaatccaacaagggatggagaagaattgaattccatcctacaatcattgggtaagcaaactccagtgaaggaggaagaataggtttctagggaaaggtattctcggtgcaataactcgttctcagtctcagctaacaacatccacctcggggttagtaatttggtcactttgctccctcctaggactgaatatattttagactgaactctttccagatgctccttgtagtttatgatgcatcttaaatggtcgcccctctcaaataacaacctaacatatctctcataaaggtcttcttgaggactttcatagttcaaggaggagatgtaaataaagttggccccaaggggtatttgtccggtattcatggccaactcgaggtggaataacatgacaccttcacctaagaggtataagagggattactaagtttgcttagcgaagaaaatagatagaagggttctatggggcaacatgcaattcgattctgtagtcgtaagaaagacaagactcgcatacataagaaatgagtaaacaattaacaacttcagcagggaaaggaagacttcttttaaggtgctgaaggaaagccaatgagatgcaaagttctgtaagtaggaggtgaaatacctgtaacaaaaaaatatatatataatgatgtgtcaaaacaatcatcctaccaaatgatttatgagattgacaagatctaaggtcactcggcccaagaatgaatgaatgtcactcgaccccaagaacgagtcaaagtcacttggtctcatgatggccaaatgtcactcaaccttgagagtgactaatgtcacttggccccaagagcgacccaaagtcactcagcctcttgaagaccaagtgtcactcgacctcttgaagaccaagtgtcactcaaccttgagagtgactaatctcactcggccttaataatgactaatgtcactcaaccctaagagcgactcaaagtcactcctaaatgtcattcaatcttgagagtgactaatgttattcggcctcaagagcgactcaaagtcactcagcctcttgatgaccaaatatcactcagccttgagagtgactaatctcactcggccttgagagtgactaatgtcactcggcctaaaaagctcaaagttactcagcctcatgatgactaaatgtctcccaacccctagtaaccatggttactcgcaaaagagtgaccaaatgtcactcgggctcatggtgaccaaggtcactcagccaaagagtgaccaaatgtcactcgggccgatggtgaccaaggtcactccacctcatggtgacttaggtcactcgacaaaagaaaagaaaaaagaaattctttttgcccttgaaaaatcaacaaaaaaagagaaaaaggtttagacaaggttcgaacctgggacctcttgccaagaaggattgaccttcaccactagaccaaggaaaaaaatgtgaagtgaagaagagaaagggggagacctcctatatatactaagggcattatcaaagtgcgcatcgagggagaaatttacaaggcatccaaaggacaccctaataactagtcctcaagaacaattaaaagaattctagaagactacgggggtaagtgttaattttagaaattggcacttgtaatttctaaggttagctgaccaaggcatgaagaatgacatgaccaaagtcactcagctcaagagtgactcaatgtcactcatccttgagagtcactaatgtcacctgccccaatagtgactaaaagtcactcgaccccatcatgaacaaatgtcactcggcctcgtcatgaccaaatgtcactcggccttaagagttacaatgtcactcggccataagagtgacaatgtcactcggccttaagagtaacaaatatcactcagccttaagactgacaatgtacctcgaccgtgagagtgacaatgtcactcagccgtgagagtgacaatgtcactcggccttggcattgagaagtcactcagaaaaagcattaagaagtcattcgacaagggaattaacgaatgtcactcggtaatgacttctcaaaaattaattcgacaacctccctagagaagtcactcggcaatgactt

SEQ ID NO: 309708 - DNA, 1127 bp, Cannabis indica
tgatcattaaccatgtcctaggtgagaacactgcctgaggagaaagaatgatggcctacttaagcaagattcaagacttgttaagttagctcaaggggtacaccatttagtaagttcccagagaagaaaacgcaatagccgatgcacttgccagattagctagtagaaccttgacagacaaggccaacatggtgcccatttagttcccgaaagatccaagcatcactatttttttgtgatggataggatgatatttcaagcatcactattttagaagaaatagaaatgttggatgatagtcctatatggacgacaccaataacagtgtaccttaaaacaagagttctgctagaggataggaatgaagcaagaaaaatgaggaggaaagttgcccggtacctcatcttggacggggttatgtatagatgtggcttctcaattccacttctgagatgtgtcaccaaggaagaagttgaacgactattaattgaagtccatgaaggtttctacggaaatcacgttgggggcaaagcctttccgaaaagatactcaaataagggtaattttggcataccatgatcgaggattcaatggactatgttaagaaatgtgacaagtgccaaagattctaaaagatttcaagaggtccaccaaatgagctcgcacaaatgcaatttccttatcccttttgctatatggggtagagacttgatcagacaacttcttaaatgaaaaggagggggtacaatgtgttgtagtcgcagtttactacttcactaaggggatagaagctgagccatactttatttcaagaacatcatatgtcatttcggactccctcggaagattatatatgacaatgggaattagtttgataacaacatattcactgacttctgtattagacacgacattattaaaagcttttccgcagttgcacaccctcaagcaaatgggcatgtagaggctataaacaagaccctcaaagacactatgaaaaagtgtctagaagaggtaaaagacagttggcctgacctcctcccagaggtactttggtcacactggactactgagaagacagccactagacagacaccctttgcattagcctatggctatgaagcaat

SEQ ID NO: 309709 - DNA, 1284 bp, Cannabis indica
tgacttatgaagcaccttgtcactagcatgataggggcccagctgtgtaatctgtggccctaccatgaccatataataataaaacaatgtttatccatacttcttgtgtatgcttctatgttgcctatatgatgactgtgttgcctttgttgggccattgcctgccatttgtctacatgtttacttgtgggttgtggagattagtccttggggacgaattatgttttcttgctcatgcttcttgtatgtactcaacatgtgcggggcatttatcgtgcctaaccgttgagcttgttttcctgcaggcgtgtttaggctaacttgctagctcggtgtgccagcaagtgtcgcacattttttcctacatggagtgtccaaatagtcggcccatggcatctagctatgttggactagaaaactctccaaaatatatttctcgtccaacagagttggacgtgaaaatggaccagtttcaaaaaaattaaataatatatatcacgtccattgtcttttttttagtctagcattgttgaaaatgatgaaattttttcctagtccaacaatggtagactagaaaactccccaaaactttttcatgtccaacaataattttgttggacataaaaaagagacattaaaggggttttctatagtagtgatcatattatttttatcccttacaatttctcctcggttctacaatttttgagctcttggctattaagtctgaactcagatgttatggaaccggttacccaaattttgtgtttggatacaaaacagtttacaatgagattcatgtgaagtatccagttcctaatggtgtcacctttcgaatactaacataaactgaatttgaccaaaagtttgaaagacctcgagatgagggacaaagatcttagtcagaagaaaataaatgtagctttgcacttcccaattcctcctttgttagtgtacatcctatctcttatctgggtgtctatgattcaactactcctaaactttgttcaaactgttttgggtataaccattctttatgctcttaagggaatgatactctttacatcttaattctttgcttgcttctatagaaccacctatgttgctcgctttgtcgcctgatacatatctcttaaaatcccttattacataatttgggatttaccaacctccaacaagggatggtgttaacctaaaaattgaccctagtgacttgaacatcaatgtttgacacgtggaaagaaagaaacatctcagagtggagtagtcctgagtcatagtagt

SEQ ID NO: 309710 - DNA, 864 bp, Cannabis indica
ttgtgtttggaagtgtggaaagtgacgttgggccgttagagagtcttgttcggtatatttttgtatgtcaatagtgagattttattgttaagttttggaaaagaccaactagccttgttactcttttagcttttaaattcaactagggggctaaatggtaatttcattagttaagacttttgtctttttgtaaagttgtatatttaataaaatctgattttatttattattattctttgctttatgtcaaaaaaaaattatatatggtatttgggggaaaaacctagagaaaaccaagtcaccttctccattaagcttgctgaggatttggattttcttagttcaattcagtgagttttaggggaattggaagctttaatcaaaggtataactcttcactttgttttcttggtttttcctttaactcaagttaggtttgaatgcatacttggctaagatgtaggggctgtgtgcaaggggttaatttgatgttatcttctaaagttgtgtagtgattatttaggttgttctaagcttaattggatgactattttgttacttgaatcaaattggagcttatgagctcatgttggaactctaatggtgactttgttttaagagtgatttgttgagttatgttgcttggttttgatccattatagtgcatacaggtattttagaagttattggagagtttcagattaaattgtaatgtggggatcggttttagggttcccagcacagaactggtcgaccggttctggggaaccattagaaccggtcgaccggttggtaccctggaaccgggattccggttgggaaccggtctgccggttggggcctttttccgagccctagtttttc

SEQ ID NO: 309711 - DNA, 765 bp, Cannabis indica
atacatatataaacacttaagtagcatacccaaaaaactccaaaacctacatctcacctactcaattgttcactatctatccccatctcaatcactctctttcacttttaggtggcatttggttggaagaaatgaaattatagaaatatgaatgataatgagaatatgaatagaaatgaatgaaatttaaagtgcataacaaattgataaaaaaaattatcaaaattttcttatcttccattggaatggtcattccttccatttcaaaatagaatagtcatttttccaaaatgatagaatagtcattccattggaatgacattccaatactttaaaatgcaactaaataaaagattgaaataaaaattatttccattctattcgatctattctattttgtttcattacctccaaccaaacgccacattaatatctcacgactctcaatctctcctctcacccttgatttatcctcagatctcatcccctccctttctttctttatctcagtcctatcgcagctagtaggggtgttcatccaatccaatccgcacttttttggtcaaacaacatccaatccgcactacgtgcggatttcataatttggatccaatccgatccgcataacagtttaaatccaatccaatccaatccgcaatagtgcggattggatcgattatttttttaatgataaattatttaatatattatagaaaaaatttttttaaaaaaaaactattgtttcttaatctccaataataatct

SEQ ID NO: 309712 - DNA, 1527 bp, Cannabis indica
atgtgagccatgcaacataaaagtgaattctgatcttatattaattactaaatctgattatattgaaatgggttttatttagggtacaaaacccaacacacccataccgtataatgcattgaactagcaaaaagaacttatgtagagaaattttaacacttaaaataagttacgaagcctgcctctaagtcgtgcgggcatacttcggcttgacaaagtaaatctaaacccttacatgtcaaggccataagaagattggcaggatgatcatatggccgtcgtaaaaggctttaaggctaaataatcgtagtgttcgaaaataaagggcctataggccaaagcaagaatataaaagccttaaggacagatattatatcggttcacatgcatgaagccaaggccctaccacatagccaaaaagaacaggacagagctcctataagggccatgtatcgggctatgactaaagtagagttccttacagatataagccatgttgagtcttcagttgaacattcagctataataaactcaccattaagtttcatacaaagtttctaaggaaaccacgtatgagactaaggttgtataagcctgtaagtttgaattcttgacaaagtcaaaagaggacaaaaaactgaccaccccctcggaaccaccgtgattgccaaggttctcaagtcttgaaggggtcgcctgggtcccatgactcagcgaagaactagtcagggtcaccaaacccagacatgaacatgctagctttatagggtaaaaccctaaagctagccaactcccatgattatgacttagggtcgaccaggtctcaagcaagacctcctaggacaaccaaggtaagtgttgaatcccaatgtatatttttctttcaaaacttgaatatatgcctcgtattctttatgactcaaagagtcaagaatcataacgaaggccagtgtcaaatcttttccatcaaaaagtcacacattaaacattccaaaatttttatgaggatcaatataccaaagggattacaaactaacatgagaattaaaaagtttctaaaagcttaaaaagtttgaaacttgttaatggcaggtacaaaaaagagatacctcagaagagaagatgagacatatatagagagagaagatcaaagatccaaaagcacgccataaaaagccaacacttggctagacaatgttgctcaacaaagactaatacagacaagacgatagttagaaaagtccctttccgaccatatgttcgaacaaggacttgggggaaaattttattccgaattttgtccacctaacgtggcatgtccacataagccaaagatagagtataggtggagtacaatcctgtcagtagcataacagggcctccttgcaagatatagcaaaaccgtcaagcaataactgaatggagtgaagtgagccctcaaggagctgtacaaacatccctggtcgaccaagaaaagcctataggtcggccagggtgagcatgttggaatttattttaccaggatct

SEQ ID NO: 309713 - DNA, 964 bp, Cannabis indica
cgaattttgggtataacaataactaattgtaactagctactagttatataagttgcaattaattaactagtttctcacaactagtaactaattgtatctagttactagttatgtaagttgtaatcaataaactagtttcttagaattagtaactaataactagttactagttatagaagttataactaatcatgttattatattacccattccaaatattgattagtttgtatttttttcttaagaaagcaaacgagcatagtaaaataagatgaagatgaatgggaggataataatggtggcaatgaggatggcgatgatgagaggaatttacaatacaattcgacaagcgatgatgtcttagataattttgtaatcatcgttgaatttgctattatgagatattttatggtatgtttgaaatttattatgtgacattttattcatccttataattctaaagtattatttcaatatagtttttaaggcttatacctcaaggcttatttacgttatgtataaattaattaccacacatatatgaattttactaaaatttaacactttattttaatatttatgtatttttagtgaaatttatcttaattctatcaaaattttagtagcataatgactataatcagacaattttaaaaattttaaacatccaaaatacacaagacaatacaacacaaacaaaatagtattaatatacatataattctaccaatccgatcgcagtacatgtattagcctacttcactacagatgaatatttaagatattcaaattcatctaacatgcatattattccactcattcaatcgcattacagtatatcacagaactacttcactacaaatgaatatttaagatattcaaactcatctacacatgcatattattccacccatccgactgtagtataatatatcacagaacctacttcactacggatgaatat

SEQ ID NO: 309714 - DNA, 1203 bp, Cannabis indica
ctctctctctctctctctctctctccttcaaaactctgtaaaagaaaaaaaaaaaacttttccatcttccttttcaagcccgatgcctcaagctcctccatctctcgaggtttttgattttttccaacaatctgatcattcaccgagcatctacaacgaccttcatcagtgggtaagtcttcgtatctcacttttttattgttttcttgaatttgccattgatgactttaagctttttaaagcttttcgaaatctttgattctcacattgtagtgtagtcttttttacattgtaattttcttgatagctttaggacgtataatgtatgactctatgataaaaaaaaatattggattttaaactccatttagattcttgactctttcagttacagagaacattatttgaatttttgaaaaatagaacgtttgattcttaggagcctctagccagcacacagggtatgttcgtgaccctggccggttcatgcatttaatttaggaccttggctagttcgtgaccatggccttaaaaacctgactggttcatgactttgaaccaaatacttgtccatttcatggcctctgataaacttaggttttcttgtaacttcattggccacttcatcataaacatatttggccagcctatcaaacttggtaacatattcagttatagttatgctaccctgaactagacgtgcaaattcttctacttgagcggcacaatggattcattataatatttctcataaaatattaccctgaatgcgtcccaagtcatggtattcagattatgaccttgagaaattatctcccaccatatctgggcatcatcacgtaacatgtaaatatcacatcgtacccagtcattatctttgactcgcataaagtcaaagatagaagtaatcatactcatccactgttctgccttcagtgggtctgggccacccttaaacaaaggagggttttgtttcctaaactgctcataaattggttccatacaatcccccatattcggtggcactacctgaggtgcctgtataggtgcatgacgagcttgtttctctcttaggtcttgaatttgctcccattgctgcctaatattctctggcatggtagcaaatatttgttcccaattctgaggaggtggaggatgctctccctcaccacctacctgttggaaattattttaccaggatct

SEQ ID NO: 309715 - DNA, 1730 bp, Cannabis indica
ttacgtggatattgcatacacacgatcccactatcggtgtattcagcctcaatcccacgatccttgcattcagcattgatcacacgatctttctatttatgcgcattgtaacgagataggaaactcttcctcctcaagtttccagccctataaatagtgaggaatgttcactgggcaaagggaccgagaaattataagccgaaacgcagtaagctaaggctatctaagaattatatattcaaagatactattgtaaaagctataagaaaaggaaacttcttccttgttcttaagtcaatacaaataacgaggattaggctattaccgaactgctcggggctgaacctctgtaaaatttctatgtctagttattgctttattatatattcttaagtcaacaacaggtattctagaaactttgtggtggattttgggattgattttagagagatatgaagtttttagagtttttgcaagaaaccgattaacccatcctgctggtattgtagaattggttaaccgtttcaccaagtaggacctaggaacatgtttttcgtttggggaatctggtttaccggtttgagcagttttttttttgggggaaaatacttgttattataaattaaactggtaagtcatttacaacaacagagtacaaagatggaggaaaagattccatccaatagcaagtctcatccaaccctaaagcatatctagccaaagtgtgagcggccatattagccgtacgtttgacatgtgatattgatacacccgggagaaaggaaagaagacaagaaatatctataattaaatcattaaaagctgcaatactatgtgatcgaccatataaagcattagtcaccattaaagcatctgtttccacatgaccaatttgtagatcccattgtgacgcccaaaccaaactgtgaaagatagcctttgcctccatttcgtgagaagaaaattttcgaataataggcattgagagtgcagcaatcacctgacctgtgctattgcgtacaacagcaccaactccttttcggtttgtagatgaatccacagctgcatcaacattcatttttagttcacaaaaagatgggggctgtcatgaaatgttagcaggttgtgttggaacagatgaaggagaaacaggatggagttgaggacgatactttaactgggcagatctgtaattggacaggtaattgttagcaaaagaagctaaatgagttgctggtttggcttgttgtccatgaactacccgatttctctctgaccaaatacaccaaagaatacagaaaattgattccatttcggtgactgaatgtagcgtggtaaggtttaaaaaatcacccttgtgcatctgtgtagccatattccagtcaaaatgaaagttcgaagctcgccatactgctctagcgtatttgcacccaaaaaatgcatgaccaatggactcccaagcaagacgacataaggaacatgtggagtccgtaataatttttcttcgcaccaaggaagtagcaacagacagcgcttcatgcaagactttccaaacaaagattttgattttttgtggcagctgcaatttccaaaatacttccaccaggccgtggatgaagttgatggggaggagaggtttgtttcttcaagtgaggtttgatgtttccttgatatttagggtattgtcctactatttatcaatagaaaaacttttagttttgagtttaggt

SEQ ID NO: 309716 - DNA, 632 bp, Cannabis indica
tgtcattatatatttaatattaaaaaataaaataaaaataataaaaatttattacccttaatgacattccttacaaaattagtgggagaagttctccctttcttttctcccttatttaatcaacttctccctttcctaattttaataatgcaagtaaacaaatgtaagggaatgattaccttactattgattctcattacttattagtaaacatgccataaaagaattatgattcccatatataacaataatacgaaatcggttatagaaaataagagcaaaactggttataataaaacaaaaaataataaataactagttaaaaataaccaaacaagtaaacaaacccagttctaaaaaaataacaacataaataacaaaatcagttctgaatacaacaactacaaccaaaagaaactggttctgacaatctaataataattaaaaacaagtttaaacaatgaaatgtaacaaaaataaagacaatataaagaaacaggttctagtgatcatttatactgaaattctaatattacttttccttttaaaatataggtgttgcccctgattttgcccaatgtacgtggaccaaccagacaaggacacgtggatcaagcaatttacaatatttg

SEQ ID NO: 309717 - DNA, 1165 bp, Cannabis indica
gggactgggttgcaatttagacaaaactgagaagaaaaaaatagtcaaataaaaatctcaaaaataaatatataaaatgaacataaaaaacatacaaacaggttattaaggttctgcacaatagtttgaaataagaagtcaattctagtatctattagggtcgggaaaaactgactttttgtctaaaaagatagtgatattgtggttgaaggtgtgcctgctgctcaataaaacaagagaatctgccataataacaatatgagaaattttaccaaattaatttattggtctgtagtgagcaatcatatggttcgttcagtgtaaaatatggttgatatgatttttaacaaattgatttttttctttcactaaaggtctcctaaataaataaatttttagtgatgttctaactgtgagaagactagattttaccacatacagtctatcttaatacatgcccttaaacaggcatgttctggttttgaccatctctaaaatgttttcatttaacaaacttcatctacttgtgagacaaagcatcaaatatgctgcattttcaaaatctaggccaatttgatgaaaacaaattgatcatgttgttgtggactgctaaaaatatgtcaattcatgatcaatatcattattccattaagtaggaaatattatagacatgccttgaaaaagtcaacaaactttggtatgtctttagcagactccgttgtattcattttcttcccttgcttttcagagatgctcagcaaaaattcttttgctcctgcatttatttagatagtgtgccaaagtaaacagccgagaaatttgacatacaaaaaaggaaaaagactgaacctagctgtgcaagcaaaaacatcaacaattttaagcttataacagattccaactaaagtttttccacaaagaaaatacaacttctttaattacttttcaggaatttcaggaaaagttaatctttattgtcaggataaattaagaagtacctttgtccataagcccaatcccaagctttgactggtatatagctctcattgacaaaacaattttgctgtcaattgtttcttccacaagcgtctttgtcctccgatccaatacctaggacaataaaatgttaacaagagacttgaattaacttatttggaaagaaaaa

SEQ ID NO: 309718 - DNA, 3124 bp, Cannabis indica
tcaaaactaaccttggctggccttggaggtcttgcttgagacctgaccggtcctaggacttaatcatgcgagttggccagctttaaggtttcaccctataaagctagtcggttcatgcctaggtttggtgaccttggccaattcttggttgagtcatgggaccctagttgaccctttcaaggcttgggaaccctggccggcctaggccttagttctaagcaggtggccaactttctgtcctcttttgacttcggaaagaatcctatcatggccctgtaggcatatacaaccttagtctcatacgtggttcccttagaaaccctgtatgaaacttaatggggagtctattatagtcaaatattcaacttaagactctgtatgaagcttgtcggccatagggccggccagccccttgaggtggctggtttgtcactcgttgtcttgtttgagtatcgggatcccccgttggctagggtgctaggtagatgacttgacatttttgttggtgagttatactgctacgtggtgctgatattagcacgtagatatgccacgtcagatgggcaaaaattgagataacaatacagtttagagataaaattttatacatatatatatgtgtttgatgtttaatcaataaaatagaaaaaataggaataatatatattaaatgcatataatttatatttacagtttgaagtatttttgtttattagaaatttttatcaatataaaatgtaaaaatttgagaaaattaagaagagaaaaatatttttaaagtaattttaaagcgccatgttaccattttatatctctcctttatatattttttatatatgtatatataggttagaatatatacttttttctccattaatttatacggtttagagataaatttatatatatgtttaatgtttaattaataagaataatttatatattatatgcataataatttatatttacggcttgaagatttttgtttattaaaaaattttatgaataaaaaatgtgaaaatttgagaaaatgataaaataaaggagagaatagaagaatatatttagagtaattttatagtgctatgtcatcgccttatatgtctcttttatatattgaactgaaattcggctacacttcagagagtgacacgtgaaccacatgatataataaaattatatcatttaatgcaaagaaaaagaataactcgttaaataaaggattaatagaaaatatttacaacccactgactacatagtcttaagcgagataaggataaaaggctatgtaacaccatgaaccccagggacgccgcgtgtgtactttttcaaacctatttcttactagtctattagtttaggaaaagtgtggtttaaattaaaaccctttcagattttaaattacaataaaatttccatacaaagtaccattataatatggggatcccttgtttataaaaattcctttataacaaatttacaaaactactattacaaaatcaaggttacattttcaaatatagaaaaaggggtcgatcctacttcctagaagccaagacaccacggctgatatgtacatgagtcatggctgaacacagctcctattctccttacctgctccacgaagcaccagtgagtcacaatgactcagcaagaaaagatactagatagaaatcatggaatgtgctagcagttttcattacaatataatatacatactaataggtcatttcatattcaacaagcatatataacttaacatctatgcgagcacatttattacataattaagaatatttatagttatccataatcaacaatctcatctttccactaaacatacattcgttcaatacataggcacataatctcagttcttcgtaaagcaccctaatcatacatcattataaacactcaatttaagtgcttcataaagcacccaaattcacacattaccataatcacataatctcagtgcttcataaagcactcttaccactcgttatctacgagctatgtatgtcactatcgttgtccgataaagcaaacgataagtaagaaacttatccgtggtttcaacgagtaattactcataacggtaatgactgtatgttttattcatttacaataacggtaatgaccgtgtcttttccccgatcataattgagtcacaaacgatcataatcgtttctcatcacaacctcgaccacagtcgagtcacacatttacatatcattaatcacaatcttaattgagatactaacgattataatcgtttcttatataaccacttagcagtgcataaaacttttcttacctcagtctaaaaattaagcgtgcatgccgacttaagtggaaacaaagcttgacgatcccgggtcctatgtcacgacaacaacattcaataaataccttaaatcaataattctaggaataaccctaattcccataaccagtaaaccttaacttcgattagctcccaaaataggttttgcaacttctaaacaatctactccaaacacgaaaaaatcacctcgagccataaaaccggccctgaagaaaactgacaatttccccctgcagggaaattggccgaccggttctgcttcaccagaaccaatcggtcgaccggttctggcaaggttgcaatcttgagttttctcctccaaactcgaaccaaaactcaaccacacctacccaaccgctccagatcaaactaatattataaacacaacgcacctcaagcatcaatgcgcaacaattcattaattaaaccaatatagcatagtcaaatagaaatttaagcttagaaatcttaaattcctctaactcaaccctaactgagctgattctaacaaagtcaatcttaagcaaactctgattcaagcctagagacttattctaactttagtttaataccccaatcccgaagtcaccaaaaccctaacttatatctaacttggaacttgaataatgttggaattattttaccaggatctagatttactaacaagtatgtttcattaacatcctaataggaatttctaaaactatgaaataaacacatataaagtttaaagaaaccttacattgattgcagcgtaatataatgactccttccatt

SEQ ID NO: 309719 - DNA, 1179 bp, Cannabis indica
tttttttttttttgaacaattaatttaatttaatttttatttttgaaaatagtttaaagagataaagaaataaagtgattattcgttaattaaatggattgaattattgagtaaagtcatttatatagtactcaaattataaaattaagtaattaagtaattaatatacaattttattaattgaaataaagtaattaatatgcaatttaatttattttacttcagttggtgggtattgtatatcgattgaaagtggaaccgaaacactgagagtaacagatataatctgtggcccaagctatggaatcaggtaaatacatattatttaattatttaaatttagatttaataactaatcatgtttatttatttatttatttttatttttttttttttttagcattggaaacttgggttctggaaattctaaagccaatgtcacagatgtgattataaacagagccaagctttttggaactaaatttggtctcaaaattaagactattaaggtaattaattaatatattacatataattttaatttttattaaaatatggaaaaaaaaatattatattgtactaattattattatttttatgttgtttaattaatatgcagggtggttcaggtagtgcaagtaatataaaatttcagaacattgaaatgaattatgttcaaaatcccattgtaatcgaacaaagctattgtgaccaaaatgataaactttgtaaactggtaaaatatatattcttttaaaaaaatttaatttaatatgtttttttttttttgaattatttttatatgtaacgtgtgaaaaatcttaacaggagtcgtcatcgtcatcagatgttgagattagagatgtggttttggaaaatattataggaacaagtgtagcaaaaatggctataaaattggattgtaatgaaagacgttcttgtcaaggaattacattagacaatgttcacttacaatacttcaataaaaaatatggtcatactagagcttggtgtcaaaatgttcaatttgctcactttgaaaatgttgttccaagttgtactcaaccaaagcctgaaccaaacactcagcctaagcctcaacctcaaccccctcaaactcaccctcgaccaaaccctcagcctaagcctcagcctcaacctcaacctcggcccacacct

SEQ ID NO: 309720 - DNA, 680 bp, Cannabis indica
acaaagataaagataaagataaaggagattaaaaaaatatgaaaaaaataataagaaaagaaaaattagaaaaataaaataaaattgattagaaagaaaaaagtagcagggaaaaaaccataggaaaacaaagatgaataaaatcaataaaaatttggaagggaaaaattatgagaaaataattgtttgtaagaaataaaattacaaaaaacccaacttctataaactaaaacaccataaaaagttaaaaaaaataaaagccatattttttattaaaccccttatatataattattttattctttagcctataatatcattttaatatgtgaatgattatacctttttcttttgaacacgtgatttgtttaatataaattaattgtgaattaaacatgaagtatattattttatttatttatttactttagaaaaaaaaaaaccaaattgtattatttatttagatgcaaggaatataatgcaaatggatgtgatccatgattattgtggagttattgagtaatttgtgtacatgcatgatatatgttatttaaatgaaatcatgatatatatttttatatattaaaagtgcctatttaacggtattttttggtttaacagaatatacttaaaaataaaagaatattgtgttaaatttaacgattaggtttgatctcccg

SEQ ID NO: 309721 - DNA, 5255 bp, Cannabis indica
aaagtaaattcagatacttacatgtcaaggcaataagaagatagcaaggattaaagactgcctggtcgatcaaatatccataattttaaagctttagggctaaacattagtaatgttcaaaaatagagtggctataggccaaaagtatgaacatgaaatccctaaggctgaaaataagtagtgttcaaaagtgaaaggccaataagccatacagaacatgaaattaaaatgtctatgaaaataaaatcataagtttgaaatactaataaagtgaagctactcgtgtgcaggtgtagatggagctaagtcggaagctgtaatgtcttgatcaccaaagagtgggtcagccatagcctctataggcgggtcgaccacttggtcaataccctggttgggcacctcctcactgggtttaccgaccattgcctcatcaaactgccctaaatacgatccttctggctggacggtggtctggtctgtctccatcctgctcatatacaactatttcccgtaaccagtgtgcactcaaggaaaggagtccccatgtaggaaagatcaactctggggttgtgcagcttgatctcatagataatctcaaaagacaagctagcatactttttccttatggcttgttggccatcaaggccaagctataattcatcattactcctcccgaattctgtttgtagcctggagacatcacctgcaagtaaagtattctcctggttcctgatggttagcatgcactcaaaatcagaattcttgtccttcttctattggacaagagcctctaagttggtaaggacctcacccctttttagaagctcagcgtcctaggtctttagtttctctcagagagcgcttgaggacccattggatttttcgtgaaaaaagatgagcttcataaatgcctaaaaacaaaataaagtcaagattagtgccagaagacaatacaagccaggcagcccctttatggttctaccagggctggccagcctctcaagaacactacactggctagtaagccttgcacaatagctccttatagttgacagcgttcaacaatattgaaaagtgagcaaagttagatgtgcaacttactaaggtcaacatagcctctccaactctccatcaccaagctctcaaagcttatcgtccacagtgggtaaggctctatccatacgcatgggagctgcctccatggctctgttgtccatggctgaatcgtcccctcagctgggcctctaggcgcccttgctcaaagggtgagtcttcctcaatggagggtcaaggatcatgggtttcctagctggtgcaggcccaggtggagaatgaggaagagaaggtcctccagcatcatcaaaacgagtggtccgagccacattggccctagggccactcgaagtctcatttgagggccctccaactagacctgagtcttgaagccatacctacaaaaagaaagtaacaaagtcagaataaaagttatgaatatgtaatataagatcaaaatagaaaagatggtgcaatcaactaccatcatcgtcagaagaggagtcatctgaatcattagtggctgccttgtccttgcctttagatataagcaaggggcaggtgggcctgatagattgcctctaggcctcatcagcggagtggcgtccccgacggttgccccgtgagccaagcactaacagaaggccctttctctcttctctaaattcttggctatctgggatagaggaacatagttgtccatatcgggagtatgctcgcctcctaggctagcctcctcactagctagggctccatctaacaagcttgatgggcccttagccctcgttgtaatgactgcattttaggatatggattagcaaaggcaattagcgttgagtattgataattatataaatagttattgatttatttaattgttggtcccatttttagaaatgggtattagagttataatttctcgattctagagattttattaaactctagatgttttatttgtattatatatgaaatatgcaatttttataatttttacacggtgatgacggaaaatgcgacggatggccatttaaatcacatgggtaagtttagaacctttttcttagtggagataaacagaatatcaagtttgagtggggttatggattttgaccattttacccccagactttaaattgcttaagttttaggctaaaaatgtattttggtaattttaaatggaggtttaggtggctacatgggagagtggcagctggccactttgtttatttcagcatgggaattaattaattaggtttgatttatcttaggaaaatcaaagaaaaaaaaaagaaattaagaaaatcaagaacttccctttctctttcttccttgctcgaccaccacaagaccagcctagacctgggatttttttctggtgttaattgaggagtgctagctgaattcaatgagtaattactgaaggtaagccctagaaactcttaacttatgaactccttaagttttggttggttttggtatgaaattttgaagtttagtttagggtttgattatagtgttgtttgatttctaagttttatttcagtttgttttgatgtttgttgttggttttgaggttcggtggcatggatgcactaagtttgagtttagaaaacacaagcttggttcatcaatgccactttttgattttgtgtgaatttctaggtttcgttgcttggaatatgttggttgatgttattataggtgttctggaaagtttggtgaaagttggacatgttttggataggttttgaattgtttggggaaacctggtacaaactggttaaccggtttgctaggtcctgtaaaattggctaactagttctaggacttgtctctcgaacaattattttcgtcaatttgtgtccatttcagagccttggttgggtgattccctatttcttagggtattatagtttcagttgtctgtggcagaacctttagttggaggttcgagtttcccagattagggtttcgcgcgtcttatttacctgattatgttatgtggttagggcatccatccagaatgaggttttctgttcaggtcagccaactcacttgaatttagaaacgaggtaagaataaggtaaaacatgtgatttatatatgtgaatgtatgtatgtgtgaaatatatatgcatgattattatgcttagtacactaccaacacttgtacggaggtggtatagagtgcattggtatagtgtacaatgtttaagagtacattattgtgttaccagcacaagtgcaggaaagtacagggtgtgtgtggtatattacttagtgatactcagggtatgaaactaaccctaccaacactcgtacaatgacggtacgtagtgtatatggtacagtggttgtaccctagtaaagaatgttcttgctcatttgttaagccttgtaaataggtgtataggcgcctagatacaactcagtattacattatttgttatatgcttttcttactgagtctctcgactcaattctacttttgtgtgtacgtaaaggaaaggcaaaggctgaataggagtgagcctcaggctaggttgatgttgtacatgccatggcggcgcaacctggagtgttcggtctcgagatatctagggttttatgggttttatttgtagtcgttgtgcgacctgactaaatatgttttgaatattctataaaagtttaattatgggatcctagcttctgtaattatatctataaaagtttataaagtttaataattaaatctaaaattttaattacacacgattttcaaggaaacttctttgattagcaatgattgcactatagttaaaaaaattactatggcgtgcctgagtatcagggcattacactcgtaactctagactcggggggatataggtcgtatgtccgataattggccacgtaggccagcctcagtctattcctcctctctacaaggaggcatagaatatggttcgctctatccctcatttgaaggtaggaatggagtgtttgtaagtgggcacactctaaaagtggtggtggcgaacctactacatatcgtagccaatgaaatagttcctgacatatccccccaccttcgacaaaggcatactgttggtgtcaccaaaccactaatagccaatctgtgtatagtagaagtaccccgtccaattatacttcggagaagacttcaagtcaaaatagtatccaatctcataaggagtaggctgaggtcatcctagctctgcataacgaacaaacattgctaaaaggtacttgatacctttcagtgtgatttatgttgggcacagttcgaattatgtcgcgatgcctctgaagtatgggtgcaaaggcagtactgcccttgctgaatgtggtgctctgaccacgccatccagttgacggacaaccaatgcgctcattggtccctcaatgacacctcacactaaatgcctctcactagtccactctctcttaccttatcaagactcttgaaactaataatagacggaagagacacccaacgatctccctgcactccagaatcgagaacctgaggttcagtagcttatattaaaacatggtctacaccgatcaccgaaggcagaccaagcctattcaaaggtttcctatcaccatcatacgagcctagagggctatttaagaaaacaaaataggtcttgtactgccttctcctagcaggtaaaacctcctcaacctcggactccctctttgggttctcaacaccatggtgggcaacaagaacctctatctagccaacctctggatctccactttcccaaggctatgtggcctcctccactataccgaccctacccattgttgccaacttagcaatgtgagggtcaaaaggtggtgctctacggtaagacaacttagtttcagccaaaatgtatcaatatcaaccttgagatcactcagatagttgctagagaatagattagatgctagctcacaaaggcatgactaattaaacctatgattgagtacttgtgtaacaccctaactattttaggcatgttagcgtgattttttaaataattgtacaactcgttgctaatcaacaagattattgaaaatcgtgattaaataaaattttgctaatttaattaaaaacataacgtagcatacacttaaaatttcgggatcccgtttacaaaaaaaaaaaacatttacaaaagtttaattatacatgtacaaaa

SEQ ID NO: 309722 - DNA, 570 bp, Cannabis indica
ttttttcttttaagaaaatgaaaaaagttattgttccttcagttaaatttctctttcattttttaaaacaacaatatcacttaattaattcgtccgaaatactatttatttagtacaactaaaaatctttgtagaatatcttttacggtctcccccacactaaaataatcgaaccttttaaaaaataaaaaataaaagaaaaaaaatcatattacttaaaataattacatatatcatcttatttattatttattgttaatcataattaaagtgtgaagatacatacatacatacatgcatatgcagtagtgtagtagtactagtaccgtctcaactctcaagactttaaaagccacacacacacacattcaagtggacatttattgacatttcttgggggttctttttggcttatgttaataaatcacccacaccctctctattgcaccccatttcggtatgcttatataaatatcggatatgattttgtcaatgatgtactttaacagaatgtattccgtagtacattagataggtctcagggtacattaaatgagtgtcaggtacgtt

SEQ ID NO: 309723 - DNA, 658 bp, Cannabis indica
tttttctaaataattttttcctagagagagagtggtgcacgagagagagagggaagagggaagagagagagagagaaatacactttcagattttagcttttgttttttaatttttttttttaaaaaaagggtaaaatgggaagttcatgtaattaatggactaaatttgtacaaattataaaggggtataaattttgatataggttgtattattagggtcaaaaattgaaatttccctaagcaaactaccaatatataataaagcttgtcgaaagctcattcacataaaagcttactgaggcttcgtttgatatatattgtattgtattagtattaatattcaatacaatattatgtttggtattaatttatactaataatataaaattatataaattctttataataaactcgacttcaatttcgatcacggtctagactcggacctgaatccaagacccaaaccccgaacctgaaacatgccccaaacacggactctaaccttgtacctgcacccaaaccctggatccgaatccggacctagaatagctccatgtttagaagaagaaaaaaaaagacaattcaaatttaaaattactagggataaattaaaaaatgactcttttatttatcaattaactaaatctacctctaattt

SEQ ID NO: 309724 - DNA, 3965 bp, Cannabis indica
ttagaaattcatattaggatattgctatttcctgtaaggtgcagccctccaaaataatcaaaatatcctcgccctttattgagggaggttgtatccttggattattcaggttattgggttgattatgttcgtttccttgtgtcgtcacatactgccttgaatacccccgcgagattaggttctcgattttgtctttcaattgaaagcagtctttagttgtatgcccaatgtctctatagaaacgacaatacttatttggatcttacttattcattgcatgtctcattgggtctggtctgcaaaatgcgacccgatttttattggcgaggtagatattttcgcgagtctcatttaattcagtatacactgaatgaataggaacacacttttcatgtttcttttgctttttcttattcttggatgagtctcttgattcatcattcctcttggtattcaaaccatttgtatttctactttagtagtcaaagtgcttgttcttgttgtactagggctgggtttatctcccaagtcagactttaacaacttgatttcattctatgcctctttttttgcacaaaaatctatgctcttttgttgaactcataaatatttgtaacaggatgttcttgtaaatcatcccataattctacccctgcagttgacaagtcagttgtaattccaacctgaagggctattaattgaatgttgtcattcaaatttctgactttgactgtagccgtactaaaacgacttaagtacgccttaagagattctcctggtttctgctttaaattagtcaataaagatgcttttggtccccaatctctcgtagcttgaaactactttttgaaatcttttgacaattgctcccaagaagttatgaaatggttggtgaacttgttgaactaactacttgctgctcctattaatgaagttagaaataatatgcatcgtaagttgtttgaaacgttgcttactcgcattattgtattgaaattgctctggtgggcgacaagatcagtggtaccatcatactgtgcgacatgtggatttttaaatccttgaggaaattgtgagtttagaatatcagggtggaatggttttatctcttcatctgaattataccctagtagttttccatactctccattcgggtattgtctaaacttgtcttctaattgtactcgcaactatattggatccacaggccggtgatctatgttttgattgagttggttacgcaaatctggtgcattacggtttaaatgctcgacgtaggtctgactaccttcgtatttaattgttcacggtaggttaggttcacgaacgtctctggtcgtaattactcacggatctagtccttgagtaactttcagattgatactattcaagttactcatacttatcgtgacctatccccaatctcgcttttgttctagagtcctagttgacctactgtgcctgtgcaattttgactcccctgtacttgaaccggtttcacgtgactcatcttgcatcagcttcttctctaaaagagatttgacacacgacctctactcaggtatgtgtatatgttttctctatcattgcgagaaggcctttgtggatgcctcgggggtcgacctgaaccaagttgatttctaacatttctcccatcatgatgagggatttcctggtttcttggtcgtgactgccttgcattttcattcatgcgagatgattatggtatatcaggttgttcattctcctggtttacaaatccatgggaagttcctagaacattgtgtcgatgctcctgatttcttacattgccagtattgggtggattttctccatccaatgggatataccttgtattcccaagttgttcttcctaagtatttgtgggattctcttgattattttcttgcctcctggtcatggaacctcagggccttccctatggtcgccttacagatggatcaagttgagtttgaagagtggttccttgtgtagccctagctcccgcagcctttcgttccaactcaacatttcttcagtttgactcaaccaggcattgtcgaagttgcaagttttctaattccaccagtgggacatatctggtgggatcataggcatcttcactttgcctctctgggatttgttcaccagtaaggttgaaatttccatcgtttcttccaaaacagggggttttagtcgtgttggttttttgtgatccctgaggttcctctctagggcgatgggtggtctcctctggatggatttctttattacgagaagtattatccgccatagatatagatttgtagttgtatctataaggagggtatcttctgagtttttattacaaaggttcttaatgaaagcatcaaactattaatgcaaatttttgttaaccaaacatataaaactttttcgtaatacatctacccaaaattaattatagtaataaatgaacaccaaatatttttacgtgattttgtagttaaaatctacatgttctacgagtccattttactaggatattgtaataccttaagattaagaaaatagattagcaaatcctaactagttaaatgtgtattattctgaaattatattattatataatctattatatgtgaattgatttgatatatgacatgttaagaccctgttggtgagccatgggcatttccgtaattttgacccaagaagggtaaaattgtgaatttaatttaattatgtgcttatgggctatattattatatagtatacctgctttgtcctttttcatatgcgttctgaaaagtcagtgcggtatagtcataactgggtattttgggccgaaccaggttcggggttgaaatacaattttgggattctatattggcatttttattgatgtatgagtaatctaaaattatttatttatacgatatgtgatggaaatgacttaaatacccttgaatgcttatgtgagtgttatatggccctaggggtaaattggtcattttgaccacttaatttactttataacaaaatgaatgcttttgttcaagcccttgaatgcttgaatgcttttgttcaagccctagccgaaccccctttaccctcttcctttctcaattttcttcattttgctattgagtttgtggttttggagcttgggagttagagctttgagtttgagaaggttttgaggtagattttcaccctttgattttgaatattattgctgaagtttgaagttgatttaagtttgaaattgttggttttgctcttgattgtatgtatgaaaatagattgaattatgatgcttttgctatgtctttgaggtagtggggattcaagttaatgttttgattattaaagggacatggactgagttttgttgtgtaaattatgagtttgaatctaatttattgtaagctgaatatatgctttgacgttcaagtttaaaggtgtgtatttgagatgaactttgctcaagtgttgagcttgtatttcatggtaatttaaatctgagatatgaagcttgtatactgtgattttgagccataattttgtatttcaactctatgtatgaatattgatgattttaatttatggtttgagagtttgattaagtttttggcatgaattggtgtgttttggcatgaatttttgagcaggaaaatgcgaattatttgggtttggaacttaggggtcacgaccctgcttttgggcactgcgacccgcctctattttgtggcctgggattcgaacccaggtgtcacggccccatgtgggagtgtcgcaggccgcccccttgtttttgggcagattcgagcgtgttattcgaatccttgtaactttgtgattcggactccatttcaggagttctatgtgtcgttggaaagctcgtttcgagctttatgtgattatctgtattttggatgccaatttttttattatgtgaaaatagatttagggattaatcctat

SEQ ID NO: 309725 - DNA, 1634 bp, Cannabis indica
tgttttgtgaaggacatggaaacaaggaaggtggtaatgcaagggaaacttaaggatggtttgtaccagctggaaggttttacaacaaagtctgaggatactgttagtcagccatgtgttgagtctttcttttctgttttctgccctttttctggtttagtcgagtcttgttctcaacctactgtttctactagtgttagttcctttacacaaaaagacttatggcatagaaggttgggtcatccttcacctaaagtcttaagtcaagtgttaactgttaacaatgtaagaattccaatgaatgaaactctaatgttttgtgaagcttgtcaatatgggaagtcccatgctctaccatttaaaaattcatctaatcgagccactggtgtccttgatctgattcatacagatctttggggcccctctccaattatgtctaatacaaatctaagatattacatccatttcgttgatgattttagtagacatacttggctttaccctttaaaagccaagtccgatgctctaggtgcattcattcaattcaaaaacatggttgagaatcaatttgacagaaaaattaagaaattgcaaaccgattgggggggagaataccaatcttttagcaatttggttatagagaatggcattctcttccaacattcatgccctcacacttctgaacaaaatggccgtgctgaacgaaagcataggcacattgttgaaatgggattaaccctccttgctcaagctaacatgcctctcaaatactggtgtgatgcatttcaaacatctgtgtttcttattaacagattacctacacccgtacttggtggcaaatcacctattgaaactctgtttggtaagaagcctgattacaacttccttaaagtatttggctcagcttgttatccctgtcttaggccctatcagtcacacaaattccaacatcattccatcaaatgtgtcaatctaggatatagtgagttccacaaaggatataaatgtttgagcccaacaggaagagtttatataactcgacatgttgtgtttaatgaaaaggagtttccttttaaaactggtttcctcaataattaccaaaaagagtctgaggttataattcaatctccaaatgcctggtttgaacttccagtgcagcactcgaattcctctcacaccagtcagtccaacaccagtcattccactcactctccttctcttgatcactcactacatggatctgaccttgactctccagctgcttcaaaccattctgagcaagatcaagcagcatcaccatctgaaattccaggctcttcacacacagatcagattgatctctctaacaatctatttgtcgacttggattttgctcgaattgctgctgatagtcaggctgcagatgcacaacataatgcagcagttcatgaacaaagccaaataccagagacagtttcaagagcgagccatcccatggttacaagatcaaaatcaggggtatttaaacccaaagtgttcactggacagaccagatgggaacatcacttaacagaaccaagatcagttcaagaagccctttctcacaaggggtggaacaaagctatgtcagaagaaaatggtgccttgctcagaaa

SEQ ID NO: 309726 - DNA, 665 bp, Cannabis indica
aaaaaaaaggaaaaaagttggacgtgtgtgactattgcttaagtcaccccatcacgttaatcacgtcaatcacgtcgtcgaccattgctatggtataactgttcacgtgcccattttttgcagctttatttcaaattttaagtcaatttttagtattagaaatggtttacgtacatttcttatttttctttttttatataaaaaaatcagttacatcatactagttttagctgtttgtttataaataggaaaattctcattataaataaggaattttagatatttgctttattttttctttttaagggtttatgggtatgggttaggattttattttcttgattagattctcttgagtttattgtaagttttagtgtgtggttttgattatgagtgttttttagtgcatcattttgattttttgttcttttggtggtttggtattatttgatttttgagtgttcttttttttttgatgaatcaacgagattatcattgctccaataaccaattacaacttaaacatcatctcaaaagtgagacctgaaatatccatgtacaacaagtataagtgttctattacaaactttcgaaccatattctatttgaagcactaacttttttaggccaaacacttttgattctatacaatatttttgtttttg

SEQ ID NO: 309727 - DNA, 2303 bp, Cannabis indica
tgatacatactacagttctcttcaagagatgaagaattttcaagaggcattacagacaaaattgaggttggcaaaaaagcctttgttgatttctaagctgatttacttggctctaaaatgtcaaataggaaaattattaatgttaagattgtccaataggggagcattgtaacagagagataggagactcctatttttaagtaggccttatactaaataggaagttagaatggccgtgttttctattttggattcaaaatctctgagaccaaatggtttgaataatacattctttaagagaacatggagcattggttttaaggattcactgcagctataatttctttttaaatactaaagagctattgaaagaaataaacaacattaatttgccattggtgtcgaaggttaaatgctctgacactgttgcatatttctggcccatttcatgttgcaatgtactgtataaaaatacaacaaaggtagtccattctagacttataattattcttcttcacttaatcacttagagtcaaggattgtttgttcatgggagattcattccgcacaacataatagtttgtcaagacattgtcaaacattataggaggaagaattgtaggccttcttgcataaagaaaatggacataaagaaagcctatgatactattgactggagatttatcgaagagatgctaagggccttgaaatttgaagaacagtttattaagttggtgatgatggtttgtattcaaacacctaagctttccatattcttcaatggatatttacatggttactttgattctaagcgtggttgaatacaaggtgatctgatatcctccttttgtttgtattggatatggaataattaggtagactattggctaaactagcaacatggaataatttttaattccagcataggtgtggaggattgaagttaacaaatatttgtttcactaatgacatattgctttctatcatggtgatgtgaaatcctttatgctacttctccaaagttttaaatggttctcaattacattagtgctacacgaaaatgcaattaaaaccgtggtatactatataggaatggtctaccaagatgtccaatagattctcgtttcttccagtttcagtcatagtaagttgccatttaaatgtttgggagttcctatttgtgttaagaggacagctaatgctaaatataaggtgttggttgagaagatggtagcctgaatttgtctctggagcacaaagcatctgtcatgagcaggaatagttgttcatgtcaactcaattcttatgggtattcacacctattgggcccaagatatgattcttccaaaagaaaggtttcacaagtcatagataaaatttgtagagagtttttataggaatggggcaggggtataaagctactagaataaaagcttggaacgtagtctgtaaatcaaaaagttagggtggtttgagttttaggtgtttagaggactagaatattggagtaatagggaaacatgtgtggaccttagctcagaagaaagataatctatagccgaagtgggctcatgaagtgtatatgaaagatcaaaaatactggtgggagtatactctccaacaagacaacaactagtattgtgcaaaaagaatacaggtgagagatgtactcaagaacttctacactaaacaccaactagaaaggcaacagtattccatacaacaaatatgtgatgttattgcacaaagatcaacagagtaattggtttgttgtcaagatatggaataggtatagtattctaaaacatagaatggtgacttggttggcagcttggaacaacttgaaaataggggatacgctgctacagcatggggtccaagacccagcagcttgcttggaacggagcaggaaacacatgagcatctcttctctagatgcacctacaataaatagtgtgtttctaagctattaacataggttggaattggctccaatcagcttcaattcaaatgtgttttgaattggatctaaaggtgtaaataaagcaagttgaggaaaggaattcttgtcatggtttttaatgcttatatatcttattcggagagtgaagaacaaggctttatgggataatgaagttcaaacaataggaagtttcatctaatgggtaaagtatacagtaagtttaagaattacatgtttaaaaattgtacatataagtgatatgtatagaagatggcttgacaaaaatgttaaatttttttgttttgtggtgtgtgatgtttgtcctattgagggaactcct

SEQ ID NO: 309728 - DNA, 1550 bp, Cannabis indica
gtaaaataatttccaacaggctcgacctgctctagatcctgctcgcagagaaattgccaaagctctaggtagcttgccagttcaagatcgcaattagcgattgttgtgtacaactgcaggactacgagaacacaagcttatacctaagaaggccagccttcagcgagaaccagtgtacaataagccttttgagaaacaaaaggaaagaatagacaatcgtctatctaaacaaacatcaagaccaacatcaggtaatacattaagtatatacatgtttttttatagaataaaagttatacttatcttatggcttcctcgcagaaatgacgttcctgaagcaggctcctattcacaactgaaagcctaaggctagaactgcgacaacatctcgtgtcatccagcagaagaggaggagtgaggttgtcacgactcctttggtcgactcctctaagaaacagttcaaactttctcaagaaaaatggaagacggtcatgattgaccccgctgttagggcttacaacatcataactctccaagacaacttcgtgagtgatgagttcgtgttcaaggtcgagggagttcctgccgagaaattgttgttgcgctccacagagctctccttgcagtttatgaccatgttctcgaaggttttcttcgcaggtaccaaggaggtcgatttcttgaggaagcaaaacactcttctttaagagaatgtgaagaaattgaagttggacatgacttcaaatgagaaagatgtcgaggacctcaagaacgataaggagcaggcagaggaaaaggctaagtaggtggaggacaacgccaagctcttggaatcgtgagttgagtaattgactcgtgatcttgaggagaatcggaagaaaaagtacgatcaggctgtttttgactacatttacatgactttgtccaaattgcttgacttccactttatagtccttggactgaaagcagctaaaatagctaaggcttttcgtgctatgtggcctacccaaactaaaggatgtgggggaaaccttttccatgaggagcccgagaatatagatgctgaggaagtcgctgatggtgctgcaagcaaggtcgtagatgattcatcactccagctccttaattttttctaagttctttttattattgtcgaactttaatttcttttttttttgttagtggtacacgggtactcgcactttgtacttcaaaaaaattttatttattttgttatcgaacactatatcctttcgaggatatttactctttcatatttattaagcggtacatgggtacttgcataattaaactgctcttttgatagttgtttctattcgcaatatttttatcatcattacaactaggtgtaataacttagaaaaagcatgcgaagaagataaaaatctctaaaaaattctagaaacttcaaaatatttattatcataatcaatagtacactatcaggtcataccccctagacttagtacgtttattgaaataaattgactaagtataaatacatgtgagtactattgatagtaatactt

SEQ ID NO: 309729 - DNA, 432 bp, Cannabis indica
agatcctggtaaaataaattccaacagtctggtgtcaggtggtcccttgtagcggaagggtggttgcaggcatatggtccccagtagtaggttgcaggagagaggttgcagcgtacccttggtcgggtcctcaggtctcgcaggtccattgtcgccactactcgtacctccttgctctcagtttttaaaaggcatgattatacgctcttcccttgcacgccttgtcctttgattaattttccattgccattcttgttgatatggattcacatctctccttactctcaccgcccccagaacacactcatacaacacacacaacagctcgcatgcgaggcctgttgggttttgtgccctaaataaaaccaatttcaatataatcagatttacttattagtaaagaactgaaataacattttatgttgcatggtt

SEQ ID NO: 309730 - DNA, 1499 bp, Cannabis indica
aagtaaatataacattttttagtttatttctaacttttttttaaaaaaaatagttaattttatatttttattgaattttaattattttttttaaggtatgaatttgtaattataaataagtttaatcttttcttttaaaaaatctttagttttttacaaaatatttattagattttcaataattttagtttgattttataagattacgtatttataaataaaataatatttaaaaatattttttttaagaataatttagaattttttgagtaaacttaatatttttaaataatttaatactttgtcaagttttttgtagtatattataatttttaaaattaatatctttttttaataaaatggggtaaaattatatatttttcaaaatttagaggataaaaatactaacggtaaaagaaacagaacctaacagaagggacataattatataacaatcagatagtatcgaaaattcatagacaaaaatactattattctttcatttaattgtactggtaataattttaaattagaaaggacctcattttttaaatctaagctaaatcaattttatttttccattatttttttttaaccacttcttttgaatttttcattattcattggggaaaggaaaggaaacaaacatgtttgccaatactttttttttttttgaatttgtaacttcattaattaaccaaataagtacaaacttaaaaacaaactcagttggaatatgtgcattccaaactctctttctccgaagtcctaggaatctcttaactaattagttatataccatattatacgttgctaataatttatgattaaaaatgataatgggtatgcaacattttgttttgacaaaaggttattaatgatagagtttaagcaaactaggcgaagcattccagtgtcgtaacacatacaaaaaatttgtactaaaatttaatcatgagtcttcttttcgttgttgcttctttttttcttttgagaggacaccacggaattgatattttcatttccagtacaacgcaatcaaaatgcttaatggcctaattcaatgtgataggtacatgaaaacattgggaaaaaaaaaattcaaagtatttgactttatttatttatttttcaaaattttaaaattaaagatctgtttgttgtattgtatgtagttttgtaggttagtgtactcaaaaatcagaacagaaatttttaagttatactcgctcgctagattggcgagaatgaaatatttgttaagtataaataaagagatgcacaataatagttcacttcttatatcgcgataataatagagctacgtctacttcgagtttttattctcgcaagatggtaattacagaaaaatgattaagtgtttaagctttaatttttaaagagagaaactaacagagatggtctgaccttataattacctttctcaatatgaaaaatgagctagaggtccttgaaaataggaataaaataataaaaaa

SEQ ID NO: 309731 - DNA, 1237 bp, Cannabis indica
atattcctagtcgatgcaaaatggaaatacatggcctatactgtgggtatcttcggggttaggtggatataatcctttatcccttcttgagtgatgtgatctctcataaagtagccgtcactagccttattaatcatagcgtaataactgcaaaagaggggttacgtcgtcaaacttattgcttatggcagttccaatacgttttctcacatgcggcattaaatgagaggtgactgttcaaataaggtcctgttcctcctggagataccttagcgtttccctggtctccgggagtatgtggagccttcacctctcctccggagggcatattctcgttggcactcctgatgccaaaaatacttagtcgatttatctaatggtcgtgcttcttagacccacgtgtcgttgtcatattggtccacgtattttgggcgaagttaagggcaacaggttctataaacgctcaatttgaaaggacacttgctttctatataaaggagtgatctaagttaaataaactaagcaggaattacttgcaacagtggactgagcagaccgtgatctgactcaaccactatattcccttgtgttctttgtattttccagttgttattattttgttagtctattctcgaatactcgctactctaagtgggcttcgtagttttcttgttcattttatttattgtttatacgtaattaggtgttgtcaatatttctctgacaataacactgtccctgatcgagacagattgtcttcagcttgtttagaatatcaagcacaagtggaaagactgctcatcattgtcagatttagttttaaacattgttggtgccttatcttcttttcctaatgtatctctcatacatgtttcgaggaataaaaatgtattagcccacaatttagctagagattcattaggcctagataagaagtgggttgggagagtagtttcccatacctaagtcttgtattgtaacttttattgcctttagggtatgtttggtttataggaatgggaattctaatggtaatcaatatgtccattattttgtttgttttctttattttttctaaattttgtaatccattacattgtaatggttattacattgtatattgtaatcctcattacaatgaaaaactattgtaatggttattacaattacaatccattacaaaattaatataatattataataaaaaaaagagcagtgctaagaacactctctatca

SEQ ID NO: 309732 - DNA, 598 bp, Cannabis indica
attttgttgttatattattggttgcaagtgaagtttgtggggccgtttaatgtggatacatatacatgtgattactccatctgtgagaaagggtacacccgtgtgtcctttaattaatgttttaattggaacatgtcgtgtgttcagtaatttgtagaaataatttaatttgataattaaataagggttttgttggcaaaatgatatttcatggagagattttcttgaatctcaatgtttccttgattgaaaccctgtttctatttgtcattccatttttatttaaatcatatcaagttaatttggagtttgttgttcttgtttgttggtgttttgaattccgttgctagttatattaattttactattttttaaccttcaccttgaaaccatttgaaatttttaggacttcatcccagcaacaaaatttgaaatgtttcaactactaataaactcattaaaactagaaatcctatacaattgataaaaaaacccacaattttcaaattaaaattccagaatcaactaacgaaaaattagaaatggtcctttcaaaaaaagaaaatgaaaaaagaaaaaagagaaaatagtgggcaag

SEQ ID NO: 309733 - DNA, 546 bp, Cannabis indica
tttcttatacttgcaatgaagagcacatgttttcacaaattgacacaactatgcattgatgctcttaatatgatgggtgatggcatgttttcacaataatgtcgaaggtctttgtcattgcaacaatatagtttagatgcggtggtgtttcatgagctatgctttactagcatttgcattatgtcaatagtttgctctggtatcttatccccacttgaatcacgagaccttaattctctcctctctctctcattttttttgcaggttggttcaatttatagactcttatgatccaccattaaaagggttgcaagaagacttaaattttgtgagcccgcgtattggagaggtttgtcccattctttacatatggtctaaatcaggattaagtttttataatattatagataatattaccaatattacctgctatgcaaaaatgttggtgaaatttttctttgtatatgcataaaaaagctattataaaactcaaaaacactttaggccacttacaaattaatctctagtggttgggtcgttggtcgt

SEQ ID NO: 309734 - DNA, 1411 bp, Cannabis indica
atatacttaagagcaatattactcatgttaaatagataaatgctaaagaatattttattctccactagttgcctgatttgtaggactttgttttcctttaaatatatatatatatatattttagtgttttttatatatttacttttaatttaattcaaatatttatattaagcatattctatgattataattaacaatagtataacactatataggcgatctctcttggaagatttttgtgactagtatatcctatggacatgcatgcctatattaattaacattttcactttattatatagtcagtcatgcctaattatgtttcactttaatatatatataaaatatttagtactactgactcccattaaatttagacaagtgtggggtttcacaagtaccttgttccaacttgcttagagctttttcataatttttggctagctatgattactatcactagactggtacatgtaactatattatatctatatacacacatttatatagtagcagaagaaaagttgcaaactaggccaataatcaggtaattatttgttttgacaagtcaatgtttgacatattatctttttggtcctcgactcaagagatactacttgtatggattcttcttaatatcttttagctaagagatactaacgtttttgggttaatttatgtatgtattaatgtacgtaggtaacatttaatttaaattcattagctcaaatagtatttgataattgtgacttaatttgttaatttatataagaggacataggtctagctagtttaaattctaaaaatgtattacatctcatatgtgagtgtagtaattaatccacggctcttataaattgtataatgatattatcatatgtatgcattttaaataatttatggtattaaaaatcaggttcgaattaaaccgttaataacatgacttttcggctcaacaccagtaccatcaccaccaactgggttactctttgccaccacaaatggcggagccagctgagaaaattatggggggccaatatatgtcataaaaataataaaaaatttttatttttaattattttttacattcatatttaaaaaattaaaaaatttgggggccgggttaaggctaggactccccggcccccttagcttaccaccattttaacttatgttttttttctttatgtatatatatgtataaatgttatgattgagtatatatattcattatattgggtagttttcttgtattactcttgcaatttcttggtcttgaggaagatatgtagagtaaaatgaaaatattttttcttagttgttttaatttgctttagttttagggtttttttttcagttttaaccaaaaaatataacaatattacaaaaatacttctagctggccaaataa

SEQ ID NO: 309735 - DNA, 1266 bp, Cannabis indica
tagttcagagggaatttttaacgtcaaaaaaagttcagcggaaaaaattactaaaagtaaagtataagtcttaaaaacatattttacattaatttttaataaaggtagagtgccttacttaattataggggtattatctcccttaaaaaataattaagaaaacacaattaagtcgataaaaaatattagtttgaggtttaattctaataaagtttaattggggcaaaacttttaatagttttatttgtttgcaattaataatcaaaatttaaattttggcggcaaaactcctaaaactacaatactgttagcaagttacaatttccatccaaatttagctttaactgtcatgttggattgtaattgtggacacagtatatacgtggcacaattttattagtccacgtaaataattatattaaaaaaaattaaaataaaaaatataaaagatatatattttttttctaaccatatcatattttcctaaaaaaaaaatatttttttctctaatattttcttttattctttttctttagttatatactgtcaccaccaccaccatctatagtcaccgtaaacaccaccacccaccactaccgaaaccactgtcatccatagccaccataaaccccccactatcaaaactatcaccacaacctattttcaaatccatatcacaaaaaaaaaattaaacaaaactcaaaccaaacttaaactaaatttaaacaaatccaaatccaacaaacaaataaacacacacgaatatctacagaaaatctcagtcctaaaactcaaatttgaaaatcttaaatttatttctcccacaactattatcctttctcatatctgaaaacaaagaacacaataatacccaaataggtatatctacacacagatataccaagaagattgcaaaaaaaaaaaatgaaaaccctaaatctaaagagagagaaagagagagaggagatcaggacagagagagagagagagatagacaggtgatcgagatttacttggcccggtggtccttgataatggcgcttgactcggtggtcctcgaaaacggcgatggcacttgagtcgtgaaaaatatggtacctggatcatcgagagagaaagagaagaaggctgagagagagagaggatcgagacttacctgggtcggtggtcctcggcaacgacgaagcttggctcggtggtcctcgacgacgacagttgggtggtggtcttgggtatacttgcataatcgagagagagagagagaga

SEQ ID NO: 309736 - DNA, 1244 bp, Cannabis indica
catacgagcaatcaaaaatatacaaagtgataaattattaaaagtatattcaagtttgcttaaggcagaattgacaactactcgaaaatcaaaaagtttggtagatagctaattacttaaataagaagattacgagcaatggaaaaatccaaaagtactttacatttgatcaaaatatagttttttacattgtgaataaaaatgcaagcaaacgcaattatattaagttcgaacaaaaagagtacaagaaatttaagataagagaaaatccaagttggtttacaaacttgtctttacaaaaatgccactacgggcaaaccattaagccattttcctaaacaaagaatacaaggttattcatggggggttgatgaactcgagaaagaccgtttacacatagctcgagaaagaccgtctacacgtaaaaggtctcgacctttgcatagaccttattctccacatcagaagatcccatttcctgcagccgagacctcattcccagtctcaagaaatttttcaacaccaaagagtggctggtccaaaggtcttcttgtgcaagcttggggcttgggccagttgggttctttagtagaatccatgacctcgcctactgggattatcttcttcctagattccttgtcagcttgaacttgctcattctatgtccattcctgtagaaacagaaataaaagatcaatggagcaacaaaaaatatatgataatctagatcagaccaccatttgcttttagattcgcccgtaacgattgactgcgtccccatgcttttagattgatcagaagctccttagtcttagaatccttcgtttccaatttaaattgaggcttgaagtttttgggaacgtatgaagaggaaaaatggttgatatattctggtgttttgagttttgaggaataagtttctgaacttggatgggacatcttagcaagagaatgacaagccaattttgtggatgaaacttaccaaaaattaggagtttatggaatatgacagaccgaaaccaccattttatactcaaaatccagtaatggaaaggccaaaggttgggaaatccgacggtggggagtgaggcagaagatgaaaagacggtactaataatgacccttgaaaccgtacaaccgctaaaatcaaaggatgcatttttccaagagggattgtgacgaaaatgccctccgtaatattaaaaagcacttttactaaaaagacttttaaagggcaattgtta

SEQ ID NO: 309737 - DNA, 1435 bp, Cannabis indica
gtaataaataaaagatttggacatccacataattattaatatttataacaattagtaaaaagataatatagccaaatcatgaactttattattaaatatatcaaattccatttattataaaaagattaaaaaatatattttaaaaaattattactccacataaatatatattaccttatataactttgattagaaaactaatatttaaaaagtaatgcaaaatagacgttggaaagaagttatgtttattatgtaataataataaggtactcatgtgaatatgactatagttatataattatatatataaaaatgtataatgttgcacactattggcatggctccatatgagatgctttatggaaggaagtgtcattcacccattcattaggatgaagccggtgaacataggtatcttggacccgaggctgtccaaagaacgagtgaggccattgaaaagatttgagcccatatgcttgcctcacagagtagacagaaaagctacgcagatccaaaacgtagagatattaaatttggattttttttttcctttgggtatctccaatgaaggaaattcggaggtttggaaagaggagaaagttgagtcccaaaattataagcccattcaagattcttgagagagtaggtcagatcaaacaggaatgcaatttttatcaaatttatttgatgtgatgcagattttttttgttttttttaagcaaactcacatatgcattttgaaataaaaaacttattaattaactttaaataaaccttattttttcaataaaattattaaaagaaaaaaaagggcaaacaaacaaacacaacatcaccctcactatttcaactccccaaaccaaaatatcgccttgtaggcccttggtgggcgcgcttaggcatcggcaatcaactcgcaggatgtagatttgttccactccaattgacaagcttaagcttcagtgccatcagctcttgtttattgattttcttctcagatttatttgtttaaattaatgaaatttttgtgaaacgaattagcaagaatccgtaaagtgaaaatgggttttagatgagtttacaaggatcaatgagttttactgatttgggtttaaattagtcccctaaaccaacaacataataaatagagtaatttgcggcaaaacccccttaactatcaatttacttgcaaaaaaccatccaacctcatattttggtgggaaaaccctccaaagtactattctgtttacattttaagatgacgtctgtccagctcataattttgcccacgtggcaatgacaagtcactaaaaaattatcctatgtggccatattttacaaaataaaaataaaactttaagagtaatttgcggcaaaactcccccaactatcaatttacttgcaaaaaaccatctaaaaaactttaaggttggat

SEQ ID NO: 309738 - DNA, 1001 bp, Cannabis indica
tattaataagtaaatctgattatattgaaatgagttttattaagggcataaaacccaacagccattgcaccaactcgaacccagtcgagtttgattcctctttgtgtacgtgcatggtattgcatggagcccatgcacatgtaaaaaaaattaacgtaactcacttttgagcctcatggcttgtcgctgcagcccctcgcagttcatggcttgtcatttgagcttcaaaagtcttcatctcaatgatgttggggtttactacttcaacccgaggtcactcagcaatggaggatttgtggaattttgatgttacattatttgacaaaatttacaaataaatttgaaataaaaaattatatcaaaacctataccacaagtatggtgtacaatttttctattaaaactataaaattcctaacacaaatttaccatataattaacaattcacattcatgcataaacattaattccatccattcacaatatatcaacatatatatatatatatatataaatacataattacccaacatagtatttaatctatataattataaagatagctctaatactaattgttagtttttatgatccatatcagagttagaaaagcggaagaacaatttgataaaaatagttctattcaatatgaaccataatctcaaggatctaaacatgattagtatagattaaatctaatgtactgaaagaaaaaaatatcatggtatccttgaagcctatcatggtatccttgtttctttttgtataacaatcgaacatccaatccaagaacatgattgaagaatccacaccttgatcttccaagtaagcctcaacaatcaaaaatagagtgggctattaggccttattggatgaaaaaatttaggtatcaaagtgtgtactcaactcatgagatactgtgttgagattaggttttagatctcacacacacttgagttggtgtgatttcgtgtgagatgaagagagagaaagagagagag

SEQ ID NO: 309739 - DNA, 1117 bp, Cannabis indica
cccaaataaaagtctaacattgggtactactggtaactaataataatactcgtgtttttagtagagttctttaaatattttaaagtattttagttttagagaagttattataagttttctaagacatctaattacaatctagattaagaatatcataagtgggtccgagtgagatggcgagagagaaaaaaaattacgtctctgcagtagttggatggatgccaaaacttgacacacgctgccaacacaaaaattatatatttaattattttaaaacaaaaattttgattggttgttattaatggtaggaccacttggtattatttttgagtgatatcattggagatgtttttagaccatttatagtgtaagatgtaaatattatactaggttttccacaaataaataaaaaattattatatttagtacaacatttcaaattgtactctaatggacgacaacattttaagatgtaaattcctctaaaaaacaaaacatcattaataattattaataaaataaatatttaaaaattattaataataatactgtacttaaaaaatatgtattacaccgatcattaataattgagcattgttattggacatcactggtatccaataccttttataggaggcaccttataattagttagcaatattttttaaaaattattttcttaagttatatgagattcgatacttaattacatgtggtatgacatcgaggagagtgctagctagacacgagtggtgccttttagcattttcttaataaataatgacaaaattgtaattaaaagtagtatttattgtgtgtcaaatttgacataatgttatgtcttgtgctaaatttagtccaacttgtaacatgtgtcaaatttagcaattacacaccattaatggagaaatcttttattaaaaagtacaaaaatgaatacactatctatttagcacttcattagaaatgatctaagtgtatcacacatgtcaaattgtgtcaaatatttagcatacaatgtagcatgattagggatgcacacggtgcggaaaattagcggggagtgctctcctgtccccattcccgttaaggattttaattctcatcctcgcttatt

SEQ ID NO: 309740 - DNA, 839 bp, Cannabis indica
aagatataattaaaaattccccaaaaaaaaatgaagagggagttaataacattgatgataataaattctgaataagaagaagaagaagagtgattgaaattggaccaccatgacataaagtttgcgtcacacttttattttgtttctctcactttctttgcactttgtaacaaattgatattgatgtagagttgtggagcactttctatgagaagaaaccaaaaaaaaaattgaagtcctttcttgaattgggttttgacatgtaatgctcttagtttgattgaatagttgaggggaataacaaacgttctagttcaacctccatttgatttggtcaaccatacaacatacatttatagatacatatgcactggctactaatgccctcgagtcaatctagttaggaatttagattgagatggccaagagaagaaaaaaagagagagaaatctttggccgtatgggtcaatagcgacttgaaaagatacggggatatattacaatcatgaattaaccccaaaagacgtaataatagtagccattgtggggttttaaaaatcttagcacttgtgattcttttgggtgtgtttattttgttggagagggagagagaaagagagagagaggtgtgtgtagataggcccatcctacgagagaggaaagggcatttataatgggtttggcacaatgccatgtaattgcaagtgatgggtaactttgctatggccatccattaacagccagatccactaaatatttcttcttcatcaatcatctttctgtccaaccctacagagagagagagagagagagagagagagagagagagagagtacgtt

SEQ ID NO: 309741 - DNA, 902 bp, Cannabis indica
cctttggctttagtaaagattaatgtaatttgaaattgtacattaattttacactttaggatgtgtaattatttattggataaatactatttttaatcatgtgttttgtaaaattttttgatcaaactttaacaaattagacactgttttaaaatgtacaaaataatattttactaatttttaaaattatttttttttaaaaaaaaataactgctatcagatgatttttgccatctaagtaacaatatagtctcgtaattaactgacacatggactcgtttccccgtacgaaaaggatgacgtgtcaagggtataaacactggtgattgtaatgttcttgtatcagttattttgtaaacttttatatttcatttaaatataattaatgattataacggtcttgtttgattgattatgtaattaattgatcatctactttctatataaaggggtgatcaacatgaaataagactaatcacaaactcttgtaaaaataaatatgatccactcatgcaaggtcccagaaggtgtgttgcatccagaagcgaggtatattcctcaaagggcttccgaagatcaactgtaactcaagcctctaggagggcggaacctctaagacactacaagaaaaggaccgacgaaatgcgccggtaaatattgttggcataaactaaatgatgaatattcactttcattcagccttaacttttgccagcgcaataatgcactgaaaaaaaaggttaatcccaacgcactattgaatattcgctggtaaaagctagaaaatgaaccaccaaaaggagcgagaagtttgctgtgtttcagctaagaaaggtcaaggatgaccattatcgacattttgtcgatattctgctaagaaaggtcagggatgaccattatcg

SEQ ID NO: 309742 - DNA, 850 bp, Cannabis indica
tatatatgttggtaaaattgatgggcttgtttccatgaatcaatgctctcatcataatcttctttgttaaatcttctcctctttcaaacttcttatcattcatgttttcttttccattatgtcaatccaagtgaacgttttgctttgctccacggtgaaaattctttcaccattaaagattgtcataactattcaaattatataatataatataatatgtagattaatatagtttcacaataaatcaatagtgtataacatatatataatatatttataggcacatagtatacccaccaaaagtggccgatctaaaagtagttgaaccatcaacccgatttcgatttcgattctgggtatatcatttcgataagaacccaaaaagaaaagtaaaatgaaaatgccactttattgcatacacatatgtgaataatatttgctcacaataaaaacccaaaaatttgcttacatagcaaggacaatcatattgcaaagttgtcaattgagttggattcaataataacaatatagaagctaattttattgtaagtagatatctgaagtattttattcagaacaagaaacttctttcttcaacaaacctacattcaaatttcgaaaaagcaatctaacaatttttttcaagttatgacataaacactgttataaagggagaaaaaaggaccagaaagaggagcaaggatacttctagtaaaatatctaaattgttgtactacttactgaaattgaatggcaaacttcctcattaattgtcaatctaagttgttttccaacccctaaggacaacaaaatcattaaaccactataagaagtaacatgaaacaaataa

SEQ ID NO: 309743 - DNA, 1279 bp, Cannabis indica
agctgcacagtacgtttaaaaaatcacgtaatacgcctaagttagttagggtgttacaagttgccatctctcctttgcatgtagagctctgttggtccaatcagttttactgggaatcaggaattactggatgggcatctttatccttccgcaaaagattacttttaaaattgacaagttatgtcgggattttttgtggggtaagataggtaatagaagtaagatgcacttaaccgcttggagtcaagtctgcttacccaaggactatggaggtattggttatagggaagataacaagtggaatgttgctctcatggctaagtacgtatgggccatagctaccaaataggattgcctttgggtcaaatggattaattgcatatatataaagaatcgagacttatggacattcaaccaaggagctgatcctagctggtattttaaaaaactcatgaaactgaggaatacaattgataaagatgtgttaatggcagttggatattctgggaaattcaaagctaaaaagttttatctctcgctcatttcagctgagaaagtgacttatcacaagacagtttggcacaaattgaaggtttcgaagcatcgatttattctttggcaagctatcatcgagaagcttctcactcgagatcagttagcaagattcatcaccttggactctagcatctaccggtttatgagattgtccctgaatctcatcttcatctgttctttagttgcgtttattcgcgaagggtgttggctgagatttccacctggtttggaggaattgcttggccaattagtctcagtgattggttgcaggaatcagctaggaaggaaagtgtgatggcagtggtggcttcagctatcattgctgttgttgtttacttaatttggtgtaaccgcaataggtgtgtgttcgatggtgcttgctgttcggtaaaaacgatcaacaaccaagtgaaatactatcttaaggctagaatttattaatgtcactctttaaagcctaatttgagagataacaatgtaatggctattatcaatagcctctgaactgttgtagttgcttggtagcatgtctttgttttgtggtggttgaatataaatcctcttcttagttccaaaaaaaaagtgttaacgcatattttcattaaccaatttgagcctcatggtaataattccacatagaaaaataaaagctatagaaaaaataatatctaagcacagggtttttttacgtggttttgcagttaaaattctgcgtagtccacga

SEQ ID NO: 309744 - DNA, 1243 bp, Cannabis indica
tatattggttattttttttttttttaaattttgttagttattattttattatttcttttaaattttacttattagtagataagagaaaatcaattaaaataattttcttcaataataatttatatataattaatgaaagtaattaagattaatgcgtgttacttgactccctctcctggactagtatatatataaaaaaaaaaacgacgatctgccagctaaaatattgtttggcagtgtatattaataaaaggacaaagtaatggcgggcttctttactgtgaggaaaatggtgatctttttatttatttattaatttttttgacatttggcaaaggaagattattaagtaatatattttagggaaattatatattaattaagacgataagaattggacttgcatggaaaacgacatattttaacgaggattttgaattgacaaagagaaattaaggccaggattcgcggtattagtgtttcaatcatcttaattaagagccatatactaagtgtccaaacgcaatcggctacgtaactctttatcctattcattgacttgaagagaatatactcactattacttgtaataactttttaatcttcttttcaatggcttagacttacattcagtggaaggtctaagatttgtgataaatttagctaaaaaaaaaatcaaattttataattatacttcaatattagtagtaaaattaacataaaaagtaaacaacaactttcaatttgtattgaaagagtataaaaatttattaaatataagaatgatacctcaaaaattattaattacttgactaatgagtaataaaaaataaataaaaaaattaatatttattatggtgtaaatataactcatgttatattttaggaggttttacatatatacttaatttaggggtaaatattacaattatattgccacacaacagaaattataaaaatactgacatgtcccatttttattacttttatattatacggacgaaaaagtgcatatacgcctccaccttccaaaacgacgaacaaaaccagatgattaactcagaaaaaaccatttattctagcgatatggagaaaaaaaagtaaaattgacaacaaaacaacaacaaacaacttcatcaacaacataaaacaatgaatcataaaggttagaaacttaaacccaactaaattattttaaatacaaaattaaaaaaaaaaatgatgaaacaaagatctggaaatc

SEQ ID NO: 309745 - DNA, 1138 bp, Cannabis indica
gatagtaagccttccgtatcctggatggcataataagacaggataaatcttcgtatgtcctttggtcttgatctgttcctggatcagcaaagcttctctgtgacttagtccaaacagggggacttgtctagtgactatttaaagttgtacttctcttttcaggccacatatctttcgtccgaaaatacggataacagctgaaagttcttctgtgttgacaattatcatagtgtgttttaagttaatctaaaaaataaatgatcatgtatttaaactaaaaaaaagaagtgaattaagtttgaaattagaaattatgtttgactagttgatctatttcttttcacttaatatttaaatagaatttcttttatatatatagtgacaattattgagagaactataattattttttttttttgaagaaaattgagagaactatattggagaaatcatttcatgcatttcacgttctcacaaatctctctctaaacaattcaattgataagttagtacatgtacaaaaatatataatatttgatcacaaaatacatgcatatttacatattttatatacttatttaaaatgtgatactatttatttattataagagatatgttcagtcacaaaactttgattcggtccaataataagatatgagaatccattaattaaacagaagaaattgtacatatcattttcctatttgggagaatgtattattggaagttttctacatgaaattgttattataaaataataaatatataacggaaactgaaagaaacattaactgtacagctaagataataaaattgaacatataaacaataaagtttattattcaaattatgggctctttatttattttatttaattaattttttcacaattggctcctgttttatccaacataaagctaaccattgtatgcaaaaaataacaaaaattatatggctaaaatgaaaaaagaataaactaaaaacacaaaataacatgctacaattggttaataattttcttaccattttcctaaaaaacaattccagtcatgttacataataaataatggataaaagtaatactaattaattaaggtagcgtttggttggaggtgataaaatagaatggaattgaaag

SEQ ID NO: 309746 - DNA, 808 bp, Cannabis indica
agttttctacatgaaattgttattataaaataataatatataacggaaactgaaagaaacattaactgtacagctaagataataaaattgacatataaacataaagtttattatcaaattattggctcttatttatttatttatttatttttttcacaaattggctcctgttttatccaacataaagctaaccattgtatgcaaaaataacaaaaattatatggctaaatgaaaaagaataactaaaaacacaaaataacatgctacaattggttaataattttcttaccattttcctaaaaaacaattccagtcatgttacataataaataatggataaaagtaatactaattaattaaggtagcgtttggttggaggtgataaaatagaatggaattgaaagaaaataatttttattctatttctttatttggttgcattttaaagtattagaatatcatttcaatggaatgctatttccaccattttgatagaatgactattccattttgaaatgaaaggaaagagcattccaatgactacacgtgccaaagttttacatctgcaattacattgaatccaatcctatctaatactttctccattcaagaagtactaaaaaaaaatttaaaaaacaaattaaagaataagtgtccatagctctcttgattatgtgtgtactaacatgaatgaatataagtattattgtcaaaaatagacatgatatatttctcaattacagaaatttaatgaattctaagtgtgttatacatgttatacagaataacctcctatctatattaagcc

SEQ ID NO: 309747 - DNA, 1283 bp, Cannabis indica
aaaaatctattatctatatctatctatttatatatttatatttagtcaaatgacatggtgctctatatgaattattctcattttttttggaataagatgattttattgcacaacaaaactgatacagcatattctcattttttttcttctcattttttctaattttccaattttatttttattatttttttcatatttaatattaataataataataataataataataataataataataacacttatatattaatttaaaaaattaattctcagacattttcacttccctaattatatatatataaataacagttatatatatgctcaaataacaataataaaccttattatattccaattctaattataaatgaggtacgtaaatgatatcgtaatttgttaatagtattgttgaaaaaagaaacttttttttttttttgagggaaaatacttagttattattaaccaatcaagattcgtttacaataaccgagtatataggcggaggaataatctccaaccaagtacaagcctcatccagccctaatgcaaatttagctagcccatgcgctgcattattagcagaacgatagacatgtgatacatttacacttgggaaaaaggataaaagactaagaacatcactaattaaatctgagaattcggaatttgaattgaagggagctttcaaggcattgaccaccataagagcatcagtatcaatatctgtaataggtaattgatgttgtagagcccaactgagactgtgaaaaagagctttggcctccatttcatgagatttaaaattccccacaatcggcatagagagggcagcagtaacagatccaatttcatctcgaagaaccgcacctacaccaatggtatttgaggaattctgggctgctgcgtctgtgttgagtttatagcctgcagtagcaggtggacgccaaggggataaagcagcagcagcagtttgagtcgtgggaggctgctgtgaaggacttgggacagcagacgaggctgctgcatcaacagttttgtgttgagccgctcgaaaattctgtagaaaaactgatgcaaacacagccaagtcagtagcacgtcttgcaaccttaccatgaaccactttgttcctttcgccccaaattgcccacatcgtacaaaagagttgttccattttagctttggtgtataatgatgaaagatgcagcaagtaatctccatttctcattgcaatagccgctgaccaattaaaactgaaattgaaagatcgccaaaca

SEQ ID NO: 309748 - DNA, 1194 bp, Cannabis indica
gctgtcactgcaagaataaaagctttgtgagattttgacaatttatcataagagaggaatttatgaaggggatgaggtgtggaagattgatcttggatggtggaattgcattcataatctctgaggtaggcaggaggtcgagttgttctagaggttcttcttggaacatcgtgagcagaactggggacatgttcaggaacaagtgaaaaaggttcctgcgatgtgctgggatttatgacagcagtagcatctctgggcagatcagatgttgaagaactcgaaggcatagcagtagcagtggcaatgtttctaggcagattatgtgtatgagattcagaaggcatagatgtagtatcgtctccaggtggattagtttctggaaaggtgttggagttgttttctgcagaaaaatcactcacatttgtgttagtcacagtagtggatggaaggacaagatgagagaaaggatcaatgctaatattagaagtgtttaaagtctgaaatggaaaaatattttcatgaaaaattacagttcgagaaacaaaaatttgtttttcatttaaatcataaagcttgtaacctttaacaccttgtggataccctataaaaacacaaggctttgctcttggatcgaatttggtacgattagcagtgagagtacatgcaaaagcaagacaaccaaagtttcttagattagaatagttgggtgcagtaccaaataacaattcaaaaggagttttattttgcagaagaggagtaggtgtcctgttaatcaaaaatgcggctgtcattacacattctgaccaaaattttattggcatttttgcttgaaaaaaaagagcacgagccacattcaatagatgttggtgctttctttcggcaatagcgttttgttcaggtgtttctacgcaagtgaaatcatgcataattccaagttttgcaaagagatttttgaacacaagttctggagcattgtcagaacggaatttcttaatagtgcatttgaattgattctgaacataagaaagaaactgaggcattatttcaacaacatcagatttgtgtcttagaaaatagatccaagtaaatctagtgtaatcatcaaccaaagtcaaaaagtatttatagtttgaatgggaactaatgtgataagggccccaagtgtcacaatgaactatatcaaacttacttaca

SEQ ID NO: 309749 - DNA, 544 bp, Cannabis indica
atatattattaaatatataaaaaaaaaatacagtgtgctacggtgcactgcatatatgccgtgcactgtagcacaaacggcaatatgcagccgtagatgccgtgtccttggagaaaatttcacactaaatatagtgttttgatggctccttggagaagcccttagcatatataatttgccgtctccttggagttggcctaagggggtgtttgtttgttttaacttttaattattgaatttcttagaaatttgtgggtggagttaagatagagggtaatgtgaaatattagtgtagagaagagttgatattactcctaaaactttgtgggacccattatattcccacttaaaaaaattacaccaaacataggatattattcatattctcacctaccttaacactccctcccataacaaacattccctaaggtaagtctacactacacttttaaaagaggtattttggtaaatcactatctattttggcatacagaagaatttttattttaattttttttcatgatcgtgtacgttatagttattt

SEQ ID NO: 309750 - DNA, 1665 bp, Cannabis indica
gaatttatacattaaatataatcatgaaacataaaatgatttctgatctttattaattagtaaatctgattatattgaaatgaattttatttaggtcacaaaacccaacaattataatcatgaacaaatatatatttatatatatattctagacttaatagaatttataaattaaatataatcatgaaataaatcatgtgaaccatgcaacctaaaatgatttctgatccttattaattagtaaatctgataatattgaaatgagttttatttaggcacaaaacccaatggtcttgtcatgcaataggacagagggtgttctattgatgagataggtggcagttttaaccatgtaaccccagtaagatagaggtagattggattgaaatgctaaggctcgagcaacagtcaaaatgtactgttgttttttttccacaacaacattctgttggggtctacctacacaagagtgatagtttaggactccctttgcaggcatagacatttgtgagggttaattcttttgctttatttgttctaataggtttgatgtctattttgtaatggactttcacataggtgaagaagtttgaatgattagtggggcatcagatttggcccttagtatttatatccatgtgtatcttgaatgatcatccacaatagttaaaaaatatttatatgtttcaatagaatgtaggggtaaggtccctaaatgtctagatgaatgagatcaaatattgcttcagatgaatggtaaaacttttttgttttgataaatgacgtgtcggacagttatgactattggcaagatatttactagaacgtaactgtttatttactctatttgtaatgagttcagaggggtgaccaaggcgtgtgtgccattgattatgagattgtacaccaggattatgtattacagttagttgtaggtaatatggaaaaatcttgctgaatgtagtaaaggttgccatgcttcctagctgtcccaatcctcaatgtttgtgaagggctatgtatataacatatgttagaggtaaaagatattgtgttaagtgtagggcactgacagagagggagattgaacttgaatgagggtacatataggacattatgcagtgtgatgtgggaattgatgactacagtaccaagttcttatatatgaacatatgtaccatttggtagggtaacatgtttgttgttgattgttctagtaaagtaagagaaacattgtatatgacaacaaacatggtgagtagcaccactgtttaattaaggtgttcttaattttgtgcagcaacacaagtgcaagggattcttggccttagttgatggatctcattccacatagtcgtgagtttagtaaaataagcactaacaaattcatctccttaatgaagataagtgagtgatttatttagttcaaagattcgaggtccattaccttgattgaagtgattgttgaggacagtccacatttctgcagtagtgtccaagtacatgatgctgcttttgatttctagtgagacagagtgtaggatccatgacatcaccatctgattgcagcgaatctaggagttgaacagtgaatcatttggtggaggttaaggaagagagccatcaagaaactgttgggccatgttctttcaccttgtcgggccg

SEQ ID NO: 309751 - DNA, 1492 bp, Cannabis indica
tctctcatctcatctcatctcattgattttataaaatcagttcatgtgttaggatttttctcaggtgaacacggacttcggattacctctagctttgataggttatttcgtgtttaaaacttaatggggattgttatattattgtgcacaaatagggattgttaatgcgttttttttccttttctttttaacaaatttgatttttttcttcaagggaaagtgcttaaatatatattttttttcttcaaggggaagtgcttatatatggagaggcttcagagaatgttcgccggtgccggaggagctttgggccaccctccgccggattctcccaccctcgattcctctgagcaggtctacatctcatccctcgcccttctcaagatgctcaaacacggtactttatttcgctgcattctgctactttatttcgattcaaatcctattttgggttcagtttttttccccctttttattgtatgcacatagtagcgcacgcccccattagggtttgtcttcaatatcacctctcttttcctctttcgaatctaataacagattagggtttcgaacccctaaaaatgagtgcaatcttcttttatttaaccaactggtttaactgtgttttgaaacataattaaatatttttacgtgcttgaatggaatttgggtgtctttttagggagagccggtgttccgatggaagtaatgggtttgatgcttggagagttcgtggatgagtacactgttcgtgtcgttgatgtatttgcaatgcctcagagtggtactggtgttagcgttgaagctgtagatcacgtattccagaccaacatgcttgatatgcttaaacagactgggcggtatattttatactttcatgctgattattttttttcttatttatgtgattactgaacgtgggtgttttctaaattgactcgatgtcttgtttcccaaattgatttttacaatctgaattgcttagcgtttacttgtctttaagataaactaaatcaaatgcttcagaaaatattagagaattataatgcttcttgtatcttaaatcatgaacttaatgccaatcatttcttattattacaaggactataagtttttgtaagtgtatctcaataatatcaagtaacaaaaatagaaaacaaaaaatttatttagagaaaaggggagaaactttattgaatcgctcactaaaacaatatcttctaggatatttgagagacctggtttctctcatagctaagacttgatacatcccaacccctttggtttcatcccctttaaactagggctgtacaaaaatttttgtaaaccgcccaacccgaataatccgactaaaccaaaccgacaaaaccgaaaaaaaatacaaaccgacataacttgacaaaattctaaaccgcccaatctgtaaattgggcgggttgaattttgacccaaaccgcccaaaccgatttaacccgattttcagttttttttt

SEQ ID NO: 309752 - DNA, 498 bp, Cannabis indica
cgcaacaaaacatgtactactaccacctccaagaaattgaccccttaatgaacagtaaccttaattatctagccaatggagttaagtaaccccattgagcgttttatctcatgattttatagaaaatggaaagaaagaaatgtctaaatcacattaaccaaagatgaaacaatcccagttgttcttttgtggtccacttatctataatgaggctactccattacttttggggcctgccaaagatggacatattctcctttttcaatgacgtacctctctctctcattcttggctgattgattcagctcatcatataatctaccattcatttttttcaagcttttatttttcctcttctacttcataatgtcatcataactgggattgtttgataatgttgatgggtttgttatgttttcatagataaaaagaaaagaaagatttccttttgaagcctgtcattgtaatctagagcctgcatataatatatatatatat

SEQ ID NO: 309753 - DNA, 2839 bp, Cannabis indica
agatcattttttatttattttagtgttttatttttaaaaaagaaaaaaaaaaaaagaaccacaaatttaaagttttttatggcattcctcatgactttttcccatatttgtaagtttttttttttaaaaaaaatgtcatatttagtgtaattaagtatttatgtcatatatatcaaaacttatctttattttttcatatttttgtaaatagcccttaagaaaataaatgattatggtttcccttaattttttgtggttcacatttttcattattattattttattttgtgtaaggtattggtattacaatttattaataatttaaacatatcaggttcgaactgatgttctcactttttttccattcctccctcaccactgaactaacctcagtgaattttttgtggttcacactagagaagctttatattattttatgttactaacaagatcctttattttattatttcactactaagaaaaagaggattttctgattgctaaaaaaatcaggtatggtattatcgtcagtctttttgattgatgcctattctaccatcgtaaaactatagatagaatagggatcagtagaaaatcgtcgagtatgcctatgttctgactgtttgaaaccgtcggcaataactggcactacaagtaacaattttaaaccgtcacatttaaaaaaaatccagatctgagctatacgagcctaaatataccaaaatcaaacatgacaaacacatatctaaaacaaacaaaaacccatgaaacgacctctggttaccacggggtaggtcattttgccctgtttcgtgctggccgggggaggagttgatggttagttactttattgataacagcagatcctggaatttatcaaggttaaaacaacactttatacctttggatgtggtggatgtgcttggcatcccgttagcggttggtgcaaccagagatacttggtgttggcactatgattctaatggaaattattcggtcagaagtggggataatttggctattgatttggtgagtgaagctagggctgcttctttgcaagatttaagtaagtggtggaatgacttgtggtcattgaatgtgcctcagaaggtcaaaatatttatttagagaatgtactatcaggctttacctgtggcaaagcaactaattacacggaagataccagttgtttctgtgtgccagcaatgtggggaagcaaaggagacactagaacatgctttggtattctgtgatgcattggtcccggtgtggactcgaatgaggtttggaggctcgtatccaagcatcgtgcaggtccgctagttgaactgttagttgtactatttgattgtatggctcgggaggagttctcgttattggctatggtgtgggcggcttgggctattaggtgtgtgggtaattttcgagttgaggtggctgagcttttagctctttgtgtggggttgcattgggcgtctagtttggggtttgttatttctaaggaaaaaattaattctagttgtgtttatagttggatgaattcaccaactagtaatattactttcagacctattattgttgaaattacttctctgttaattgttgttggtggtggttcgtgtcaggctattttgcgtttggcaaatggtatggcccacacactggctaagtctgttactagttctttaagagctaaattgtggattgatgcttgtcctagattcttaagtactcctgtaacagttgatttgatttgttaataaattcatgttttctctctctcaaaaaaaaaaggaaggaaagaaagaaagatatgtagatagggaggtgtatagtaaaaaataaaaagtatagaatttcatctgaaatattaattagtgtggaattctctaatattatatgggataaacaaagggcatacttaagagaagacaaatggctcgtttggtacgtatattgtattgtattgtattgtgttgtattgtattagtattatttaatacaatactatgtttggtattgacttgtattaatatattgtattgtattgtattgtatcgtattagtattatttaattcgaatcccggtcccggatttgggtctgcgtccggggttggggttcgagtccgggtcccaagttcgggtccatgtccaagtccaggtttgggtccaggtcgggctacgggttgggattagggtccgagtcggggtctgggtcggggtcggggtccgggtcagggtcggggttcgggtctaagttcgggtccggggtctgggatcaggtccgggtccaggtctcgggtctgggtccgggtccaaggtcgggatcagggtccgggtccgggtctgggatcaggtccgggtcgaggtctgggtcccaggtccgaggtcggggtccgggaccaggttggggtcggggtctaggtcccaggtccggattggagattggtgttgaccctgaatcctttgtaaatattatactacaagctaatacagaccatttattatgtatcaatatcaatatatatatatataaaggaaagcacaaggagtgtctatgtgtcctcttataattttttctttctatttttcttattttttatcacatttcctattttgtttgaaaacctaatcatatgtacaaactaaaagtcccacattgtttaaagattgtttaggtttaatatatgtaggttataaataatattcttactacattactttcctttgtctaaaaagtatttttttttatgggtgattgatgaacttaatcttgcccaataagttacaattttttttaaagtgaatgcaaaatacatttttgtatttttcaatctt

SEQ ID NO: 309754 - DNA, 3092 bp, Cannabis indica
tattttagtttttcatccagacttttcccaatgaatacacactttgtgggattttctagatctaaaataacctcctccaattcctctattggtttcaattggttcttatcatcttgaaatcgaggatctagatccttgatctgcttatcgccttccctagttgtgactgccattagttgatgactagctttctattttgtagctctatgcggtagcattcacgagctagtagttggtcaccttgcactacacccataccagttaatgtttgaaacttcaaagataggtgtttaattgaactaactgcccctagtccaattactgcaggtcgacccagcagtatgttgtaggccgatggtaagtcgacaactataaaatcttgcaatatggtatttgataaaggcacctcgcctacagttaacgggagttcaattattccttgactggcgacactattgcctgtaaatccacatagatttaccatgtaaggttttaactttgtactttccagtcccattttcttcaatgtctccttacaaaggatattcactaaactttcattatccaccaacaccctctttattcttttttcttggtgagctggattgtaatcacgagtgggtcggcatgagggtaccttacatgttttgtgtcttcctcggagaatacaattggaggttcctcagtcttagctttcttagaaaatttcggagcaaagagtgaatgctcgttcttaatttccttgacatacctcttttgggcattgttactttctgcagcgagatgtgaccctcctgagataactaaaatatcctctccttcccgaggaggaggttgtaatctttggttgcctgggttattggtcgaattcggctggttgtgtccattgccttgtcgcttatactgttgaaagtaaccacgcgagatgaggctttctatctcgtctttcaattgacagcattcatttgtagtatgcccaatgttcttgtggaatctacagaattttgttgcatcccctttgtgcctcgcatgtctcgtgggctcaggcttgcgaaatgcaaccctatgctcatgtgcgggaaagatattttctcgagtttcattaagctcggtataaatagtataaattggcacgtacttatagtgcttctttttttttcttatccttgactgattccttggagtcatcttttctctttgtgctagagcctcctggattgtcagccttcatcgagacggtgcttgcttggacaatgctgggtttacttcctgagccagtccttatcaattttatctctattcttgcttcctcttttcgtacaatcacctaagctcttacattgaactcactaatgttttttacaggacgaccctgcaaatcatcccaccgctcgcctccagctgtcgagagatcagttgtaatcctcgcttgaagagaaaaaagctatatactgttgttcaagtttctaacccttgcagtagctgtattaaaacgacttaggtaggccttaattgtctcactcggttgctgctttatgttagtaagggaagacgctttaggtcgcatgtctctcattgcctgaaactgcttcttgaaatctttagatagttgttcccaagaagtaattcagtgatgtgtgaatttattgaattagctattcacttccccagtcaatgaggtgggaaataaaatacaatgtaaggtttttttaacaatgctggctcgcattattgtattcaagttgttgaggtgagggaccggatccgtagtcccatcgtgtgacgagaagtgaggattcttaaattcctgagggaattcaacgctcataatatttggatggaaaggtttgagctccccgtcagagtcataatcaggcaatttcccatcttggtatttcttaaatttgttttccaactcactaattcgcaattggatcggatccccttggatttgattgagtttttgacatagatcaggttttttctgattcaattgctcacaaacatctggccgtcttcgatcatcgtaacttgtagaccttgtacctgagtaactcttagactttctactccttgtgtaactcacactttcttgatcattactacgccgaggtctatcccctcctcccgtagatcgactgtgatcacgagatctcgtacgtctcgagctagaacatgcctcgtcatgtacaagccttctcctttgggaatgggttgatacatgccccctgctggcatttgtatgtgccccttccctatcagtttgagaagcacattgaagatgtctcagcagcaacccgcttgtcctaggttgagtcccaggatttctctcgttaccacgagggatttcctattccctagtccagggttgtcttctgctcgtgtttctaagagaagactctggacaatcattattttcattcccttgggttgtaaatccccgaggtcttcgaggcacttcttgatgtggtgcctgatcatttggttgttcgtcttcaggaacatccttagtttctccaggttgctccacctgagtgttctagggatcttcatgttggaatttatttttaccaggatcttaggtctactcacaagtatgttgattaacaacctaaatatgaacttctaaaacgataaaaagaaaacacatataaagttaagaaaaccttacattgatggcagcagaataatatgtctccttccactcagatctctaaccctttattcctttctgttgcagagtatcacagtcttccaagctatgattgaggtactgtttgctgtgtgtgggcactactctctcactagggaattcgaaattctctctctcttgtgtattgtgttgatcgtgtggtacaagaggaagagaagagggcagctatatatagagaaaagggaagctcaactttccaaaataaacagtttccttaattactgagtaattgattaactgccttatttggtgtgatccaccactttcctttaatagatagctgctaggtttaggttagtaattacttggcaattaaaaaattgaaaataataattggaaaacacaaacaagtggccgaccaaaggtgtaatgggcctca

SEQ ID NO: 309755 - DNA, 610 bp, Cannabis indica
ggtgttcggttggtcggtttgaacggttctttcggttttctagattttatgctttactttaaaaggtagctcttcatctgacacaacatgccgagcactacactaattttaagcattggagttaatcttagagcacgtttaatagagtagtttgaaagggagcttgatagaatgtggagtcaaaagtgaataaaatgaaggagagagagaaaatttgtgatatcgtagattttttttgaaaggagtatgctttattaaatcgagtagtcactcgtaataattaacatcaactccaaaggtacacaatcaatagaaaatatacgtttagctaagatacgagaatttcgggcaatataatgtgcggctcgattcgcagaacgcttaacaaatgccaatgatacataagtcacatttttaaaaatattcctatagccatccaccaccaaaccgaatgcagaattaaagacttcagagcttcgaatggcctccacacaaaccaggttgtcagattcaatcactgcctagcggtagttatgcgtcttgttatagtgagatttctctcacctagaaaactcgagactagattcctccttaaaaggacacgtgtatt

SEQ ID NO: 309756 - DNA, 1264 bp, Cannabis indica
atagaagtgactttgaatttaataaactcagcctcaaatttaacattaatattttagggtaacctaggcttacaaactctgggaggagccgtaatttaaaaatctaaggtacttggagaaaaagcaacattaacgggaggcataaacaaaggtttggctagagagtattcatttaaatgatgcatcttgggccaagctacatatcgcatatagcgacgcctaccatcaatagtttcatctataaagcgcctatagcgagctgatacattttccctgttacatctctcattgtactctctgattctctcatcgatctcccctagttttgttctaaaaattatgggttttggtttaaaatgtaaagcagataaaaagttaatttcttggtctaaaaattctaattttcactttcagaaattcactatcgcatgctcagatcgtattttgtccataacccatttaatacaaattggaattggacgattgaagatgctttaaaaaaatgagaacgagatctataacttttatgtttagaacaaaatccaactttggatttaaaattgtcaaaatcaataaatacgttgtgacttgtcaaattaagctcactcctcgccgcggccgcaccaaactctcgctatagtgagcactattgaaggtacactcattgcagtgagaccaaactttcgctgcagcgagggctcacttaacttatttttcttcttcattcactgcaacgatactttgatcttcgctacaacgccaactctcgagttttataacttcaacactttttcaaactcaatcaaaacatcattttaatgagttatttcatcgtccaaatatcacctaataacatcaaatttattattattatttctcataaaaaatcaataaaatctttaaactcaaaaactcataaaataagaatctaaattgaacgcctcctgaccacggttttctctcgttccatggtgaaacgaaaaaaactaggtcgaaggccaggattgaaggcgccgactgaagcaacaggctcggaacagtgtgtcgaccaggagagggggagcgatgctggttcgttcgcagagcagaagcagcagttcgaggttcaactggttccagatctgaacaatagggaagaactcgaatctcttaagtctgcaaggagaagctgggcagaggaggtcgaaaacttgcagtcagcctcgcaacaccactggcagcagttcaccggaggtaaggccttgttctctgatgctaaactctc

SEQ ID NO: 309757 - DNA, 787 bp, Cannabis indica
acatttgattgtgatccagccgaagacatagcaggaagatctgatatctgttttccttgttttttttggtcaaattcttctaagttatttttgggtaaaattcgaatctccttctggttgtgttatcaaattctttgcataatagaattcaaattattgtttttgagttgttattgtgtaattttgagttaacggaggttgtaatctttctttctttctttttttctcatttaccttttaattttggattggtcaggattagatcattttttctcgtctacatttcgcccttctcattacacaacttgtacgatttttttggacttgaaatcatgcctggagaacgaaaatagaggagatatggaagctctggtgcggttgaaaacgaaggagaaagaagaagattaggactgttttgtttagtctgtaattttgaaaaaaaaaatccaattttcctttttgtttattttttcttaccacgataaaaaagtaaattttgggcctaaaaaatctctttttatctcgtttggtttagcttctataagctctttttaagcttttagaattaaaaaagtccttctaggtgtgtatggataaaaaatgaaaattattttttaatgtaaacgtcattttgaaagaagttaggatttgtagattcttctaaaaagttttaaaattaaaataatttacataatttataatttacttttatatatatatcatttctcaatgatattcaaacattttggaaaatattttttattaaaaaatatatttttataatagt

SEQ ID NO: 309758 - DNA, 1662 bp, Cannabis indica
tttggatattttcttagtacattttaatgtgtatgtaaagagattagatgagttttgctagtgttgtttcttcaatgtgtatgtaaaaagataagtagagttgttttttttacatccagtcatgtaagaatacaaaatgataatgatgtatgtaaatgaatttttatgtgtatgatatgatttgtatatggatatattatgttaatgttgtatgttgatgaattagaatttgtggtagatattatatgtttttttaattatactaaaaaaaaatattagtgataatattttgttgtgactaaaaatatattagtgacactgttttgttgtgactaaaaaagtattagtgacaactttttattgtgactaaagataaataagttgtggctaaaagatagttgtgactaattgttttacattttaacaactattagtcacagagattggttgtgactaaaagtgatatttagtgacaatattatttttattgtgactaaaacttttagccacggactttttaaccacaacgctgtcacaaaaaaaaaattgtgactaaaacttttagtcacggcgtttttcacttttagccacaattttcgttgtgactaaaagtcatgttttttgtagtgggggtgaactcttatttatacaaaaatatgattaaaagaatgggaaactaaatcaatttaacattaatggtgataattaatttagtgatttggacatccataaataatatttcatgatactcccctttgaatgtccataaaaattatctcattaaaagccttgttgaaaaacttggtcaaaagaaaaagagtgcagtgtaaactaactacttatttaggcattcgtggagatattttaatcgacaaattttaatcttgtgaaccatcttcacaaatattaatgttggtaatgactttgtgaataagtctgctagattgacacttgattaaatttgttggacaccaatgtgcattttctagaaatgtaaaaagaagaatttggtaaaatgtgttttaattatatctccttcaatataccctcctttaaattggacgatgcaagtaatattatcctcgtagaatactgcctgtgttgatacttctttattgagtgtaatatatatgttttctgaatatgttattgttatacccgaaattcagctgtcatctcggtggaggacacgtgttaatataaagggaatatggatcgatgaaatcactttttatggaataactcattaattgcgtaagtatcagagtatatttgtaacatgctgaccgtaaggtcttatgcgaggaatcaatatacaaactgttacttagtatactagcgagagaccatatgtcgttaagtgcaaatagcgaggcatcaagtacgctgtatctaggaagacaaaagcgacacatatcaactttggaagcacttagtgtataatgaacaaactaagtgtaacagtcgggttggctcgagacctagtaagcgagatgcctatctcgttgtgggaaggcttcctgtaatttcacccagttaacttcagacattttctcggtgaggcttacagtcctgacgagtcagaagcttacattcaaacgagcctcgaagaactctttgtaaataagaatcgcgatcgtcacaagacgtgtatcgtaacct

SEQ ID NO: 309759 - DNA, 1873 bp, Cannabis indica
aaaggaaacgtttataaaggacaatgggttctattccgaaaagacctttattttgtctcaagctaccatgggatgtgaatcaaaattctaaaagtcctagtgactgcagttttgaggctccttggctatttagatctctgcaaaatgtgggttccatggcttttaagttcatcaactcaatttcaaaatcctcagatcccttgacaaataacttcaaaccctttcaatttaatgctggaactggaaccagccaaagtaggactttacagtcgaagctaaacttgaatcctgaagagcaaggagaggcagagcaaagagcatttgcatcagcactagcaagttgtaaagaagctacagtaatcgagttctactcccccaaatgcaggctgtgtaattcactggtgaattttgttatggaaattgaggctaggaattcagactggatgaacattgtgatggcagatgctgagaacgataaatggctccccgaggtaccccaataatatttttagtgatcttgttatcttaacattaaggaacaaaaagaggtttggtttttcttgtttttgcttctgtagctcattactttctttttggcaatttagctcctccattatgacattagatatgtgccttgctttgtactgcttgacaagaaagggagggcactagcaaagaccggcattccgagcagtcggctacatgtaatagcaggtctctctcatctcctcaaaatgaaacctcctcaatgagctagtagcagtagtagttaggtttagtataatatctactgtacaactattctcatacatccatgtcatgttcaacatgtctgttagatcaccattcagttttctattcatttgatttgtataaacaagtgtgttcccatcagagcatggattatgttgatttgctattgcattttacgctttcagcatacaatttcttgagtgcatattattgctaacacaaaattcccaccaatcttctacacctatagatattcattccaccgttaatagccaagtggtttggtttattttcgtgttttccggtgtacatcagaatcgattaaactggtttttggacagtaatttgtatgctttttgttcgagatggatagctagcagaaggatgacttctcaaaataaccctcttatattaatatattataaccatgtactcgttaaaataattcacaaaaaaagctttctaaacatatgaaaattcctaaatttcattcctaaatacacttatattgggcttcttctatcacttgaatatctactaaagaaagaaaaactgaagttatctaattttcattcctatacatacattgattttatgtgtattttgagtatggaacacatgagtgtaaaataaaagtgtctagcatgcacaaatttttatcacatccattttttcacaatattcacaaaaattgcaggtgctttcttgccagaatagataaaacaattataattgtgtaggggttattttcggtggagttgaactgcaagtgtgaagaaggcttaagtaggtcttcagaatttggggtccgaataattgggcaactaagagaatttatttagtattcatggaggaaactaaaaatctttatgtgtttgatgtaaatagatcgattgggttactccaaaaatattttggatcaaagcaagttgagcaggcttgtaaggatagtgagtttcaaggtagtatgtaaggcttaaccaaaataagtttttgggtaggtaccattttacatcttgtgttttgcaaaaattactaattggactttctgttttgttaaaaggctattttcaaaaatatgggaaaaattattaaggttatgataaatataacataaaaa

SEQ ID NO: 309760 - DNA, 946 bp, Cannabis indica
aaactaaaatattaaaaaaaaaatgtgaagtactaataatacctttcagtatctctcattattttaacaagaaatcttctgagttctactacaaatcacaaatctttccacaaaaacttcaaatttattctgtatttaatacttaaaacagcaagcagaaaaattttgtttggcaaggacattaacccacctccgattaatgttgcatagaagataatatatatttatattgaaattgggtaaataaatttttgttgtataaaattaaggtaatctttaaagaaaacaaccatggagaaacgacaaatccaattctatttattacatgaaaaatataccttttaaaaaaattagtattgagttgcatattgtgataataccataattggtaatatgggtatacccccataaaattacatacataaaaacccaataactagttcaatcatgggtctaaatcaaaacaattcattctacaaagacaaatgataaatgtcatgaatttcaatagtcaaagtagctatgactttaaagtaattagtgcaaaaatataaatgtttgatctatctataaaaaaaaaaaaaaagcctaatattaagtatgtcattatccagttagaaactaacccactcagtacataattcaaattaatatgtcaaatcaaaacaccaagttgtaattcggacatatcaggagatctatatataaccctttattggttttttttttttggccattaatgatggtcgagtacaagataaatatttagtttagtgaatttatgtaattgaccctttaaagctatccttctatttaagaatttaggaaaaaaaaattagtcagatagcatacgttataattatttgtaaatttttataaaattctattaaagttagttttgaattgctaatgtctaggaataaattatcatatataaaatgaataa

SEQ ID NO: 309761 - DNA, 621 bp, Cannabis indica
aaaaataaaaaaaatatttttttccttaatcctacactaagattctagcaatttgataaatattgtgtttggcgtgattaaattataattaaagcaatattttttccttagtgtgttttagtattatttataaaagctatcttttgatgatttattgcacttttaaaattatagtatgatattttattatttaattaagacacttttgatcgatttgttaccttaaaaaaatactaactttactttataaaatctaagattgtactaaataataacaatgggagctcacgtcttgagagcttaattaaaattgtcttttttgaacaaattttttaagagttgagggtttggggatccctgaatatctcatttgatggtagggtcacatcctatttttcctgtagaaacattgttgagacataaacacttattttttaagtgtgatttcagctctagatgctaattagtgatcaagaactggttaggtcggagagtgagtaacagacccctgccagacactggcggacccaatgaaggaccaatgcgagcttaagcccatactgaaaaaaaaaatatttctttttacttttaaacaaaaaaaaatcttttaattattttaat

SEQ ID NO: 309762 - DNA, 545 bp, Cannabis indica
tttttttttttttgaatagtttaagaacactagttctttttttttttgaagcaattaagaacactagttgaatgcacataaagcaggagtatttttttttaaggaaaacatagtaacttattaaactaaattaattgttatagaagcacataaaaatttaaaacaagcatcagtccaaatataaaatcatattgaactacaagcatttttcaacttaaaacaaacatacatattaatatgttggattaatattattatagaaatgtatcttacaaaagttatcaattagactatttatttcttaaatgacaaattaatttttcaataatacaaaatattactttgaggtttatttttaatattttttgtttgttaatataatcaacttaaaaacaacatttgacatgaataaatgtataaaaatataactagatttgtatcgacactttttagattttattagtattaagttttatttttgacagaaaatcagctcatcattgtactattttgtactgaaaaaccgtgtttttgcaaatgtcagt

SEQ ID NO: 309763 - DNA, 638 bp, Cannabis indica
agcagcagtagggtcagtggttgcaaaggtgtttcccctctcactaacagaagctgaaccatgaggagaagcagctggtgagtgattaaagaactgagattcatgagaatttacctgagattgtgttggtgtcgagggagcctcttctggtgtgcttaaggagggagaaggtgctgctgagttagtacctgtggacaagttaaaagaaggaagtacagaccaagaagagctttgaatgatgacagatttttcaggttgatagttgttgagaaaaccatgctgaaaaggaaattcgagttcattgaacacgacatttcgcgagatgtaaatttttccagttggagtaaggcatttgtagcctttgtgagactcactatatcccaagtttacacacttaagtgagtgaaattggaatttgtgagattgataaggtctaatgcatggaaagcatgcaacaccaaagattttgaggaatgcatagtcgggttttctagaatacaaggcttcaaaaggagacttgtgatctaggacaggtgtgggaaggcgatttatgagatagactgaggtttggaaggcttcccaccagtatttcaatggcattttagcttgtgcaagaagagtgagacccatttcaacaa

SEQ ID NO: 309764 - DNA, 1912 bp, Cannabis indica
aaaagatgaaaaattctcaatcaaagctaattcaccatccaccttaagtgcatgcacaactaattcatgtgaaacagacatgaataggggatgcctcatgaatagggatgacatgagtaaagaatatgtttttataatatattaaatgtatggtatataaagtataataagtaaacgaaaagaaaatattagtatttaatagaccaaaaaaggtaaaattttagggttgaaagacttaaaagtgtggtctagggggagttgaagggtggaaataaccaaaattcatttcagaaatagtctaaataaaatttcattgacttatgaatttcaatctcttgataaaatagatagtatttatgtacaagtaatatagcatgttatcatttttgagataaaaatgatattaaacgataaaaataatagataattaaagtaaagtttgaacttgcaattttaatcaaaaaaatttcaatacatttttctactaagagctcgcttattttgttgcctatctaagcatttgtattttcttttgcattgtagatgcaatatgttttttcccctgttcttgaaggctctccatcaattaaatttaatcattcttttatcttcataatgcttcaaatttgatctacacacttttcactttttcatatatctttttatcatgttgaacgcgaaaaatattcaattttcattggttttattgccttaataattcaaaaataataagtttgccttgttaatgggttttgaaaaaagttattttgaaactaatattttgcactttttaaattcttgaatagttagtgattctttattaaaaataaatgtgggaattgcttttggattttggatttgttttcgaaaaataagtgtaaacaatcaagtatgtgtggtgtggacccatttaaattagtattaaaaaactaaaaattgtatttgaattggaatgaaaccaaccttaacaaataaaagaaaatggttacatgaatcaagaatgatagtctctataaatctttgtattaacttctactgctattgtgtgtgattgaaatttatctgaaaaaaaaacttttactactaatatagtttcagcaaaaaaggactacaatatattattctatataccatcctaaattatatcctcatttgttgaaaatactaaaaattatttacataagctatgttctatctggaaatggctaagaataaggttgaaagtttattattgtggaaaacgactctagggtagtgatcaatactctcaacgataaagatttttgatgggaagttatgaactacccttcattttgtaaaagaacttcttattttgttagttgtttattttctagcacggttagaacttgtaacttaatagcctataatgtggtaaagtgaatttttacccatttgtctcctccattccaacaaacatcttttgtaatgacttcgagatctaattttcatctatcaatgcacattttttttttaaaaagttatattgactacttagtttaggaaagagaaatgttaaaatgtgatatcgttattactgcaattcaatatcgaattccttataatttaatataataacttttatgaattatcactaacgaattataagttgtcacctctaagtggtgtaagacacctgatagcaatgcttacgacctattttctttttgacactaataaaaaaaataagggcaatatgatagagttaagttgtgatactttttttctaggggtcttttcaatattatacctaaaattaattttatttataaaaatacctttaagaaaattatttgcacaaataccgattgccacgtcagcataaataccgaaatataaaataattaccgaaaattgaaaaaaataaaaaatctcgcttccagaaattttagtg

SEQ ID NO: 309765 - DNA, 1503 bp, Cannabis indica
cttgtctcttccatctagtatggttgagttgaaactcttacaaagattactcagtaacatatcacacttagtagaagtcctaaagtgggacttggtccattcagatggtgactttttggacaaccaatcaaaagttgctgcattagtctccttcaattcattcattctccttttgaattcttccaatgtaatagctctagcacaagcccataattgttgcttcaacaacaattcaggaaactccgtcttgaagttagcataaaaatgcctaacacaaaattgtatttcaaaaccttcataaactgttcctaaagccttttctagtcccttttgtctgtctaaaatgaaagtgaagaatcctgtgtcttctacatctaggtcctctttcagtagttgcacaaaccaagtccaactattagtgctttccttttcaactatagcatatgcaagaggaaacatgttgttatttccattaatactaatggctacaagcaacatacctctgcaatatcttttcaaaaagcacccatctagcttgatgatgggcctgcagaacttgaaactagatttacatactgaaggcatatataaaccctttcaaaaaaccttatatcattcactaaacttgttttgataaaaattgtgctgccaggattaagttttactaattgtgcaaaataagcatgtggaatatcatattgatctttagcagtcccatgtatcttggctatagcttttttcttaactcaataaaaagtctaggatgagagtttagagtacttaccctcaggattttctttcttgaaatcaccaaatgacatggctggattttctctgaacttctctaagaactcttttgcaatccaatcagtatctaccagcctgttttcccataaaattccacaactgtgttcttcctcaaatttattgattcacattatagtgcatgcatctctcatcctatgagcatacattaaccatttatagccttcttatttgcatacaactctaattctcaacctatcattgttaatatatcggtattgcctatcaatgctgataaaatgttcctttaatgcttctctcaagtactcaaccgtagggaattccatttccaattcaaacttgatatcttcaggcttgaactgtggatcaaattcaatgtgtttctttttaagcactggtccatcttctttatcactaaccaagctgaccaaatcatcatcctcttcatatcctccaccatcatcatcatcttggtaagcttgactgcataaatcattgagtgaccccaaccactggctagggtcagttgttccttcttcaactaattttggatcttggctttgtggagcatattcctcttccacaaaatttggatcttctactgattgtttttttgcctcctagtaggtgtttcggatggtgtttctcttattctctttctggtttggggtggtgttaggctatttttagcctaagttttgggtcacattttatagt

SEQ ID NO: 309766 - DNA, 869 bp, Cannabis indica
gtaacgatagatatcaccaatcggatctttaattttttcaagttttgccaaaatttcatcaattttctcatccctcttgattgtatagaaaattattctcccaatgcaaaattttattaaaattgttagagatgactctttctcagattgtggctgaatctaaggttgcatatgatttcatgtatatgtatcaactctggtatttttctacataaactttatgtcttttttggtattttggatattgtgtgttggatttttttaacataaaactgaaagctttgtataaaagttgattctttatggtatgttcatgaaaatttgaaggaaatcaattcttatagaaaagaaatgcatagagaaagaaagcagaggaagagggtattaatttattctactcatataaatttggagtgtgttataggtaattgtgtcatgaaatggacttgtgatctatcttttgcaagagcttgtacgattctcaaaaggaacctgagtgcactaaatttaactttcatgtgaatggatgtgaagtgatgaaatgaggtaagttgatatgtgtttcagatctactttattctagaatttccacttatgattatttttaatagtgcatggttgtgaaaacagaccacaactcttggaaactacaaagatatattaaggtcttgtaatgcttttaatcacttcatacaagaagtgtttaaagagcccagacaaaattaatatttcaagatgtgataaagcaattttgcagaatttggctatgaaaagctcagatgtaatgataatagaaagagattgaattgcaaagacatcaacaactagataaactttatagatctatgcgttccggaaaggtatttttt

SEQ ID NO: 309767 - DNA, 1755 bp, Cannabis indica
ccctcaaaaaccttgaaaggaggattggctcccaacacaatacaaacaatagcattcttccaataagatgcttcaatctcagcctcttcaatatcaattttagccacaatttgatcccccactttaatgggttcagtatattcaagtctagtggaaggagttaatacctggtccgttggaaatttgctccataaatctgccgcagtcgcctgaaagtcggccttctcaacttcctccgcccagtttcttggaatcgaaccattgctcttctcagtagtcggagcgatttcttcctcatatcccagatctgcacaaggttcatggtaaatctcctccaccggttcctcctcaccaaccggagagtgctctgaagctatcgatgtcgactcgagtggtgttgatgccggctttcggacggccctcttcttcttcgccatggaagaggagcaggtcgcacgcacgcctctttttcagcacttacaacaaactatgacagcaaagacacgatttttgacacaaaaaaaaatatcagaatgcggttctaacagttttagatttcacaaagaaaaatataagagatgaaacacgaattgacaggaatatagaacacaagttaaacaagattatcaaacatgaattgaatagaaaaacataaaagatatataggccaaactcaatgatcataagctctgataccaaatgatacgaactacaccaacaattgtgatgaaacccgataccaaaaatggcagcctccaagaactcacgaatttgggatgtggaattgcgacccaatgcttagttaagtatgaaccttggtatgaaggaagacgccacaaacggtgatggaaatctgtttgataagtcaggttgaacgccacaaagaatactccttcataagttcgaatagttctttcaagaactcaagaagaaaacctttcaaaattttattcaaaaataatctaattttctaaagtgtttacaagtctttaaatagccaacttacaatcaagataaaaaaaaaattaaacaatgaaggaaacaaggaatttccgcccccccccccccaagaagactttccaactaacaaagacagaaaaaaaaataggaaatgaaattaaaagaaagttgccgaaaatccaagctatgataaaaaaaatgaaatcactcttaaatcactcttaaattgagtttaaattgagtctactttgatgagaagcacaaatttttgttctcctcctgtgttgatcacggtctcctcttgttttagaatttgtatgactaagttgttgagtttctctttgaatctcttggctcgcgccctcgtcaccggaccaactggaacttgacttgtatctttagccttagtgtcctcatcaaacatattttgacaattaattatggcagagacctttaaaaaatgtctcacctatataaatataggatctcggtctccgagctcactagtcattctttgaattacaataaatttatctaaagagagtaagcttggaaatctgattacccacactaatcaattttattttttctacaaattcaaagcttatatagaattgaagttcaaataattaatgactagagctattttaatccttatttatataatatacatgtgaattcatgatcatatatatatatatatatatgtgtgtgactattcaatgattacatttttattgtaactatcatagttacatttttctttgacctgtaatagcaggttactagtaggta

SEQ ID NO: 309768 - DNA, 2328 bp, Cannabis indica
gtagccgtaggagatattcgaaaacttttcagataagttatagtgctaatatatatgaagatatgtaaatagtaatttttcatacttgatttgagtatgcatacaagatatctttacatcttgttgtactctttttgttagcattataattgtggatattctctgcttccatatatatatatatatataaatattaatgcatcattaggacatgaccactactactaaagtatattttcggaatttggatagttttgtccggagaaaatacacctcaagagacttgaaattgtagaggctaacgtttccatcctagccaccttctgatgatagcaaaacattgtttgctcaagtgatgatgatcaaaaaaacacatgatctcttatttccttgtttattccactcagataatcttgagctatgttgaatctacatagcctatctttcacttgtgatttgtcaagaaccgaacgctacaatatgaatctatgtttcggtattatgatttgttataccgaatttaaaacaataaaatttgaacaaattaccgaaagaagattatggctgagttgccaactatgttgctttctttgagatatttcgtggctttgcccgaagtgtgtacgacagtctagcaaccatagcgtccccaggataaaacagcctttgtatacgatatgttctacaccgaatgatgtcgctcgattgcaccctaaattattactctgagaaaaatcgtacggagaaagagaatttttgttgttgaaaagatgtatactactgttgttctgatacgacttacatagagaagtcgatctaagattagacggtaagaaaatagtaatataatcgtagaggagttagatcatggtagagaaaagtgaatcatcgactgatcgttttttactacttcattaaagctaaaaataattaattaattaataaataaatatttctttaattaaataatttttctttaaaaaaataagtgacacctcacccgcctgcaggcagcccggcttggccggacggatggcggcgggcatgcgtgtgtggtggtccggtgtgtgagtcctcacctctacacacaaaattgggtgacccttaggatccaaacccaaatctcatggctacacaatatatacaatttcaagaaagtgtttctatcttatgtgggactttcattactatcacacacttcatatattttttgtaatttcataactaagttccaacaatcccccacttgaaatttttaaaaatattttctcaagcaataacagacaactataagacagtgcttaaacaaagatatttttcgatttgaatcttccgtagtgaatataatttagattttattagagtgactcaaactcttgaactttatctctaacattgtaccacactcaccaatcattcaaggatgtattcaacaaatctcgtgcggtaatggccatgcacgtctatcctagtatagtgaatgctctaaaaattttaccctaaattctataggaagtggccccactcccacattcacataggtgagtctatcaagagtactcctgtagctcggtactccactccacatagagtatagatctcattaagagtttttcatttactcatcctcttatcatttcaggacttcatgcttctctttttcgtataattatagcatgatctcacttttatcacttcataacttgttgttacccattgaacctatttcttgggatctccagtctataggtcgggttgccattatgagtgattcatcaatctaagggcaacagtcccattcctttcgatgttttaaggactttctctctagctaagcctttcgtcaaaggatcagccaagttatcatcagtgcgtacatgatccactctaacagctcctgttgagagaaactctctaacagtgctgtgcttacgacgtatttgtcgtctcttaccgttgtagtaacggttctgtacttttgcaatagccgcggtactatcgcaatggatcaacacagctggaataggtttttcccataaaggaatctcagctagcaggcttctcagccaacctgcttcttcactagcagtagctagcgctatcatttcagactccattgtagattgagccagaatagtctgtttcttagatttccatgaaacagctccaccagctatgctaaaaatatagccactggttgccttggagtcatctgataaagtgttccagtcagcatcactgtacccctcaagtacagctggaaacttttgataatgtaatccaagagtcaatgttcttttgaggtatctctatgaccctctctatagc

SEQ ID NO: 309769 - DNA, 718 bp, Cannabis indica
tcttcccagggcttgtagcagtaattgaaggtaattccttaagggggtcacagctagagacatcaatgttgatagagtttagattatcagtagattcagcgcagagtttcttaacgcccccattagtttctcgaacacaaattggctctgttaatagctccaattttgggtcaggagggccttctaatttccttttcttgccaggcccagatgctccaacaccaaaggcctttttactcccatcttcagtggatttaataaaaataccacttcccctgcgattgggccttgaagctttgtgggccgacttggctccaggatccagcacagcattaaaaaccatggctaaatgggacaccttactctcatccacgtcagcaattgccttcccttttttcccagaatttgaaaaattggagggaccaccgtccttactattagggacaacgcattcgcccaccaccacgtccttttgtccttcccttgcatgcacgtatagatttttttccatgaggactaatttgcccctgagctggagctatcgacttttcctcgccggtaaccccctccatccaccgtggatacaccaagaatcgacccctcagcccccagggtattcaccctcccatgcttgcttgtctccgcctccaccaatgcttccatgtgaatttcagtaccgattaaggccggctcaaagtgtttgaaattattttaccag

SEQ ID NO: 309770 - DNA, 1589 bp, Cannabis indica
ggtacacaatgtcaccgtaaagccactagaaaggggcagagctatgaaaatgtcaccagaaaaagtagcaagctgggcgaaataacttagtgtaggttgttccactagacgagctgagtctagtggtgaagacagcttgtcaaacggacaccggaggtgatcgaaaaaatccgttcaaagtttgaacccccaaacctttgacttgcgatcccaagctaactgcagcgaaaggagcgattgcgcttgggctaaggtcgctggctcttgggctttcgatctgtccatcgcatgtggctggtcggtggctggaggtggttcgccggagtgtggtggtgatggtggtttgtgggtttttcttttgtgtttgtaagagagagaaaaagagagagtgagtgaagaagaggacgagggagtgagtgaaaaagggggtcggactattatttttttttctacatatatatatattatatatatgtactttttgactgggtcaaaccgaggtagtacagctccctattccaatatttgggtaggagaactagctccatgttttggtaatacctgcctagcttgtaggcttccttacttgttatctgtgtaatttggtaagggccttcccacttaggttcgaacactcctgttgctagatctttattgtttaggaacactcttaggagcaccaagtctcctatgaagaatttcatttccttgacttgttattgaagtgtcttgcaaccttttttctattaagcatgcagcttaaggttggttcggtctttttttcttctactttgtcaaggggtttcaccaacaagatgttctttacatcttggttataagttatcatactgtgagacagtggcacaagctctacatgcaacattgcttcatagccatatgctatagtaaatggagttttcctggtggtcgtcttctcggtggtcctgtgcgaccaaagaacctctaggagcaatttttcccaattaccttttgcctcttcaaggtgcctcttcaacgtgtccttaagggtcttgttcacatcttctagttgctcattttcttgaggataggccacagaagagaagcttttgatgatgccatgtctgttgcagaaatcagtgaacatgtcactgtcaaactactttccattgtcttacacaatcttctattgtagtttgaacccacatgatgttcttgacaacaaagttgaggaccttcttggaatttattgtttccaggggttcaacttctacccacttggtaaagtagtcgacaatgactatgacatactacacccctccttttccctttttaagttgaccaattatgtctattccacatacaacaaagggcaaaggagagtacatcattgtgagctcgttgggttgagtgctagggatttttaagaatctttggaacttgtcacatttttagacatagtccatcgaatcctctatcattgttagccaaaagtacccctattggagtatctttttggataggcttttccctcgacaggatttccacagaagccttcatgaatttctatcatcaaatgcttagcttctatctttgtggcactccttaag

SEQ ID NO: 309771 - DNA, 1261 bp, Cannabis indica
aaactgtttaaaaaaatattaaaagtgattttttttttgtttttaaaattttgatttctaattataaaattgaaaagtaaaaacagttttatagaacatgtttttgaaaaatattttcactttttcacttttaaaaacagaaaactgattaaaaaagtattatcaaacgccaccttaatgtttaggataaaattaaaagtttataattacactgaaaccacccttaataaaagagaaataaatttgactcgtttttttttttaaaaaaaaaaaaaattagagtacaatgagtactattagttttgcttgaaaggtgtatgactgcggttttgaatgatgcactattgtccgtggtttctctatgtataactaatataaatatatattatagtaatgcatgtaatatatatttttatttttgtactttctacttgctctttgcatcgtattaacatcaaaatttgatgtaagtttccactattatgacaataaataaatcataaccatttgaagctagtaaaagtgattataggtggttgtgtgttggaggttctgagttcgagttccaagtaacagatgattgtaattaataaacgcttaaataaaaaaaatgacaataaataaatcatagataaaatattatttatttattattttattttttaaatctcatattattcatctttttatttttgttgttccactattttagatttaaaataaaaatatcttcatttaaatttaaataaaaaataaaatattaattgataactaattatcaaaatataataaaaaattaatgatatattaattgatattataaaattaataattaattaaaaatatcaatatacacataatatcttatatcgtagctataaaattagttaaatagtgtttgaatttaaatatacatatatgctagacacaaattaaaaatgtcttaatcgtaataaagataattatttattattaataatattaatttaaattaacatataatttgttaataataaagttttttcataactatatagggtaaacactattttgaaccttttttattttgtaaaagttactaattagaccttttgttttgttaaatgataatatggaccatctattttccaaaatagtacatataggaccctgaagtgattttttgtcaaaatatagtttaataataatctgatctaaaagtattatgacaaaacaatttatattttctgtatctgttcgtgttaggaattgtcttcaaatt

SEQ ID NO: 309772 - DNA, 2094 bp, Cannabis indica
ggttcgggtttggttctgggtccgggtttgggtccaggttggggtcggggtccaagtcttattccaagtctaggtgcgggttttttagatctcgatctgggtccaggtcttagtcaaggtctaagtttttatcctggatttgggtcccaggttcagttgtgggtttgcatttgggtttgggtctaggtcccgtgttttgatctcggtctatgtcttggtcggtatttgggtccgggttgggttcgtgtccatgtcgaggtcgaattccaatttcagtcaagggctcggtttgggatcgagtctcgagttcgggttcgagtctcagtccttgtctaggtctgggatcgggtccaagactgggtccgagctcgagttttggggttgtgttcgctctagttccgagtcgcggtccaggtcctcgtcactgtcccggtcctattccagggtcttggtcatgttctggttcaagtttcggttttgggtcccaggtttgggtctgggtggaggttctggtctagctttgggtccttgtccgagtctcagatcaagacatcgacaatggatcttgtccaagccccggttctctaatcccgggacaacatctggatcccaatcacgggtcccagtcttgtttcagttcatgtctcaggtcccggactgggttcgggtcttggtataggaccgagactagggtccagttcttggtcccgagtcatgctcaatgttcgggtctgaatttaagtctgggttcgggtcccgagtactggttcgggtttggattcaggtttggacccaatctcaaggtgggtttgtgtctgagtccaggtcgtggtccggttacagttttgggtctgggtccatgtcctagtcctggtcttgttcctgggtcccgatctgcttctagtttcggttctagtttcaagtcacgaggtacgagtttggatcgagtttgggtctgagtctgggttcgggtcctgatttgtgtctggggcgatgtttaggtttgggtttcggtctcgggtagggcgcgtggttgggtccagtcccgggtttgggtccgggtccaggtctcgatccctttcaaagatctcagtccggttcaagttcaagtttcagttttggttcccgagtgtggttctgggtcttggtatgtgtctggatcctggtttgagtttgagtttgggtttgggttctggtctaagtccgagatccaaacaccgactacaggttgggttcaagcatcgagtctcgaatccaaggtcccgaggtgggtcctatgtccaggtttaagtctagggttgggtccccgatcccgatccaagttcttgtcctagttctaaggacaaattcttaggtcttgttcccccatcaatgttcgggtcctaggttcagtccgggtccaagttcctgttctggttcgggttcgtgtccagcccgagtccatgtcccgactggggttcttgtccgagttcgggtgctagtcctagtctgggtctgggtttcgggtgctaggtccgagtcttgttcttgggtcttgggttcggccccggtttttgggtcttagtctaggtcctggtgctggtctgggtccaggtcctggtcttggtttagttcccaggtcacaagtcctgttttgggtccaagtcccagtttgggttctggttagagtttgggtttcggtttgagtcctgttacagtcccagtccaagtcttattccgattctaggtccggtatcttgtcagacctgaacctgggacccaatcccagacccagactcggacttagacatggatctagatacaaacctagactcgaaccccgacccggacccatacccagaccgggatcgaaacgtaggacctagatctggagcgagacccagacccaaacctggacatgtacccaagacttggactcggacctggacctggacccaaacccagacccatatcgggatccgaacttggacccagacccaaaacaaaactcggacaaataagaccccaacctagactcgtacccgtatacgaagccagacacggaatcgaaatgagaattaggacccaaacccaaacatggaccctgactgggac

SEQ ID NO: 309773 - DNA, 1565 bp, Cannabis indica
agaacaacactcaaaatagtgaacagtttatcattttgctcataaaacacggagcttttcagcaatttcagggttttcttttggggtgtgattggttttaagttctctttattatatcaaaagtgagaagtatgatttgatttgatttgaccctttataagttgacttggggtattcaacaataaatgtgtcactcaggcaaaacgtcgaacataggaagacacaaacaaaaacatgaaaattaaggagcaattcctacatcaaaacagattctctctcttacatccaatgaccgaattaaatcattaaaatctgaaacagagtaaaacccagcctttggttttttggtacctcagcctttggttctagttctttagtaaaacccagcttccaattccaaagtcttgcgtgtatgtcttcttcaggcttcgatttcaaagtgagaaccctcagaaaagaatcaagactagttcttcactctcataacttgttaaagaggattaggattaagtgttcgctgttgggtataatgtcaaatttcaatcaactttatatctctttttccgatcacattcacagggttggttatatatatctcaactcggaccaatgatatataacactctatacatacacagtgatggtctaaatttattaggggtgtacaaaaattttcgtaaaccgcccaacccgaataacctgcccaaactaaaccaacaaaactgataaaaaatacaaatccacataacttgacaaaattctaaaccgcccaatcagttaattgggcgggtgaaaattgactcaaaccgcccaaataaaccgcccaacccgatttaacccgatttttatttttttttattttatatatattatataatacataatatatattaaaaaaaaaagtctcaaatcctaaaattttttctcaacctctcaataaaattttttctcacaaatattgtgtatttatgtagttaatttttattttagttgaaactaaaaaaaaaccctcttatttcggtttgggcgggttaacccgaccaaacagcccaaaccgtcggtcgggttaagattttttttttttaatttggtaggttgtatgcagaattttacaaaccgatctttacgttgggttagaaaatatgtagtataaactgactaaaccgacggatgtacagccctaaaatttatagtagatgagtgttaaaggagttgcactctctttattataattgatttgtagtgtttaaacattacaatattgtaaattattttaaatttttcaaaattttacacgatatcttaaataaatataatatataccattatgaaaaatattagaccaaaaattttttagatatcaaaagagataaaagtatatcaatacacccattttaaagggtgtattgtaaaagcagctaaaaataattaacttatttttttacttataactgaataatttaataattgcaacacatttttttagggaaagatcattgcttcattaattgagaatctcaaggacaacgtccattacaatgctcaaagataagtaaacgcaaatc

SEQ ID NO: 309774 - DNA, 1465 bp, Cannabis indica
tttttttttttttgttattttaatttgttatcatcaactaaatttgattatataaaccaagtttaaaaaataattaaaacccaattgattttgatcaatatacatgcaattgaatatcatggattttagtgcagcaaaatcaatatttctaaacattcttcccatacatatacgaaaaatcttatttttaatcataactgaatttgtgactaaaagtaaaaaaaaaattgacaaattttaaatcgtcattcttatattgtgactaaaaagtctgtgactaaatgtattagtcacaaaaatcacaatttatggtgtctaaatatttttttattcacaatatacttgttatgactaaaattaaattagtaacaacttgtatttaattattatattttaattacaagtaacattttattgtgactaaaaatcacatttggtcacaaaaaatttatattataactaaaaggttgtcactaaaagtagttttttttagtgataccttagcaagcctagctaggtcacctaagaccccattcttattcttgatggcttaaaaattcttcaagtaaagtagctcatttaatttttttttaaaataccatattttggatttttataaatactggaaaattttcatttttataattattttggcatattttacaaaaatatagttttttttgtcgaagaaaattattttatggaaaaaattaaaaaagagaaaagttcaaaagtatgggaaagacaatgtaaagtaattagaggaataaccagttaagaaggtaactagttaccgtatgttgttttttctataaatatattttctataaattttttgaaaaaaaacaatatttttgcacaaattatattaaaattcataaaatatgtaactttcacaaaaataatatgaggaataacaagtgatatatattcgagtcatcttataaaaagtgataaatggtaataagttattttgaatagacaaatttatcgaaatttttcacaagtcaagtgagaaatatattaaactacatatgcaagcagagcaaaaataatcgttggagtattaaaaatttaattaagtctcctttgctggtgactttgcaaggctacttatgtttcaaatattccctcaattgatcaaacattaaattagttttcataacattaattataaatgttatctgaaagaactgaagacactttatattataaagtgttttcatagacttgcaagtttttcccatcataatcgtgaacctttttgttcattgatattttttactcttctgattttacaaaaccttgtataatttaataccttttgcgacccctacaacctttcccataaggcaccttagaaatgttatgccatccatgatgaaaataggatctgtattaaactttacattagtatagttacagtgccttttattttactgctactgcttgtttattttttgtt

SEQ ID NO: 309775 - DNA, 1240 bp, Cannabis indica
aaaaaaaaaaaaaaaatcttgttttgttttacagaaaatagtgtataccatggtttctgcaattaagatattaatttgagaaattgtatggatttttatatcaaaatggagcatgaaggtggctttttatatgtattaactaaattctatccattacattaattcataataatatcatatggaatggaaagagactcaaaattcaatcttcttcaggtaatttctcaaggtgattagctctcagatttatttcttatttaattttgtatttgttaggaacaatatctcatgcaatttatgtcttatcttattatatgcattccaagtacaagaaatggatatgcatgtattaaacattttccacttttgatataattgcatatatccaaaattttcacttgtttttttttattgaatgaaaaaaaacttctcattaggcctaagtcaaatccaagcccaaagacttacatcaatttgagtaatcccaccaaaccctctcatcatcaagagaaagagctaatttagcaagattttgagcaattacaaaataaaaatttaaaaacattaagattattacaaactaaataaatatcttataagacttaaccataaaccgccaaatgttcaacaacttaaacacaatttggaaatccatttggtttttcgacttctacattgagttagccaagccaaaaacataattggagacccaccacataatgaaaattgaagcctaattaatttagatcttttgttgaggttatttttcttaaaatataataataataataatactgtaaagattcacaaattactcataacctaggtgtgttagttgtaactatccaattttaaaaattgtattgattcccacatagaaatattaaacatgttatacaataaacaaacaattatatatgttagaaactagttgctgcagaaaataaaaggaacgaagttaccgaaatagaatctgggttgagtcgcagactaggtcgctctctttaagacgttcgcggcactgcccagatttgtgcaagcagactatcagcctcgtcgtccccaggataaaacagcccaatcgaacacactgtatcggaactctattgcacaatagaaaactgtcgaaattaaacacccaaaaccgactactgctcgaagtgaaaatataaatataaatatataatatagtagtgtgtatatatcgtataattttttcagaatgaaaagttgtgttttt

SEQ ID NO: 309776 - DNA, 2117 bp, Cannabis indica
gacagtactattgaccatactatgagcctatacgcggtattccagtcataccctagtcgtaccgatgtgatagtgttaattagtacttgagccaaacatacatatatcagtatccaatacaactctacgtatattgatatcgctatcgatgtaatctaacaggcttaataaacatgcacgctaaacatgtaatcacatatgcatatcattatactaatcttgcctagcttccgaattaaggtgtgtcggtcaacctgagtagaacagttgctcgacgatttataagcccctaagtcacaatatttgcaaaagaggagtgacacactaaatcactttttgggggcttaaaatcaaaactaaaagtttccctatcgatggataacatggaaataccctaaatatcgcaaaaacgagaaaatctaaggtgccctaaaatgccccaaccggtagactagttcccaaccggtaaccgtgtttcaaaatctacctgaggggaaccggttcacctgttccactgaacaaaactgaccccaaaaaattccaaaaaccatacaaatttaccccaaatgaaaccaaaccttctaaaccacctaataaagccccaacaaacataattcaagtaatgaaacctataacacccactaaaacataaatcaccattgaagagcaaagtttgagttctaaaactcaaaccttgctcaacacaacactaagcatcaaaaactacttaaataaaacccatttcaatacaatcttatttgttatcaatagaagatgttaacgtagattttcgttaactaaaattgagcctcacaatattaatctcacatagattgaataaaagctatagaaaaataatgtatgaacacagggttttttacatggttttgcagttaaaattctacatagcccacaagtcaatcatattcaaatttctaattgttactttttttaggaactctcttgtatgagttcttttgtccccctcctttttcttgatcttgtcagccactatttataattacatagttgtttgtaaatcacaaaagttgactgtaattgttacaacaattattccctcaaataacgggattcgattataaatcaagctaagtaaatgaggtaatttacacagctatgagtatcccacttttattgggcggaaatgaacccacatttaagggtatacagtaagccttatctcttaggggtgcctcgctgggaatggaaccaagttatctatgatgaggagaagttgctcgtcatctgtcttcccgagactaatattattttgactttgataaccatattttttggtgtcgagatgatttttctcgcatgcatgccaccttctaccgagataaatacctcgctgtttgttatcttgactcgcctgactatctacacttaatttgtacattgtgaaatatacgctaagtgtttttatcattattgattctctttcaggcagtgagattaaagcctcctcatgcacactaacctcgtatggtttctcatcgatacataagttagcagatcatacgtttctgtcttacagaaggctatgcagccagccgacttgtaaacatactttgcgaattatgtttctaaaaagttgttccatgctaattgtacttttgtttgcgtgtttaagttctttgttattccgagcttgacacatgtcttcctctaatgtgcttaccaaatttcaggtataacaattgccccttaaaaagttcttttaatttaaaagagctttttaatgattagaaagggtatttctgttatgttcctctttttgaaagacgcatatcctccaattttggcagttgtgtagtttcgaggtacattagaattaaatgaccatctttcccacttctactttgaatcatgtccataggatcaaatctatttctgatctaacgaagccactatcacgggtataaaattagaaaaaaggagtcacctttgcctcattttctccatttcaaaaagtctgagaaaaaccttaaacttcttcatcaaggatcaccattaattttatccaagaattttcattccatctctgtccttaacctttttccttgcgagtttcctttgacttcatcctctcaaag

SEQ ID NO: 309777 - DNA, 2180 bp, Cannabis indica
aaaaagtcttactcttcttcctactcttatgttaattaaattaaagttgtgtccttccaaaggcaccgttggctttaatcattcaaatggaaagataatatattccacatttttgaggccacaccataccaactagattgcatttatattaataacccttctcttctcacctacaccaccgttgccattgccacaacttcaaaaaatttattttatttatttacttcttgctctccatgtgtacattatagacataaataataaactcagtcgataaaataaaatccaacaaatgagatttaaattccttttttttttttttattaaaatatatgtaaaatcttggttttgtaattttagttagacaaaatattgttcaatagtatttctagaatgcgttgctggatttgaatattttaataaattatattcatttaattaatgatttacgttattataatatttatttatggtattggtttaaaataaaattagtaattatggtaattaaagtctgattttttaaaatttgtttattgatatatttatcaaatattctctacttgatttgtggctttcactatgattttctagctagagatttaatacttaaatggtcaaaccaaataaagaatctaacttagcttgagtccagattcatcgtattctgatgcaacaagattttaattccacatctaggttttgacctctttttactttgcattttgaatatttttgaagaacttttgtttgttgtgtaaaggatagatcattttcagttattatttctttgtatgttagttctctttgtatttgtttataacttaaatatttttaaagatagtaaccatggtacttgatcttcagtccggccactaaaccaaacaatcagacaaaaagaaaagctgaaatcagtgcaagggaaagaaaaaaaaaattattgtttttaaaatgtatgataaaattagctagttttgacaatgaaggggatgatgaaaagaccctattaactagaaattttaataaatacatgaaaatagacttcaatgtaaggaataatatttcttctaacattcaatacttaacaataaagatggaattcaatgtacgaataatgtgatggttatgaatgtgataatactttgaaaaataaaataattaaaaagttttaacattaattggagtgacaataattgaggagtagtgaagattatttaatttggacaatattgatttaatttttgttatttctagaatgccttatttaagaaaatagtttgtgtcgatgcgattttccttaacggatctaggaagatcgtaaacgagcgagatgaacacaagtgaatatcgataaaaaataaaccggtttgtggaatgaatttgataatgataaacaacaaaattttatagtagttcactctcttttagtgataataggctagtccacttgaagtattagtgatctcaatgcttgaggagaattctccagagttatgttctccaagagttcaatcctcaagtgagttttgggaatgagagagtgggagctcatgaaaatgaatcgtatgtcacccctttatatagatttacatggtatgttttaatgtcctttcacccaacatacatcttttttaattatgactgggttaagtttaaaatataaaataatatttcaaaaaatatatatatttaatgaatgataactcggggagatattttttgatggcacatgccaagcgtgaaagtgcctagctcgaaaggttggtcatgccaatttggtacgttggtcatgtcacgttggtcatatcttgttggtgaggtgatacatctttgtataacggagcacctcagcgtggattcgatttgatgatgccgggaggaagtcaaggtgattggaaaatgtggttcaaccatgaggacctcaaccatgagagagttattttgacgccgtggtttggccatgaggacctcaaccatgggggaggtgatttggccgacgtggtgtcatgtcgagatggagccaaacatgacgagtcacggtggtttctccacctaagtgtaggtcgaggtgattggacataacgcaaccacctaggcgtaggttaaggtgactggacatggtgaaaccacctaggtgtaggttgaggtcattaggcatggtgcaaggatttcgagccttt

SEQ ID NO: 309778 - DNA, 724 bp, Cannabis indica
aggagatcgaaaagtttgagttaacagatatgattgcagcttccaaaattcaatgtcatggcattaaaaggtaaaaatttggcagtaaagtcgtgtttagaaggtttgtaggcagacctcaatgttgggattcaatgttgaggcatgggacttgttgttgctcactgcttaaattagagcttcaagggctgcgacatgctctggcagtgtcacggcacactaggaaaaatctggaagattcatccgtgcttaaagagacataggctgcgacatgctctggcagtgtcgccgcccgtagctaatttggcaaaattttagggttttaatcctaatgtgaggctttataaagggaatgttggcacttttcaaagaaaagggacaaaaattggaagcagaaggcggttttggagactttcatccatatttttcgacgagttccttcttttatttattttgttatattcttaattaattgttggcattttttttcaatgactacgagtagctacactttcaactagggttgttaatggaggttgtttgacactttattttggtttaatgtgatttaattcttctctccaattttttgtgtatctatttcattcatacttgattgcttttaatatcttgatcaccaattaactatttaatgatttcaatacaaaatttgagaagtgagtattgattatgctacagtaaaatagacacaaattttgatata

SEQ ID NO: 309779 - DNA, 1130 bp, Cannabis indica
gaatttatacattaaacataatcatgaaataaatcatttgatccatgcaagaaagaattatttctgatcttttattaattactaaatctaattatattgaaattagttttatttagggcacgaaacccaacagttcatgtggaccaataaacaagagaagggagaccgtatcttctctaagcttgatagggtgtttaccaatgagatgtggatggatatttttccaaataatgaagtaattttcaactgggaaattatatctgatcacaccttttgccttgtctagcaacatgatataggcaaagttggtatcaagccattatgcttattcaatcactggatgttgcacatctagtataaagaggtggttcttgaaaactagtttaaactagttagtcaaagtggtctgtggggaatagttagcaaacttttcaagctgaagcacttgataaagagttttaataagaaataaatgggagatatttctatctccctaatctcggctggaaaagtctattatgcagctacaatttagcataaactatttcttcccaaacacagattcatagcgtggcaaatggtaaatgaccaacttcttactcaggctcaccttagtaagtgttatcccaaattttgtccacctaacgtggcatgtccttgtaagtgaagatagagtaaatgtggaatacaaccttgccaatagcaagacaaggtctccataaaaggtatggcaaaaccgttaagtagcaaccgaaaggagtgaagtgagccatcaaggagatgtaccaacttggctagccagcaaagagaagcctataggtcggccagggtgagcttgtacggttggccaagatctgggcacaagttggttagccaaaaggtaactttcaaaccaagggagcctctatttcctgacctctgcaaggaaaaagtttaaaaagctagcctccacttgccaatggctgacctccacatccaaaggttggcctcctcttggtaatgctgataggaacatgacctgccagatcttggaagacatgacctgtcagaccctggcaagagcatggccgactaagattgacctggcgggaagcatagctggcgaggattgacctagcaggagcatggcc

SEQ ID NO: 309780 - DNA, 1101 bp, Cannabis indica
agatccccaaatgacaatcaacaaggaacagttcctcttattatactattgctctactattctttttctttcttaaaatcttatttataataattggctcttagaactccatatccccaatcacaataaatcaacaaggcttattatgctataattaattataagtaggcaatatatatacaataatattggatggagcttaaacaaaattcaagtgaatatatataaacaaaacaagagaatattgtaataataaagtcaaaaaaagaggagagagaggggccatgcggttttgcaggttatgattgaattataagagggaccaaagtgcatgcaagctatgtagcgtagtgtgtaaatttaattggaggaaattaaaggaaagggaatgggtcacaccacaaaacacgccaactataatatatatatacccaaaacaaaaccacttatacaatccaacactttgccatttgtcaccacaaaacgtacacatgaagctatatacacaagacaagccctagctccactacatacttttgtcaaaagataatttggagaaaatgagtattatacaataatggcttgtaacatttatcttattattattattattgctatagagtattgttattttggtatatacgtacatattgtagtggtacggtacttaatttaataaagagaattgatacatgataatcaatgaaattactaatcacataaaaggtttaaccagataatatgtagtgttgaacacgttagcgaccctaataacaatgcttatttattagctgaattataatatttctgatataaaattgcaaattagtaaactcattttattgtgatcaatccaattacctttgatttcgaaggaaataataacacgggttggtaaattaatttaaactagctagatagatatattaaattgtactaggatatcatatagcagtattctttttgggttggtgagattattttatttatttatttatttttttgagtgaggttgtaatattatattatatatatttatcttagtggagggttgatttatttatttatttaattatatattaaggtctttcggaacattat

SEQ ID NO: 309781 - DNA, 610 bp, Cannabis indica
tggaaatgtttttaggatttaagtaaccgtccatatctaaagttggtgatgtgtttaatttgactattttctttttcttgctgagtttagtttgactattgtggtgagtttcacctctcatcgtcacaatgaataataaaagtaattataagacttgtgaaattataatatttaagtgagagtgatgaaggaaacttacattaattaaaaggaaaaaaagagtatattataaatgaatgaaatgagttcatagatgtcacacaaatagttattgagacaacgtaattgtaacgcccgtactagaaattgctaaactcaaaagctaataattttttttatatattataattaattaaacatataggtcgagatcccaagttataaaacacagtaaaaactatatttgttattacaaaatcccttgaacatttttttttctttcaaacaaatgacagtcaacacaaaatacaactcaaaatattgaaagaccgaaaccctctaagttgcactgccgcaatatgtgcaatcactgtcgagctccatctcactgttcctccagcttagcttttcccttacctacacaaggtagcaaactgatgagtcaacaaac

SEQ ID NO: 309782 - DNA, 1212 bp, Cannabis indica
atcaaccattgatattgacttagaaagttaacaacaagtttatgatatcttattcaagatcaatatcggtcccttacaatgtatactccatacattcgatactcgtaaacgttgccaatgccctggaaaggacataacacttatccaaggtgtaagtataccttatggccgattatcatgtcagtctaaatccagtaaactgacaaatcatgaaaattaaactttcgaacatataatcatgattatattccattgtgctgatgacactaatcatgaacatatatatatttatatatgttctggaactaatagaatttatacattaaatataatcatgaaataaatcatgtgaaccatgcaacataaaagcgatttctgatcctatattaattgtaaatttgattatattgaaatggattttatttagggcacaaaatccaacagtacaatgctgtcaaagaaattcttcttcaataaaaactcgcgataggtcaatgtgtcaaccttctcaaatcctctctctatctctccccaaacactaccacaagaaattgaacccttatctctgactacatgagcatgcccattcgcattgaattcgaaaaatacctgggcctccctcagtgctttgggcgttccaagaaacaagcttttcattacattaaggatcgagcatggttttacatttcgaattggaaaaataagtttttgttctaagggagggaaagaagtccttatcaaagcagtcatgcagtctattccttcctatgctatgtcctgcttcagacttcttgtcagcattaactactctttggaattaatgatggtcgatttctagtggggaaccaatgctcaaaaccatcccaaaacgcattggcatagttggactactctttacaaatctaaacatgatagtggtctgggctttagatttctcactcacttcaacaaagcgatgctttataagtaagctttgagcctgttaaaaaatttagcctcccttgtggctaaagttcttgctaccagatatgtaacaccctaactaacataggcgtattacgtgatttttaaacatgctgtgcagctcgttgctaatcaacgaggtttatggaaaaacgtgattaattaaaatttttactttttaattaaacttagaaaataatattacaaaagactcgggatcccgattacaaaatcatttacaaaaaggtt

SEQ ID NO: 309783 - DNA, 1862 bp, Cannabis indica
gcaccatccacgtataactttcaactctccatgtctcggtgaacatgtggaatttcgtctagagttatgccttctattaagaagtctgccaaggcttggcctttgatggatgtttaagggtggtatgttatgtcgaactgccccagttcaattcaccattttatcaatcttccaaaagcatctggttttgataaaacttgtctcaagggctaattggttaaaacctttatggggtgtgcctgaaagtacggccggggcttgtgagacgtgtgggctaggcacaaagcgagttatttgagagggggatatctagactctgtcctagtaaccttttacttacatagtaaataggtggctggtgcttaccctcttcttgcactatagctgcactaatcgcatcttccgagatagccaaatcgaggagtaacatttctccagttattggttttgccaaaactagaggcgttgccagatgccttttaatgttctgaaaaacctcttcacaatcttctatccactcaaatttcttgttgcctcgcaatacattgaagaatggcgaatatttaccagttgacttcgaaataaatttgttgagtacatccatcctccccgttaaggcttgtactcctttaggctttgttggtgatgacatgtctatcaatgccttgattttttcagggtttgctttgataccccttgcgttgactatgaatcccaaaaatttctctgaggataccccaaaggaacattttttcgcgtttaacttcatattatacttgtttaatattttcaagcattccgcgaggtctgtggtatgattcccactttttactgactttactaacatatcatcaacatgaacctccatgtttcgtccaatctgattagtgaacatctcgtttaccaattgttgatatgttgccctagcgttcttcaacccaaacgacatgattttgtagcagtagagtcccatgttggttacgaagctcgtatgttcgtgatctgggacatacaattttatctggttatatctagagtatgcatccatcaatgacataagctcgtgcccaacagttgcatccaacaactggtcaatcctgggtagtgggaaacagtcttttgggcacgcattattcagatcagaaaaatcgatacaagttctccaagtttcgttggccttcgggacgagaacaggattggctatcctcgagggataaaacacctcgtgtataaagtcactaactaataacttgtccacttcctgttttaacgccccttgtctctcggaatcaaaaggtctccttttctgcctctttgctgggtagtttgaatcgacatttaaatgatggcagataatactagggtcaattcctacaatatctccatggctccaggtgaactgatccttattcgcccttaagaaacttattagctgctattttagctcctcgtccaggatcttccgaatgtaaacacactttgtgggatttcctagctcgagaacaacttcttcaaattcttcaattggttttaataattttctttcatcttaaagtcgggggtcaagatcctcgtctctcttttccgtttattctgccaagaccacaattaactgatgaccgactcttctatgttgtagctctatgcgatagcagtcttgagctagcattttattgcctcgcaccactcccacaccctttggtgtttaaaattttagggataggtgcttgatcgaactcactgccgctagtccgatcaatgctggacgacccaacaatatattgtaagctgatggcaggtcgacaactaaaatgtcttgcataattatggcagataagggtgcctcgcccaaggttaatgcg

SEQ ID NO: 309784 - DNA, 970 bp, Cannabis indica
gtgtaggtaagggcaaggccaaagttgaggaaccgtgaggacgagcagatgaagattgtacatgtcgacgcggttaggcctggagcgtacgatcctcgggacatcatggcttttgtagttagtcgctgggcgacaaatattttgtattgaatagcaaactttttgtaaagtgttttgtaaatgggatcccaaagtattttgtatgctacattacaagtatttaattaaataagtaaaattttaattaatcacgtttttcattaacctcgttgattagcaacgagctgcacagtacattaaaaatcacgtcaacacgcctatgctagttaaggtgttacaaataatataacagattatatatagattcacaacaagaaaaatagagtacaaacggttatggaaattagttaatggaagtttgaaaaattgcagaaaattgggtgcgaaaaaatgggttttgatcgtgggtggagacgaagttcagttatgaatattttattttttgaaaaaaaaaactgaaacaaaattgaaaagaaaaagaataaaaagaataaaaatagagagggaaagcatggagtgattaataggggtcaagggtctatcacatgacgtgttttaacacttgtgttgcatgtaatgtgtgtgtaggtggtataattgtaaataaataacttgaagtgtaaaaaaataagtacacgcgtgtgtaagtatatatgtaataaaaatttcattttatatttgggctattttcaaaaatatgggaaaattattaaggttatgataaatatggcatataaagtaaatcctactaaatattgcattatctaaccaatcaaactaaaagtatgatttttacaaaaaaaaaaaaaaaaccaatataaaacattaaaagaaaatctgaatttaagattcataaaaataaaaagttaattaaattaccacaaaaaatattaaaattactcttcatatt

SEQ ID NO: 309785 - DNA, 607 bp, Cannabis indica
aaatcaacatactgatccactgtatacgtggtttgtactgctaaaaagtgtgcaaacttcatatatcgatccgcaatcacccaattaaagtcatagtaccctaccgttcttggtaaccccaccacaaaatctatggtgatgtcttcccacttccactcggtaatctttagaggttggaccaaacctgccagtctctaatgctctgctttaatttgctgacaagttaagcacctcgacacgtattcaacaatgtcactcttcatacctagccaccattatagggccttcacatcatgatatattttagttgttcccgggtgtaaagagtacggtgtagtatgagactcatcaagaatctcctgtttgatatttttatcagccagtacacaaatcctggtcttgtattgtattaacccataagatgaaagtggaaagtcttttgtcgatccagtttccatgttctctttgtatccctgtaactccgaatccttttgataagctattctaattctttctaacaaatcagtttgcagggtaatgttagaaagttttctgacaagaaactcaattctcgctctagtcatatcttcaaccaactctgttaaaa

SEQ ID NO: 309786 - DNA, 988 bp, Cannabis indica
tctctctttgtaatatttccaatatcaataaaatgactcaatttgtgtgtactgcttgctgtttgggcaaaatccataaactttccttccccaaattttctgaaacaagttatacagctcctttacaacttattcattcagacatatggggtccatctttcataccatctcataatgggtacaaatactacattcattttgtagatgcgtactctcggtttgcatggctctatttgcttaaaaacaaatcagatgccatcaaaacatttcatgtttttaaagttgaagttgagttgcatctaggcactaaaattaagatgtttcaatctgattggggggaatatagatcgtttacagacactttacatgctgctggtatattgcatagaaaaccatgtcccaccacacatgaacaaaatggcatagcagagagaaaacatagacatattgtagaaaatggtctcacacttctagctcaagccaatttaccactaaaatactgggatgaagcattttgaacagctgtatatatccacaacagacttccaacacctcttctatccttcaagtcccccatagaagtgttatttcatatcaccccagattactccaagctaaaagtgtttggttgtagttgttttcccaacattaggccttacaataaacacaaacttgagtttagatcctctccctgtgtttataggttatagccttaatcataaaggctataaatgtttggatcagtctggccaattatatatctcaagagatgttatatttgatgaacattccttcccctcttatctcttcaaatcaccaaatattccatctcctgagttcacatctgctacatctagcacaattcctattgctcctatttcctatactgctgagtcattgtttcccagtgatgatgatatgacataaactcacactaatgctgctggtttttatgacttatctatgactgcaagtggtgaggagcaca

SEQ ID NO: 309787 - DNA, 895 bp, Cannabis indica
cataattactaaaatgcccctagttcaccaacggggtcttaacatataattaatcaaataatttctcatatattgaactatataataatataattcctcaattattcataattatctaattagggttttgctaatcaatttcttaattctagggtattacacaccctaaatgtaaagactgcttaattttaatatgttaaattagtaaataattagggcttaattatgagattgagttattaatcatgacttacaaaattgtggagatttatttaaatttagtatgtactaattatgctttatatgtgaatttcttatttttcgtaattgtgttcggtagcagtagaatgcgacgttgggccattagagagagtcacgttttcatatggtttagaatgtttttaatagcgatggacatcattattaggcattagaaatttcgagaaaattgtcgggattcgaaaatggccacattacccatagatgtcattaagctttttgtattatgttaaggggtatattagtctttttactagaggaacttttgtcttttatgggcattattaatcagatttaattatccaaatttaagtaattaacattagacatgcataactatagaaaaacctagaaactacccctttcatcctacaattctctctctctctttggaacaccaaagaaactagctgagaattatggatttttcaggtcattttagtgtgcttttagcatagttgtgagcttcaatccaaggtatatcaccctagtatcttcttcctttgatttctttaagtttaagttaacttttaatgcaagatttgggaaataggatgttgtgatgaggaagctgttgggttttatgccctaaataaaactctgtttcaatgtaatc

SEQ ID NO: 309788 - DNA, 1212 bp, Cannabis indica
tccacgtattttgggcgaattttggagcaacacacataattaataaaattttatctttcttaattttaataaagtaagcaaacaattgtaaggaaaatactaccttaccattaattctgattacttattaagaagacctacttctgttagaaattttatatgaatgatcatatgaaacatatatatatatatataatcatgtatgaagtgtagaattaatctaaattatatgtattgtatgaaaaaagattcgaaatactttcaaccattaattcttagagcttcaattccacacgagcgttggttctgtaaaagtaaagaaaaatgattagtatgggtaattgagcttttaagctttctctactctctttagatagatttactttatttcacaaaataaatagtgaaaggtaattgatactatatatttctatctacacctaatgatctagaaaaatgagtctaatatgtgtcttatttaagataataacagagcaccgataaaattagaaaaaaattacaattttataaatattgggtacttatgccgctaaaaataaatattaaatttatgccgcttataaacttaaaactttgggtacttatgccgctaaaaataaatattgaatttatgctacttacaaacttaaaactttgagtacttatgccactattgaaaccaaaaaaaaaataacaacaacaaaaaaattaatattatatgtatgctcatatagtcttctacactattatatatttattgataaataaagatagaaaaaagcattcaaaataagaacaaaaaaaaaaaaaaaatgaaaaaaaaaataaggagaaaaaaaaatgtaaaaaaatatttttaaaaaattagtttaaaagagaaaattgagtaaaaaagatgagagaggtttattgaaaaaaaggaaaaagaaaagtgaggttaaaaaaaaggacaaaaatattaataattggtacaaacaaaataaaacacacaactctaaacataaaccaaaaaaaaactacaaattactaagaatcttatttagtttgagaaaatataaagagcacactatataaaaccttacctaagcggtgcgtaacaagtaaaaaataataaatattatatttttatttactattttaccacttattaatataattaatcaccttttacattttatttatatatttaatacaactttatatgctttttaa

SEQ ID NO: 309789 - DNA, 1609 bp, Cannabis indica
aaatcatgtctttcgaactttgacatatactaaatcataccccttgaactttcattcatgttagaccttttttataagtcattaaatctaataatctcaataatttaaggggcatttttaacgaccttaaaaattcaagatgtatgatttgataatgtcaaaattcaaaaaataaaaaatcctaattagacctaataaacaaaataacaattaaaattaatagtttagacatagattggattcaacatatatattcgtaaagacactattaagtccctgatttcggtttgaaaaaaaaaaaatacattatttattaaaagagaaatgctaaagagcaccagtggtgcctagcaccctcctatgtgtcaatatcgttattggtccaactaaatatcgggtcccatataatttaatataatagcttttaaggagtatcgctagccaatcgcaacgcgcgacatgtcgagaagatgtaaggcaccactggtgcctaatagcaatgctcttattaaaatacatatatagtgatcattgataatattcagttggcacagccataagaggaaactttctatgcgtagtcaaacctgtggtttcagtcatatgataataatccaaatcctcttctccactactcaacaacgcccaatcaaacttatagaccacactagccaaagcaagctcgttaacagccatggcaaatacaatcccagggcagcctcgcctcccggccccgaaagggatcaactcgaagtcatgtcctttgtaatcaattgcagcgttcttcagcaaaaacctctcaggttcaaacttgtctggttcctcttcccacaaggtcggatctctcccgattgcccatgcattgatgaatacttgggtgcctgaagcgacgtcgtatccacttatcttcatgtcttgtattgtgagtcgaggaacgattaaagggattggtggatgcagacggagagtttctttgaaaactgccttcaagtatggcattttttctaggtcgtcctctgtaacattattaatatattcttctggcatggcaatgttagttatcttcttattaaggattgttgttctgatctcgttttgaagctttttcatggcgtttggatgtcttatgagctcagtcattgcccattccaggactgtataggttgtgtctgttccccctgcaaatgtgtcctacaaacatacatatagacatttttaatcaaaaatttatgccactttgctcggttatactttatgaagttgttagctataggcacaacacccaattagaaattaagtttcaaataagacttaattatgaaggcaaattacattttctttgagtaactctaaccatgttctctcaacactctccttaactaaaatagcagtaaaacttaaaagaagaaaaatgactctttataataaaaattgataaggagctacttaatttttttttgctaaacttatttaatagtattttaatcaaaagtactactacttttctattattttataaaattaatttatatttgataaatttaaattacataaaagtacgtaataagaaactaacattcaaacaatatcaaaataacaataaaaaata

SEQ ID NO: 309790 - DNA, 851 bp, Cannabis indica
tgaaactgaggttgtctattactcattattctcaaagcaccagaaaaacacacacaggaagcaaacaaaactaaacttttgaaccaaaccgattacgctattttaaatttaatgcatgcatacaaatcaaattttcccttttaaattactctaatgctaaacatctctataagttgtctgcatagatctacacaccattaattaatatatcattcaaatattaaattattaaactaaagagtaaattacggcaaaatctctaaaagtttcacctctctaacaagtaactcccaaaactcatttttttgcggtaaaactcccaaaacttaggttttgttagcagtttgatgttttcatccatcttttgctattaattgccatggtagattgtccataaattcataatgtacacatgtcacaatttaattgacacatgtaaataaatatttataaataaattaaattttaaaataaaaaaacaaaaataattttttctttcttttctactatatcttttttaaagatttttttttcttcttgttcaatctttttcaaactatcaccaccaccaccaccgcaaccaccatcactattactgccacctccaccaccaccacgactcaaacacaaccccacatcttaaaacacaatcaaataaatatatttactacatttgtcacgatatcagatcgaaatctcataaaatcaaacaaaaactcaaattaaattaaaaaaataaaaataccagatctaaaaaaaaccaccacccttgaaatcaccccaccgtaactactggaacaaccattaccatcataatatttttttcatatccgaatcagaacctttaaaat

SEQ ID NO: 309791 - DNA, 841 bp, Cannabis indica
tccctaatcaaccacttttagccattttcactctttaagaatcaaagcaagaaagcttttcctctcaaatctttcaaagaatccctagaaagcatcgaacagcattattcgagcaactttaaagcttcaaacagtcagtaagttcttcatttctttcctcctttatgcttaaatatttgattttctgggttttttattgcaaaactcaatagttcttaaacttgttctaggaaaatcgtagaaaatttatgtttaggaatgtgaaatcttgactgtacttaaccacgttgcttgagtatgactacattttgattttgttttcacgagattcacttccacttacccattccgggcttagtgaaaatcaacttttaattcgaaccttttgaagctctggattgtaaacttcaatatcatgcaaaatttatatttttcatccttcgatcggacttggtaggtatatttaatttgtttttttttcgatatctaggccaaatactcatcgtgtttcctacgttttgtagatgaaccgtggtgagttttggggaagcaaacatcgtattaaccaggaccttctccaacttttatatgaggatcatcctcgtcttcgggcgaatccgtcctcctctagcgacggtctatctaattcaaattttgaggactgggagataagcagcaagcacacactgtgtcaagaacctaaagtgcaacaccaatatggctgataccttactcgtagactggtcaaatcctgccgctgcaggtacgcccatcgctacattcgctgtgacaatcgctaggcataccaccgttcaagaataggacgatggctcgtactaaa

SEQ ID NO: 309792 - DNA, 1121 bp, Cannabis indica
tggtgtgataatctcagcacggtcttactcactgctaatcccgttcttcacgatcggacaaaacacatcgagttggacttgtattttgtcaaagagaaggtgcagagtcatcagattgctgtcaagcatgttccagccattgatcaacttgcagatggctttaccaaagccatttcgactcagaatttctctgcttttcgttccaaactcaccattgttgatgcaaccaatgctgagtttgcgagggagtgttaagagtattcaattagtctcatagttagctacaattaattcagttaattctatttttattgttgcttcaactggtgtattctgttatggttgttatcaattcggttacaaatgatcttgatcagttgaactctatcatcttgtataaataatgtactaactgataatcaatgaaatgaactctttcactcaatctttcaatctctttcttctacctttctctctttccttctctgttctttgttcttgttaagtttcatgttcaacgatgtcaaggaaattcaactctcctaacacccccacactatcattactgtgtgcgtatctgaagaggactatgtcgaagttcccttcaaaagacccactactaagaaatttggctttagaggtggtttgtggccgacgctattctaacgttaaataaaaggtggtgaaaagaatgaaagtgtaaaaccctctacatcgtcaattattataaaataaccaacaacatatgaaggaccttatttcataaacttcctatcgcgtcggttattacaaaaaaaaatcgcatgtgtcaattttttttgtaataatcgacgccaaaaaatgtgatatatatactttaattttgaaattaaatatattttaaaattaaatttttatatttatattatatttataagagatattcggtgtaaaaacacttgaactttatattttttaacactaaaattttaacggtaaaatctactgaactcaagttctgttttgctcattacatttctgttcaaaaatcttagttaagtgacacagtcgactgcctatgtgtacacacggtaaatttttagtggttcacgtaataaataattattaaaacattataaaaa

SEQ ID NO: 309793 - DNA, 2601 bp, Cannabis indica
acttttgacaagtgagcatataatcatttgttttttttataaatacctcatgatccatttggttgccttccaatgatccataccagggtcacctaagtatctatccagcatagtcactatacgtcgaaactagatgtgtacatatctgagcatacataagacttccaatagttgaagtataaggaattttcttgcatcttcattctttaaatttcattattggggcaatcgttgagactaaacttgtctcatttttcaataagagtcaggttaatttactctaactgagcttgtgacatacacaactgtcaacagcattgactttaaattcatatgagacaatgctgtaatgatgaaattgtgatactattaacacgaaactttcttaagaccatagatagatcttgagtttacattcatagaatttggatcgcttgacacaaaattttctagttgcattatatatagttttctctatgtcaccaatgagaaaaattgtcttaataaccatctagtgtaactctaagtcaagatgagctaaacgtgacttaatttttttcatagaatcttttgatgacactggagagaaagttttttttatatataatcaatgcctttcttttgtataaaacccttggcgacttgacaagatcctaaatgtcattgtccttcatggatttcatctcatcattcatggcatcaatctacttttgaaaattaacactttctttgacttgttaaaaattaattggatcatcttccactgtctttatgtcaaacgaatgctctttaaggaacacaataaaataatttaaaattgcttttcttttctctctagtggatcgcctaagtggcacttcctcttgaggtttttaagttcgctcttttggaacaacctcttgatattgaataaggagtaccattgttgaatcctcaattgttgtcttcaaatatgtcttaacaatgtcaatagattgatcattgtcaaaaataatattttgtagaagaatttatttctcttcaaaaaacaacatttcttactttatccccctcaaacacaacatgctcaagaagtctcacatttcctgtctcgaaaaaggacttgactgagggatcataaaactcaaaaacccctcaacctttcaagatacccaacaaaatagtagtttactatatattcttaattaagtccagctttttttcatgtggggcctaaaaagacattggctcaactagacaaccccaaaagtgcaagtgtttaatactaggcttttttgcctatccatagttcgtagggggttatagctaccaattttctatgtactctatttagaatatagactgcagtcttaagtgccttttcccaaagtgattcaggtaaagaagaatgattaatcatgcttcttaccatatccttaagtgttttgtttcgtctctcaaaaacaccattcatgcaaggttgccctagcattgcaatttggtagatgatttttcattcctctaagaatttggctaaaggtcatgaacgatgttcacttgatctgtcatatctacaatagtattcactacagttagacttcacaagtttaatcttctcaccaagttgattttcaacttaggctttgaaggccttaaaatgtccaaggcttgtgatttttatgtataaggtacaagtacccataatgagaatagttgtctacaaacgtgataaaatacagtttgccatttcaagaagttgtagggaatggaccacatatatcaatatgtctcatttgtaagacactaaaactcttgctggcacttaacttcctaatgtttgtctattttctttttcatacattaattcgacacacacatcaaggtcaatgtaatcaaggggtgcaagtattttttctgacacaaatctccctattctccttttggagatttatcctaagtgttagtgccataaggtaatgtaattctgatttgataattttgttttgtaccttttgatgttgtttgtaaggtttcattatatgaagtaattgtattaatcatatgtagtttatcaattaaagaaccaatcgtaactaagtagaattaaaaggagactaaattattagtctaaaatgaacaagaataactataaaattttgtctaaatgacggtactacataagttccatttaattcaataaaattattagtcttaaaagataatctaaatgtgcacaaaatgactataaaattgggttttagtgacacgtacaaaagtgcgggtcactaaaaatttaaaggtgagttttagtgacacgcacaaaatgactacaaattcagtgttagtgtcccataatgcatgtcactaaaaatatgaggtgtcactaaagagtaactcccataatttatattatttttttttttaaaaaaaatattggcttacagtgacacgtcaaacgtgattggataaacataccctaacacacttgtcgcgtcactatattatgtattaaaaaaatcttttaatctatccaaaaaaaaagtagctaaatactttcattaaaaaaaaatatatacaactatatataataaatattaataaaataataataaataaagtaat

SEQ ID NO: 309794 - DNA, 682 bp, Cannabis indica
tttataacagtattttcatttaataaattatcgattccttaaaaaaaatagaactttcttcaataaaaaagttaagtaaaaattataatataatattttaagtcttagacgaggacgatactactttcctatgtaaaacaaaaaatactttttattaaaaaataaaaatagaaaagaataccaaaagacaaataaagatattcacagaaaagtttagagtgtattcactcaaacttccgttaatccatgtgtcaaaattaaatgacatgtcaatgtctcataggtggagacaggattggcacaaataaaatgggatagcagatttttgttctaaaaatttcctctaaactattaagattattaaatttaaggactggtctaatttcattaaattttactatttcagtgattgtttatgtactaaacatgcttcatagactttgatatctaccaaatcatgctctttaaactttgatatgtactaaatcatgcaattttttactaaaattagacaaaagttcttaaatctaacaattttaatagttcaagaggaatttttaacgaccaaaaaagttcaaacataatttagtacatgtcaaaatttgagtgaaaaaaatcataattaacctttactattatttttttttatttttatttttttgacaaagtgattagaatcact

SEQ ID NO: 309795 - DNA, 588 bp, Cannabis indica
agcaagcacacttagaaaaaataaatacaaattttagttcaaagttgttaaaagtatttttttagattttaaactttagagctcttaaaatcacttgaatttgtttagtatatgaaataaatactcagctacacattattttgcgtgaaaaacaagtttataaagtatgagaatgaaaaatagcagtttatagtcgttagtacgatttttagttagtacgatttttagttgtattctgccgtgttcgaaatactggaaggaatctgaattttggattggttacaaccaaaattttgaattccaaacgaaattctaaattagttacagaggcaaaaagtttattttttaaaacaaaaaggtgcataactttttacttatttatctaatttcaaaaatttcaattgcattcttagtttaatgatatgtgatcttaaaatgaatatataaaatttagttattatttatgtgaaatacctttaatattttaaaatttttgaagtatggacttgtaaattagtgtacaagactaaaaaaatataaataaattttaagggtttttttatttttacacttcaaaatagtttttgt

SEQ ID NO: 309796 - DNA, 1446 bp, Cannabis indica
atttttaaggcaaggtattaccctcttggctcttttcttgatgctagcattgggaataaccccagttatgtctggcgtagcatatttgagagtcaatctttaatcaagtgtggtgctcgttggagtatagctaatggctctttggtggatgtattgaaccaaccttggttaatggataaagataatccgtatatcacttcctctcatcctgctttattgcatgcaaaagtttttcagttaatggctccgaatgagagaaggtgggatgaggatatccttaatgatctttttttgatgtagaccgagagcttgtgaagggggttgtgatcagctcctctcgtgagtttgataatcgttactggtttttcgaagcatctgatcaatactcagttaaaagtgcttataagagacttcaagtggtgaatggtagatggattggaggggataactcaggtctttggaggaaattatggaatttgaagatccccgcaaaaatttctgtttttctttggcgagcttgtcgaaataatctcccaacacgtatcaatctgctagtgaggcatgttgatgtacctttggtatgccctttttgtcatcttcatgatgagactgtggagcatgtgattgttgattgtttgtttgctcgtcaatgttagcagcagtttaatttagccatctagggttctgctggtgtgtgctttgccgactggtttttgggtctggccgatgctttttttgcttctggtttgggcagtgttgctgtcatcaggtgggcaatttggaaagcaaggatcgagttagtttggaacaacaaacaaccggttgcaagtactgtggtgcagtctgcttttgcttatttagatcaatggaaaagtgcgaaatctcaatcttttgagagtgacatgcctgctagtgtggtcaattctccgcactgggttcctcctcttttaaatacgatcaaagtcaatgtagatgcctcagtttttgcttctgaaaactggtttgggtttgggtggctggccagagatcacgagggccgagtcttgtttgcttcagctgtggctcatcaggttgctgtcgaacctgttatggctgaagccataggactcaaagaggttctgagttggcttaaaactaccgattacccacaagtggtggtggagtcggattgtcaagtgctcatcaatgccattcaaaacaaagtaactatgtattctccttttggtttaatagttgctgattgtgtttctttgctgaatgttttaaggagtgtgactcttaattttgtgaaacgatctgcgaacaaggcggtcaactttttggctaggaatggcggttcttatgcaggtcgtagttatagtgggggccttgtccctactgatttgcaagctattattgtagctgatttgcaataataaagcaacattttttcaaaaaaaagaaaaa

SEQ ID NO: 309797 - DNA, 1001 bp, Cannabis indica
gcctgattcagtaacaagaagttaaggcccattttcaagctcaccttgttcgggtgtacactgagcaacaattacacataacattgcaaaaactggacgcttctggacagttgctcaagtgggcagtggagctaggtcagtatgagattactttccaaccctgaatagcaatcaaaggccaggccctagcagactttatggtagagtgcacaagcaaagaagaaagcatattggaaggcaaccccgagccagtaaaaacacctcagccaagcaaccgtgaagacaggtcgacctagaaactacataagggcaggttggctacgaatcaactatccaatgtaggaatcgaccttgtcagacctaggggcagcacctccacgcaccagttaactttggattcaaggcatccaataacgaagccgaatatgaagctttgactgctagcctaaaactagcccaagaaaatagagtcgaacacattaaaatctacagtgattcacagttggtggtaaatcacgtatctggagaatacgaggctcggggagaaaagatgatagcgtatctgagcaaaataaatgacttgctcgcacaattcaaaagctacggcctcatataaattccaagggaagaaaacacgattgcaaacgcgttagcttgactggaaagcagtaatgtaagtgataaagcgaacttggttccatccagttcctcgaagagcctagcattactggtatagaagagatcgaaatgattgatactttcccaaactcgatgacaccaatagcaacctgcctcaatactggggaactcccagataatcgaattgaagctcgaaaaatgaggaggaaggaccatatgaagtgatcgaagttctcgagtcaggagcatacaaattgggtaagtatgatgaaaaaatgcaacttgtaagaaaatactaccaatataagtaccaggtaggatgaccacattaagtactaaagaacatttacttttaagtgaat

SEQ ID NO: 309798 - DNA, 1158 bp, Cannabis indica
aataaaataatacaaaaaatataaaaacaaaattaactttaggttgatcttggccattgatgatgatctaatggcgaaaatttgctcttgatgaaaatcgtcaatttttagagtttcgatcgcatccgttggaacattttcaggcaatctgtggaataaattgtacttgcctttgacacgaatttcgaacatgcaatctttagaattgcgatatgagtgtgagacataacttgcaagagctttaaaaggcaagttgaattgcgtcaatcgaatcaatattgagtgagttatggccactttactaaaggttattcaacaccctacgcccaggttgacatcctggcatcaacctggaagctatataagtgaaaaattatcccagacttgtattttttgatgcctaagtgatatgtttacatcacttaacaattttcttagttttgctgaagtttttctctaattctcggagatgtccctttttagtgaaatcaggtagactcgaaactttctaattttactgatattccaccatgttgaaagggttaaatatcaaagtatgaatttggcctgccacaagtcgtagctctcatttactataaaaaatatagtcggatggtcgagaagaaattagattatgataagcagaacttagcgcttcaggccacacatcaagttgggcactgggtgcttcccaagtgacttcctaaggcttgtttgatacttccaaggcattcaagactacaaacaaggtctcttaccttatttttgatcaaaataagaagaatgttcaaagcagaatttgtgtttgaggggcagaaacatgtgcactaggttgcacgttaacctgagtgtaggtcgcagggcccatgtcaacttgggcattggggccttgttttggctcccaaaagaactcgtttgctccttaagatcacttgtatctttgttgtttctgaaaatgaaaaatattcccacttaactttttgggaaaagtaactagaaatagccaggttgacacgctgggcccagcaacaatgttaacatgggctttgggtctagctttttgccacaaaatggttttgtttgattctcgaaaacacttgtatttcagttatttatgaagagatatatatatatatatagtagagagagagagagaga

SEQ ID NO: 309799 - DNA, 1131 bp, Cannabis indica
aaaaacaaccgtaaaacaacagtgaatacttaacacagtacacactataaaatttacacagtatttttgaaaaaaattctgccctacagtaaaaaaagttgaaaatttgattatgcggtgtaaacatctcaattttaaaaggcagcacttagtactttatagatgtcatatcaatattagtgaaattaaatatgacattttatataatataatttaataatttttgtggaatatttagtaactaatgagaagacaatacctataactagtgttaagtactactaatgctcaataataatgctctttattattttcaggactaacatctcgtacgtgttgaggctttaatttccactctgtggtaaggtgaggaggcactatgtttgttaggttttaagctttaattaaaaatctcaatttatttttgtaaccttttattaagaaaaaataaatttactttgacttgatcaatcacaatactcacatgtatgattatttttttaatattacttttttttaaatcccgagaatataaaatattaatttaaaatcttatgattagtaattatacactactacaatatgtgcctttagctttccttttttcaacctattttataaaaagagaagttaaagggtggaaaaatacctgcctattgaaaaattgaccttcagaggcgtcttttttttttttttttaaaaaaaagcgtaggtatagaattagattataccatttagagtcggttggaaattaaacgatgggtcgttttgtgggagaggcctatgctgccggttctttaataataactgacggcatagggtacacgtgaaatttgacacgtgtaccctatgccgtcggttattatataagaaccaacgacataagtgttagataagtcccccaaccttcgtcttctttcttcttcctcacgaacgaacccacaccagagtagccaccagaaaacccttaccccttcgccaaccaccacctccgccagcccatttctccaccatttgagcccatttttttaaaaaaaaatcttctatttttgatacttaatcccatacactgaaaaagttttgattttttccctatttaagtgtcattcgaacccattagaaaatagtggt

SEQ ID NO: 309800 - DNA, 1455 bp, Cannabis indica
atggtattttttaataatgtggcaaggtattattataattaagatttattaaggtatttttgtaaatagtttatattttatgtatattattggaaaaatccctataaaaaaatcttaaaaaaatttacaaaataaaaaataaagcaatgtacattactaaaataattagagattagatttataccttaatattcaatgattcaacgtttacaacaccaaaaatggcgcacagagctacaaccactagaaccactaactcttctctttatttatactaaaaaataaaaaataaaaaaaaaacacacacacaatctaacaccgagaatatattcttaggtatgaaaaatatatttttttttttaaaaaaaaaaggttaaaatggttgaaaaatagtgaaattggggggggggggggttaggagcggttttgggggaggataactgaaagggttatataaaccctttgtcatcagttattaaaaataaccgatgccataagacacacgtattaacattttcatgtcactacgatgttggttattttctaataaccgatgccatatccccattcctttccaccctgcgaccaaatattaataccatagctatagcaattaggtatactctatatacaatcttttataaaattactgcctttaaatattaatttcaataaacgcaaatatttgaacactttagcttttcattttattaattttctggaaaaaactacgtctacacagtttatttgtagtaatggatgaatatatcctctattaatgagaaagtgtatgcattatttaaaaataaaaaataaaacatcttaatttgtgctacattatattatgttctcgttcacttaagtagttaagcttttatttttgtttaaagctcagaatataagataaacaaagtttttgacttattttaatggtttgaataactatgatataaagttaaagaagctctctttaaagttttttgatatcattaaaatatatatatgtatattttgtaagtaaattaggaagtaaataaattattataatttcaaaattaacttatcaaaagtcttagcttttcttaataaattaatttttaataaaaatgttatgaaatattatttaaggatgtccaaattataaaattaattatcacaattaatacttggttgtattttcttttattacattgatttagtttttcattcttttaaggtgcatttgtttgcacttagtgatataactgatctgattcattcagatttaaacctattaatatcaattgttttcttttgaatcactattttgcacttaattcatctgattcggttagatgtgtgtttggttcttaaaaattttaagatgtaatacttttcaattttttatatatttatggaaagtcacgctcatgattttttttatctcatttatattttatcccaattttcgcactc

SEQ ID NO: 309801 - DNA, 1995 bp, Cannabis indica
aataatttccaacactttttactgtaaagagacccgagacttcaccaatccaagcaagtttgtcatgaccttgaccgtgttgtactggtatttgaagaataagcctttgatctctatgctcaaacaggtcagccacaagctcttcatcccaccccaatccatcagaagctagcagattgcaaactttaacccccaccaaagcagggtgttgggatgcaatgaaaggatcttgcacatcgggtaaccacggctaacccataactgaaatagcggaaccatcacccacagtccacctaacacctttaatcacgagttgacgagcttcaagaacactacgccaaacataactggggttattaccaatctcagccgtgaaaaaagaacctcaaggatagtaccttgcgttaaaaacttttgaaacaagagtatcgggttgtgtaagaaacctccaaccttgttttcccaataaggccaaattaaaacttctcaagttacgaaatcccatgcctcctttagatttgtgtttgcaaagttttttccaagacatccaatggatacccttgggagagttgttagacgattgccaccaaaactttgacatcaaaccttcaatatcttttatgatctcatgaggaatcaagaagacactcattgcatagcttgggagtgcttgcgccaccgttttgattaaaatctcctttcccgcccttgaaagaaactttgtaccataaccaagaagtcttttcttaactttgtttctcaaaaaatccaaagcccccgatttattcctccccattgaactaggcaaacccaaatataaactaccttcaacagccgtggtcatactcaagatagagttgattctatctttcatggaactcagagtattggtactaaaaaagcttgaagatttggagaaattcaccttctgtcccgaggcaagctcaaattgacataatacttcttggattcggcgagcttcatcttcagtagccttacagtaaaggtaactatcatcggcaaataacatatgagatactctaggagcaccgttggccactttgcatccatgtagccaccttctttgttcgtatttccggagcaaagcagtgaaaccttccgcacatagaatgaagaggtatggtgataacgaatctccttgacgtatgcctcttgttggaataattggacctacttcattattaccatgagtaacacagtattttgcagattttacacatgtcataatgagatgaatccaattttcaacaaagcgtaatttcctcaacattgcctcaagaaaatctcactcaatgcgatcgtatgctttgctcatatccaactttagagccatgaaaccatccttacccttctcttccttttaaggtaatgtaaaacctcgaaagaaacaaggatgttgtccgaaatcaaccttcctaggataaaggcacttcgattttcagatataattgagtccatgtaaggtttcattctattcaccatgactttcgttataattttgaacagaacgttgcataatgcaataggacgtagatccgtcatatgttctgggtttctcttctttggaataagcaccacattagcatctccacacccatcatcaagtaatccaccttcaaaaacagaacgcacatttttgacaacttcatctcccacaattggccagcacttttgaaagaaagcatgagtcattccgtctggccccgggctcttatcaggatgcatttggaaaactacttttctaacttcttcctcttcaacaggttgacatagttcagaattcattaaatcagtcaccaccctaggaacacaatcaataacttcctcatactcactgaccgaagcttgaaatagatcttgaaaataattagacaccaccaaaggcaaactcgactcccatgagacccaattatcatgtgtatccctcaattaagtaagctgattgttttttttcctactactagcagccttatg

SEQ ID NO: 309802 - DNA, 1242 bp, Cannabis indica
tctttcttctagggttttgcagaaacaaaaaagggtatttttctgtatttggaggaaacaaacagaagcagatttataaaaaatgaaactttttgtatttatttactagtgcttttacttttagatatttatcataatcattattaaatttaaaatctatagggttgaaaatattgattgggtttattggtttcactaataatcactatgttgtagtactccataatattcacttgtccaaagttaattgaggaggagatctgggcacttcctcctgcctttatcttgttttcatttatttgattatcatcccaatggagtaattggtttagtactaattggtttggaaattggcagatatatatgtggctgaattactcaaggtttattgatttgagatcattaatgtttcttgtgttatattatatcttgtgtaaacaaaaatgtctttgcattatatagttatactaaacactaaacacatgttcctgcacttttcggtaaacttactgtttttaaaagcctaacttcatactattaagtatttattttattattaaataatacaaattatttgttaatttaattcattaggtattcactataagagagaggtggtaaaatgtatttttatattccctgtcatacatgcatgtcgaaaaaagaatttattaaacttgtaaaacgttatcatgtgtttgtgttgatgtatttttgacctgttttgtgatttttaggggaactagagttgtaaaggaagaaattaatttatgtatataatatatttacatatatatagtttatgtatttacaaaagaactaggtatttttaaatattttcaattttcttttagaaaaactaaattttgatttttttaattcaacatgaattactaaatatacatttctatataattatattatgaattttatttaaagaaaatgtatttaagtttgtgtaaaggaaactagtatggtatttgatcagtttacacttaatttttccaaccttaatttgtaaaattaatgtcgtttagctgtgtcgaaagtcattttgcaactcccacaccccctctgctgactctctcccgagttgcacacattaccttacgtagaaactgctgcccctcccccgagttggacacattaccttacgtagaaactgctgcccctcccccgagttggacacattaccttacgtagaaactgctgcccctccccgagttggacacattaccttac

SEQ ID NO: 309803 - DNA, 1916 bp, Cannabis indica
ttattgtggtgtaaaatttaacatatgatacattttacgctaaattcaaatttaaaccacattagaccatctctattgggatatgcggaaattgtgttatatttggcacaaaaaaaaaaaattgggatatatttgtatcaatttttaacattgtgctcgaatatacaattgtaaaatttaatatttttattaaaagtataagaaaataataaccttaactaatattattattttattatgtaaaacaataaaaaacaatataaatagttgatcattaatactaataaatacataaaagtatcataagagttaataataaagttgtgtagcgatataaattttgaatcatagaaaatattgtgcccaaaaatttggtatgatgtaaatttgctaaaatatactattaatattggagtttaattttatcaatatttgctaaaatacatacgccctatttatatcacttggaaatgatgtcaccaaataattattatctcaatattacccccaattctttgttagtagtagatgtagaagtaggagtaggataattggtgaaaatagagcttctataatgctattttgcaatgagactttgttttgataattttttgcaaaattaatgatctctttaagaattcctcacaaggttgacagagactatgttgtgaaaaaaaaaatatcacaactgttttatttgtttatttattattattattattattattattattattattattatgaacacagtaaaattattgaagaaagctatttagcaaaataattctgttttcaccaattattattattgttattgttatattatgtacaattgaagttaccatttatatatatcaaattcatgaaatattaaccacgtgatgtatgtgcacaagggtgaagatagaagaaaacttgaggtggggggtgttaaacttagaggcgttacatatttttatttggtggacactttaatttttttaaaaaaattattgatcaattagatgtaataaaatgtaaattaatatatgtttaaaaaaaatttaacaataaatatattaaagtaacttttatgtagtgacattttatatttttaattatcttgtgattcaaatctcaataataatatttagctttttctaaaaaaattaaaataaaagttgaggagggtagaacttgtgacttccttaaattttcaaaggttctttaccattacaccaaataatctcacctcacttaacattatttgaatagaaaagtattgtttaatggccaatatatatatttaaatttgagttccaaatgccttaggaccagtcaaaatttaaagtggggcaactgccctctgcccatgtaagtgcatatgtgttttgttgaagaattagagtgttgatgcaatttttgttagtttgtctaagaagatcgtaaaaatatagaggattgtgatgaattaaatttaacttataaaactgcaataaattaaattgacaccagaggtttatagtagttcaccttctatgtcacgatgataatgggctacgtttacttgtatttttattaattagatttgacacacctaattaattatgttctcaagtgtctgtggacaataatacaacaatgaatttctaggtgaaatctatattgagacttatgaagacaagtctgatgaagtataaaaacaggatgtgtatcaatgatgtttgaggtcttggtgtcgactgagtattgtggactcaatgaaaaagatgaagagtaagtatggtcttcttggctgccgtcaaataggcctcaaagaaaggtttcagaaaaaggatcccctacttcaacctcttatttctccttatatagtttgtagggtttgttagtgatttcccacatgtcggggtgtctcactaacaaatcccgtatat

SEQ ID NO: 309804 - DNA, 1811 bp, Cannabis indica
ttcttctcgctttcatgttgcgcttatggcactttctgagatggccaaataaaggaacaatgtttctctagtaattggtttggcaaaaattgggtgtgtagaaatatgtttctttatttctttgaattccttctcacactcctcattcctctcaaattttttattacctcacaagatgttaaaaaatgggaggcatttatcagttgacttcaagatgaatctattgagtgcaaccattcttccagttaatgcttgaactttttttgattttattggtgaaggcatctcgagcaacacttttattttatcgaggttggcctcaattcctcttacattaataataaaacctaggaatttccccaaagataccccaaaagaacatttgtatggttctcgcttttgacagactttaccaatatatcatcgacgtagaactccaagttttgccctatctggttttcaaacataccattcacgagacattggtattttgctccaacattcttcaacctgaaggacatgactttaaacaatgaagtcccatatttgttacaaaactcgtatgttcttgatctagaatatgcatcttgatcaggttatatccagaatatgcatccatgaaagtcattaattcatgttctcctgtcgcatccaccaattggtcaatccttggtagtggaaatctccatgttctgtttggctttgggataactactagattagatatccacaaggggtaaaatgcttctcatatgaagttattggtcaatatcttatcaacctcttcttttagtgctatttgtctctcgagatcttgaggtcgtcatttttgacgtttgaaggatggtttggattaatgttgaggtgatggcatataacattcgtgtttatcctgatcatgtttgaatggctccaagcgaactaatcttggtttgccttcaaaaaggtaattagttgctattttagttcttctccataatactgcccaattttagcacagtgggattatttggatctaaattcacctcctccaactcctcgattagcttgagtaagttgttctcttcatcgatcctagggtcaaggtcttctatttctttctcattttcttctgtcaaaatcatcattaactgatgagtggcccttctattttttgattttactctatagcactcccgagctaacactttgtaacctctaatagttcctaccccagagtgaatggggaattttagtgacaaatgcttaattgagcttattgcccccattcctattaaggtcggatgacccatcagcacattgtaaatagaagggatgtcaacaactaaaaattcttgctatttagttatggataatggcagtgttcctgttgagttttgtgccctaaataaaacccatttaaatataattagatttactaattaataaaagatcagaaatcgcttttatgttgcatggttcacatgctttatttcatgattatgtttattgtataaaatctattaagtccagaacatatgtaaatatatgtgtgtatatatattagttcatgattatagtgtcgtcagcacagtgggatataatcatgattatatgttcaaaagtttaattcccatgatttgctagttcactcgatttagactcacatgataattagtgataaggtatacttacaccttggataagtgttgtatcctttccagggtattggtaaagtttaccagtatcggatgtatggagtatgttgaaaaaatactttaccaggaacttagatctactcacaagtatgttgatttaacaacctaatattg

SEQ ID NO: 309805 - DNA, 2305 bp, Cannabis indica
actataaaatgtgacccaaaacttaggctaaaaatagcctaacagttatattgttacttgccaagatgacatcatcaacataaacaagaagaatgatgatgcttgattctttcctttgaatgaacaaggaatggtttgatgctgaatgcttgaaaccttattaaatcaaggctgtaaagaacttttcaaaccattgtctaaaggcttgctttagaccttaaagggatttctttaacttgcatatggtagatcccccttaggactataccctggaggaaaagtcataaaaacttcttcattttaatctccatggagaaaagcattgttgacatcaagttgatgtaaacaccaaccttgaatagcagcaagagcaaggataagcttgactaaaacaagcttagtaacaagggcaaaagtttcattgtagtcaatcccctcttgttgactatatcccttggcaataagacttgccttgaacctttcaattgaaccatcagcattgtacttaatcttgtatacccacttacaacatataacatgttgaccagcaggcaaactaaccacaatccaagtaccattatcttcaagagtagcaatttcaatatccatagcattatcccaaactagaatgcctcgaggttgatgaaaaaattctggctcaaagtgacttgaaatggctagcacagtagcgcgaaaccttggggacagtctactatagtcaataattttggagataggatgagatgtggaagactttggtacatgagattgcacactgttagtagaaagaaaacaatggtaagaaggcttgtgaatctgtctagtagatcaagtggtaacaacaggttcattcatagggatgatgtcaggttcaatgatgggatattaaggtgttgattgtggacaagtaggttctgtatgagtggaaataataggttaaggagtggagatgggaatgacaggttgaggagaaggtgtttctgtggaaaggatcagctacaggtgtagcaaaaaagaattagtagggtgatgttgagaagcatcagcagggaaaaaatcaaacaaatcaggggaaacagaaccatgttgcacaaaagggaaaatgttctcatgaaaaataacatccctagaatagaacattttgtgtgtgttaaggtctagaagtttgtaggctttcatccccataggatagcccataaagacacaaggagtggctcttggagcaaacttagacctagcaacccctaaagtagaggcataagaaaggcatccaaatgcctttaaatgttcataactaggaagcttgccttgaagaacttcaaaaagggatttgtgcttaagataagggaaagcgttctatttatgaaagaggcagctgtgttgatgcaatatccccaatatggtagagggatataggattgaaacaacaaagccctaacaacatttaacaagtgctgatgctttctttccacaatagaattttgttgtggcctttgcacacatgagtggtaatgcatgatgcctaagaaagaaaacaaggcaggaaattagagttcttttgcattatcagatctaatgcctttaacttgagcattttattgtgttttaacaagttgcagaaaagatgggatggctgtttgtgcatctgatttattttttatgagatggatccatgtatacctagagcaatcatcaactatggtaatgaaatatctaaacccctcaacagtgtgaatattataaggcccccaaatatcaatatgaagtaattcaaaacaatgctgagatatgtggtgattgctagcaaaaggtagcttcctttgtttggcaaaatgacaaataaagcaatgaaaattagagcaagaagaattttaaaattgtaaagctttattcaatgaatggttctttacataagaagcatggccaagtctatgccacaaattttcattacttattttcaaatcaaaaatggaacaaacaacaagaggtttaggttcagacaagtagtatagatttccaactctttcacccatctcaatacttgattcttggtgaaatcctggatcaaacacttgttaggaagaaacaagaatgaataattagctgaatcagacaaagcacaaacagatatcaagttatgttggaaatcaagtacacataagacattttcaagaatgatgctagagactttaacagttccaacaaaggaaactctagtactaacaccatttggtcagccaactcaggtaatcttattgttttcctggacagaaagaaataaagatggattggagcacacatgatg

SEQ ID NO: 309806 - DNA, 2727 bp, Cannabis indica
tgttcaaaagtttaattccctgatttgtcaattcactggatttaggctggcatgataatcagcgataagtatacttacaccttggataagtgttatgtcctttctagggtattgaacacctactccattattacaacacttgacaccttaccaattgttacacaaaaaacccccagcttatgaacatttgaggaactttggttgtctagcatatgcttcaactcttgtcattactagacacaagttctctcctagagccaatgcttgcatattcataggttaccctaatggcatgaaagcttacacacttcttgacttagctactaacaaaatttttcattctcgagatgttgttttttatgagaaaaattttccacttaaagggtctctaagcacccaacacctggataatttcttttctactgcatttaaaaactccccaacacaacctgtcataacagtccctgctgcaccaaaaacaacagcagtacctgttgcaacacaaccagtagtctcacctgctgcacccaaaacatcagcagcacctgctgcaccatcaccagcagttgcacctgctacatcacacccatcaacagctcctgctgcccctaaaatctcagcagctcctactgcaacaccagcaacaacttctgctgcaacaaaatcaacagcagctcctactgctgtttcatcaacacagcagactcatattcccacaacaacaaaatcaggtcgacaaactgtacctccaactcatttaaaagattacatctgtaactcttccactaatcaccctctagtcaaatatcttaactttcacagattaagtgttgcctttagaaatgcaatatttcatgcctatactgaacttgaaccatctacttacaaacaagcttcaaaattctcacaatggttgaatgccatggataatgaattttttgcactcaagaaaaacaaaacttggtcggttgtttctttaccaccaggttgtcaacccattggaaacaaatgggtttataaaatcaaatacaatgaacaatgcgaaattgatagatacaaagcacaccttgttgccaaagggtattctcaacagcatggcattgattacattgaaacatttgcccctgttgcaaaattcaatacccttaaactatttctagctttggctgccataaacaactggacccttcatcaaatggacattgacaatgcctttttacatggagatcttcatgaaaaagtctacatgaccctccctaaaggctatgtccatgagggggagctgccccccaatcctgttgtttattacataaaagcctttatggccttaagcaagcctctcgacaatggtttgctaaattaagcacaactttgattgagcatggttttcaccaatctgcctatgaccactcactttttatcaaaaaatcctccacaagtttccttgctctattagtctatgtggatgacatagttattgcaagcacagataattcggaggccacagcttttaaggcatttctcaactcaaaattcaaactcaaagaccttggccacttaaggttttttcttggtcttgaaattgcaaggtccaaagctggaatctctgtttctcaaagaccatttacattacaacttctcaatgaaacatgcctacttggttcaaaggctgtatcaacacctatggatgccaatctttctctcaacaaagatgttgggcctcccgtaagtgatgccacctcttaccgcagtctcattggcaaactgttattccttacaatcacacagcctgacatttcctatgctgtcaaccgcctcagtcaatacatcaatgatccccgacaaccacatctcaaggctgcatacagaattgtccagtatctcaagggaacccctggccaaggactcatgttccgtctagtaacctttcacagctgcctgcaaaccaacttcttcaacttcaagctttctccgatgcagattggggaacctgcccagatacaagacgttcaattactggtttctgcattttttttggccagtccctcatctcctggaaatcaaagaagcaatctactgtctccaaatcttctacagaagctgaatatcgttctcttgccaacaccacatgtgagatactctggatccataacatattgactgactttggcatccccttatccacacagaccaccattcattgtgacaaccaagcagcaatccacatctctgagaatgcggtcttccacgagcgtaccaaacatgttgatatcgactgccacatagtttgcgaacaagtcaacaaaaatcgcatcaagctctcctatgtcccttctcgacacaacattgctgatataatgaccaaggctatcttcccaactcaattccacacattattgtccaagatgagtgtctcaaacatctacacttcatcttgagggggagtcttagatactgttagtagttttgttgtatagctgctatgttagttacaattagttatttctataactaattctcttagtcggttagctggtgtttggatcagctacttttgtataaatactctcaattcattaataaagaattacttttgctatttcactaataatatactttactaactttaaatcttttttatccatttttttaagtaattatgtgggagcacttgcaacgcacgttgcctccctactaatatatatatatatatatgtacaaattcaa

SEQ ID NO: 309807 - DNA, 623 bp, Cannabis indica
gatgcccaaggagccatctgtgccatgtagagctactatgaggttggccattcctgataatttttcttctaagtagacaatgcataatggaaagattcttgctagcttgctaaaggtgggaggtgggaggtgctagtttgccaataattctgacaacttgacaccttatttgtcttttgatatttgtgggtctgagcaggtggtgggttgtggttcttattcaaaacttgatttgggctgtggagatctatctagggagcacctgaaccgtgatgttttgcctagtgggaagttgggtcatgctttgttgtcttatgggaatctaggtcatgactcttttgggatgtctgtgggtcgtggttttaattttgagggtaagttgggcattgactctgtgggtaatgcttcgtagaaggttatgggtcacgtgcttaattcaagtggggagttgggccagggtcttttttttcatttagggagctgggccgtgctcctttgcatgacactaaactctccaagagttccttttgttttaggctcaatgctactagggagcttttataaggttttgtgccctaaataaaactcatttcgatataatcagatttactaattaataaaag

SEQ ID NO: 309808 - DNA, 1320 bp, Cannabis indica
aagtaaaatgattactatgtgttttaattttttcacctaaaaatggttactatgtgttgatacttgatattgtgcattggcatgcaaaaccaattatcacaaaaagcaaacatgaaatcgtcccccaaatcattttcaacttcacaaataatcccaataaaaaaataaagaaaagaaaagagactctattcaaagtgaataaaggtattttaatcttacctatagtttttcttttttgaaagaaggttagaagcattatttatttatttttcaatcgaatatctttacatttttatttgtacttagaaaaaagaaaaaaaaatatttcgtactataatagcaagacacaaatcgagcccaattttcctgtattatttcattatttttctttttcttttctaaaagaaaaagtaaaaagaaaaaggaaaaaccatttattgaccaaattccctttattattttatttcttaatgctcacaaattaaaacttattgattggaaaattttatgacacgtcactaaaattggatgtacctatttgttttgtgtttttgacatttaaatgttttaatcttaatttttttatatatatacaaattttttagaaatttagaataactttacgtattaaaataaaattcaaacaatatgttatatgtagcgttggatatccgattcaatccaataattttctactcatttgatccaatataattagtaattggatttgaaaaaattatcatccgatctaatctaattagacctcaaaatctaatctaatctgatccaattactaattaaattggatcaattttttaattggatattcaattacacgccaaatttataatattaacttaaaaatatgaagaaaaatatataaaaattaaatatcacaatttatttaagttcaatactccataaaaatatcatctttacaagtgtaatgtaaccaaaagaaaaaaaactaaaacaacaacattaccaattaataaaatagaataaaatatcatgaaaataaatggaaacttacaaaaatattggaatttgggttaacttttacaaaaatactgtcacacgaaaatcttttcaaaaatactgtgtttttataaaacaccagtaaaacacaaagcagaacaactcaaaacaacagtagaacaccagtagaacactagtgaaaacttaacacaatatactgcagtatgaaacttataaaaaacagtaaaaaataccacctgacagtatttttagtaaaaaaatggcaaaagttagtataccatgtaaatttcccaaaataaatacatagaacaattaagtgtt

SEQ ID NO: 309809 - DNA, 4500 bp, Cannabis indica
ttgtagatgaaccagtgagttttggggaggagaacaccatatcgaccaagatcttcttcaacttctgtacgaggatcatcttcgtcttcgtgccagtgtgtcctcttcgagtgacagactttctaacttgagtttcgaggattggaaaatgagtagtgaaggtagacctactccagaacccaaggtacaacaccatttttactccgagcagatcgcaggcgaaggctacgagcaatttatttgggaaattaggaaagggtggagacattatcttatgtccaactagacatatatcgtccgaccagaagtagttgataccattcctgtgggccgcccaagtttttgttcctttggcatttctattgctgctcctgctctgattttggcatggcataccaaccaacaatcgtccaggagtaggaggatggtccgcacaaaacagactatgcggaagattgctacaaccaacactcacgtggcccggcatgccacgttagcgagcgccaaacaggctcagcctgctgctgaggaagaagactatgaggtagaggatcaagatgatgaccatcctaacagcccttctcaggccgaggaggagggagctgctcggcctctgcactttggaggctacaacgaggcttgggagccggtgtccgatggcgacggcttagtagagggagaagattacgtcacccaggagtatgccgaggcggttcctcacaggaagtaaggtgcctttagagctcggtgggtgtgtcctctgtgcatcgtaactgagggccagttgtggagtttggagaaggattgttacctaggcggtgtcgaatgcttcctcccttctccaaatcaccgggcaactagtccaagggcgggatattgtgcatggtcgggtgctcacacaaagcaaggtgtgatgctgcctttgcacctgtacatcaaaaggattgcaaactacaaccacctttgcccgacccagttcacacccaagggcatcaagtacttatccgccttgttcatcctctatgcaattcaaggatggggtgagccgtctccgcacgacaccaactagctctttaatttaaagtagaccccaagtagagcaggtcggggtacttctacttctccgagctagatgataagttgataaacggcaccgtagaccctgcagtcaacaaaataggtcattttgtgaacgagtattatttcgtgacgggcatggagaccgttaacactggattccagaagattcatgcgtactaccgccatcctttcatgttggggcttagcgaaaggccgcagaaaattctccaactgccgaaggatgctcgaaatatcactttgttgactaatgaggcaaactttttgaagtacaagctctatctggtgaactttgtgccaaagcccgtgaaggagaagaagagaagtccgcttcgagccaagctgaggatgtcgagtaggagaaagagctcattcaactagagcgcgaggctaagctgaagggaggtgctggagccaaaccatatgctcatgaatattcagagaaggagaaggatgctcaagaatatttagagcaggagaggccgagcaagaagaagaaaactctcccaaccatgcgagcaccaatagaacatactattaggattagggaacctatgcctgctcggccatcagcccttgtagagagaaaacggaaagcccttttggtggagcaagaatactctttagatgatgatgctctgtctgtgattgttcgggagaatgccgctgctagcgtgctaagtacttcaacttgcatttattttctctgattttcatgcttgcacatattttatatcttcttctaactatattgctttatctgtgcagagatgtctcagaagatgatctaggcattcaagaagagagtaagagatagctcggtcttgtctcctctagccaagggtggtgagaatccgtccaaggagaaggtgccagtcgatgtggtcattgatctcttcgaggagcgacccgctgtggacccttcaacccataaggtcacgaagtccaaaagttccttaggagggagttcagacgtgtcagaacaagccagggctagatcttaacaagctagggtcggatctgaacaggttagggcccctttgacaaccctggcattgtgcatggaggccaggagaggcaaagacatgcttcaacactacgtgacctggttgcttcctgaggtgagctgccagctgtccggggcggacagcgagttgcccttggaactgtcttaggaggagttctgaaggaaatttctcacgtaaatctctttcttccttttttattcattctcctttgagtagttcagattttaacacatttactgtgaaggctggtgtgaaagtggcttacgcttactcccgaaccaaatcagctgctgtcaagaatcttgccactacccacacgatgtagagggatatggaattggccaagaagaaggctgaagatgcgctgaaccagctcgaggtcgtgaggaaggaacttaaggaggtaaacaagaagcttcttgctgccaacgccaaggtcgatgagctaaccaaggaactgcaagacataccctcaaccgcgcagctggaggcggacaaggtttgcctagcctaagaggttaatagtctcaaggatgagatggagagtctctgaactcttcttaacaaacttgaggaggatgttaagagaaaaaagacttgggaggaggaacttgtgatggaggtcggagaacataagaaggaggttggggacaagaagtccagggtggaggagcttgagaaggaggtggttgtctaggagacaactggtctcaaggttttctacgagttctggaaggccaatcccaaagggaactttgattatcttggcaattccaaagatatgtatcttagttactacgcggcctaggcggccaacgacaaccccgaggtgaccacgtctattgttcctaccgaccagaacaccgaagttcccgccgtgtagatcgatgatcctccagctcctttagacccaattgatccataccgagagcatgggaatccttctgtctgaatgccttctttttctctttctcttttttttatatgtctgtttggcctgtaggccttcttttgagataagatgaccggccaagcagactttaaacttgcaatatatttttcatcttttagacaactggctgacccggcagcctttaatcccgggtttacatgctttgttatctttaattaatttcgttccttgtaatgatcattgtgcaactgtgttcgttttattattttttttgagcttgttatttgtttttaccgatgctttgtacgagtatagttgcccccaagtgaccgagcagactttcgacgcttggttacttgcattttaacaagtataatttttgtctgtttggaactatgggtttgagcagacctttgtacgcacgtagtggtaaattgataagttgctaatagaattgacacaatttgaatttaaatagacatctttattcatttattggtcggaacacgtttgttaccgtagtaacttacataaaagttattatactaatgtaatccgatctttagcttaattgaaacaaaacaaattgcataaaacagaaattttactttcataggtggtcgtccgacctaagtactttatcattttatcaaaacctttggccgtggtctgccaataaggtcacttacttaagagtaaatgttctttcatttcatacttaagatggtcatccgacctggtacttttagtggtagtatttccttaaatgttccccattccaatactttggtaccaaaacgagttgcatattttcgtcgtacttacccagtttgtatgcccctgattctagaactttaaccaccacatatggtccttcccagttttgtccaagcacacctatcgtgttgtctttggtgttcaagaatacccttctgaggaccatatctctcacaaagaacttacgtgcattcacttgcttgttaaagtactgagctaccttctgttgatgggccaccaattttaggtttactgctgttcatttttcttcaattttgtcatgtgattctgtaaggagtgcataattaacttcttggttatatgtcaatctttggtgggatggaggttctaattctacgggcagcatagcttcataaccatatgccatggcaaatggagtctgtgtcggtcgttattttttcaattgtgcggtaggaccataatacttctgggcgttcttccagccagtttcctttagcatcttcaagtcgtttctttaaagtgtctttaagtgtcttgttacctactttgactttaacattctcttagggatatgctactgcggagaggctcttcatgattccatggtttgcacagaaatgagtgaaggattgactatcaaattgtttgccattgtctgagactatcttgtacggtattttgaacctgcatattatatttttc

SEQ ID NO: 309810 - DNA, 1629 bp, Cannabis indica
ggtaagagaattgagccatatataaaaacatgagctactctactcattaccaattggtttttgagatggaaccccatgattctcaacattaggcaaacgccaatcgaagaagatttattaccatctaagctaggtatccattgatcattataaatagatacctgggtaccatcactaatgatctatcgaccaataacctcaaaaatatttttcacccaaagaatagacggccaaataaaggaagactttttagtagctttagttgataagaaagaggaattagggtaataaaaatctagcaaccagagtatcaggtgtgtatacaatcttgcagcttgtttagctaaaagtgcctgattaaataggaacatatccttaaacctcatactaacatgagacttatactaacatagcttttctcatgtacatcaatagggattctttttattcaaattcccaccctaccaaaaccaagcacaaagcctatgaatctcttgagttaaagtcacgtaaagcttaaaaagattcatagagtaagtaggaatagactaaataatagattagcaagcacttccctaccaccagctgaaaaaaactgagccttccaatcagaaaatttgttccaaattccatcacgaattgattgaaaaagacccttcttattctggtccgcattgttaaagtttatgccctaaaaagccggtaaaaatattttgattatgaataagagttgaatattttgatatatgtatgaatgttatattattaatattgaataatatatatatatatataaatatcaaaaaaaattcttatcatatataaggttgtgacttgtagttttacaaagaataaagataacttaatcatgaataaaatatttatatacattagtttacataatgatattataaaattattttaaaataatttgaacttaaataaaagaacaaattaagtaaattaataaaaaaaataattattaattatttttaaagaagtattttccttcatttgctttatctctttttttcccgacaatcgacaccaccctaacccttccaccccacctctaccaccacactatcactagggctaagttagaattggggtttggggggtctttgagttcgatggtgaggtcctacacctcaccctcattataaaaaaataacaataattactactattactaacatagctagaaatatctttgttatcctaaaatttgcatgggtaacgtggtggctaactaagtgacacatgttaaggagaacaattctggtcggtatatttacatgtcgactaggtccgaaagacttacatagacccttcaccaaggaacatcagcaatcaaagataggtgatggttctgttagaatatgttttactaggatctagatttactaacaagtatgtttttaacaacctaaatatgaatttttaaaacgataaaaataaacacatagaaggtatgagaaatcttacattggttgcagcggaatcaaatgactcattccgctcagatctctaacccttgtatcatttctgtcgcagagtatcaccaagatctgaccccgaaactccttcagttgtttagattcttcacagtcctacatactatgattg

SEQ ID NO: 309811 - DNA, 6132 bp, Cannabis indica
ttgtacattcttggaggtcttggcaacaaatatgacattgtgatagtcactcttacctccaaagaatcaatcacattacaagatgtttagttcttgcatcttgcgtcaaactcaggaaatgagaattgatcaacaaacatcgatttctgcattggatcttcataatccaactgcaaattatgcagttgcaaacaagaaaaacacctcctctgcacaaaacaatggtactaatagtcgtggtcatggttccactacaggacaaggaggtagaaactataataatcgttgtgcaaattgtcctatctttcaggtgtgtggtcgagttggacacaaagcaattaagtgctatcacaggttcaatctgagttatcaaggtgaaaacaactcaacttcaactgaatctccttcagatgaatctatagccctgcttgctactgcctcaacagttgcttatccatagttgttcctcgacaatggagctgctcaccatgtggtgtctaatgcacagtacctcactgacaaagtggactacaaaggcaaaggcaaacttactgtaggtaatggtgcttctcttcctattctagctattggcaattcttgcattctatcatctaaacctttgttcttgaacaaagtgttgcatgtccctgctatccaaaagaatttcatcaacatctcaatttattcttgacaataattttgtgatcttgtttgactaaaatgtctgctttgttattgataagatttcgaggcaggtccttctagagggaagccttaatcaaggactctaccagctttcttttccctcctccactcagcatcatcaatatgttgcttctgccttagccacttctgttttgcatacaccattagtgcatctcagtaccactaaatactgtaataaaaatacatgcacacatagtacttctattgtaaacaattgtaaagaatccaatcgaattgttgcaatatggcacaatcggttaggacatccttcatctctaattctaggcaaagctctacaaaacaatgaataaaaagttttccaaatctgctttatccttttgtgatgcttgtcaatatggtaaaaattatctatgcatttgagtagttcatccctcaaaactactcaaccattcaaacttatccattcagatctttggggtccttccccatatcctacacctgaaggatatagatattatatcttgtttatagatgagtttaccatgtatagttggatctatcccttaaagaccaaaacaaaagcttttcccaccttgtttgtagatgagtttaccatgtacaaacaagatattatatctacaaacaagatattatatcttgtttgtagatgagtttaccatgtatagttggatctatcccttaaagaccaaaacaaaagcttttcccacctttttcaccgataaaaccttcgtggaaaaccaatttgacactaaaattaaggtcctccaaacagactgggggagaatacaaaaaactagaacttgtgttacaaaaattaggttctctttagacacccttgtccacccactcaaaaacaacaagggagagttgaaaggaaacataggcatgtcactgaaatggggttaaccatgttggctcaagccaagatgccattgaattttttgtgggattcctttgtctcaattgtatatctcattaataggcttcccaccttagtcaatccatacaaatcaccatttgagagcctctataattccataccagactataattccatacaagactataattttttgaaaacatttggatgtgcatgttttctttttctcaggccctataatcaacactagtttcagtttaagacatctaagtgtgtcttccttggatatagtccatttcttaaaggctacaggtgtcttcactcctcaacaagaatctatattgctcgaagtgtcaatttcaatgagcatgaatttccatattccaccttatttccttctaaccctattgttttatcttacacaaactaccttgctcctacatatgtcattccttccataacagatcatgcttctttaccaaatattcaatttggttcactatcaaataccacaacagattctacatcaaccattccaaatgtctcatcttcttccaacactgattctgtttgagttgagaatagtctctattagtctcctatgctaactcaacatccaattcttcctcttcatctagtgacaccatattgcctgctattgacatacttgttcctcctccaccttttcctcaatgacaccctatgcacaccaggtctaaatctggtatctttaaacctaaggtatatcttgttacagcttccaaatagaaactatatgaagaaccaaaaacagtaaaacaggccttaagtttgcctcattggaagaaagcaatggatacttaaacggttcattaaagaggaaaaagacatggatactagttcccccgcaccagatatgaatatactgtcaaataaattggtgtataggacaaactacaacaaagatgtctcccttaacaagtttaaagcaaggttagtagtgaggggttttgaacaagcaccaagcttggatttcacaacaactttcagtcctgtcataaaggctactacaatcaggctggtgtttactctagtagttacttatgattgggatatccaacaaatcgatgtcaataatgcctttataaatggtgaattacaagaaaaggtatttatgcaacaacctcaaggatttgaagaccctaaaaaccagattatgtgtgtcaattaaacaaatcactctatggcctcaaacaagatcctcgagcctggtttgacactctcaagtctactgttattagttggagattcaaagcttctattttagatacttttctattttttcaacatcagcaagggtatctcttattggtcctagtctatgtagatgatcttttgataacaagttgtgatacaacagccatatcaagactaattgaagctctaaacaacaagtttgctctcaaatctgttggatcagttagttactttttaggatttgaagcttacaaaacttcctctggtttatatttgacacaatctaagtatgttgctcacttattggacaaaacacattttgtagatgcaaaggagtgttccactcccattattatggccaataaattagctctcaatgacagtccactatttgagaaactagaattgtacagaagcgccttaggagccctttagtattcaactttaacgagaccaaacctcgcttattcagtaaacaagctcagccaataccttaaagccccaactactaatcagtggaatgcctgcaaaaggattctcaaatacataaaaggcactccacacattggtcttcatttcaaaccgtcaacattgtttactcttgaagcctatttagatgatgatttggcctctagttttgatgatagaaaatctaccactagcttcttcaatcaatccctttacccacaaagcttcatagcgtcaatagtagatgtataatcagcctcagttgtagataaacctaccactttttacaatgtagcgttctaactcacatttgtaccatatattgtaaatatgttgttacatgtggttgttaattttgttaagacttacctaaaacaagttaggtgagttaataaaagagcaagactgcacatgattttttcaactcttagttcaagtgtgatttgtattgttgttagatcaagttagttgattgcattggaatcaaatattccttacaaattggtaccagagctggacgggctcttgagcttagaccttcgaatcaaaggcaagctcaacgtggttatgcttgaagaacatctagggaaacaatggggaatgtaatgttcgatttggagaattttatcagcaagaataattttggattatggttgttgaagatgagagctttgttagtttagcaaggaattcatgaagctttgcctggtgaagataacatcaagggaaaggcggagaaagagaagaatgaaattcttgagaaagcacacagttccatcattctcagtcttggtgaaaaagttttgagatgagcgttaaaggagacaactgctactggcctatggaaaaagcttgaaagtctatacatgacaaagtctctcgcgaatcggctgttcttgaaacaaaagttttatgtttttaaaatgcaattggggaaatttgttgatgatcaaatggatgatttcagcaatataattcttgatcttgaaaacataggaatcatgattgagaatgaggacccgaccacaattgttttgaattctttatagctatgaacactttgttgatacgatgatgtttagaagggactctttgatattagaggaagtacaaagtgccttaatgtccaaagaattgaagaaaaagttagaacaaatggaggaaaactctacaaatgacttactggtagctcggggaagaatttatcaaagggagaaaatcatgaaagtttgaacaaaggaaaatctcaatgaaagtacaagaagaggtgttacatatgtcataagtcctcacatctgaaaaaagactgtccagaactcaagaaaggagactataataagtatggcaaagcagatgtggcttttgatgatggatatgagagtgttgatgtaatggtggcgacaaatggttcaatgaagattgatttggtaatttattatggatgttcatttcatatttgtccagataaagaacactttcttgattacaagaaaatttgtggaggaactgtgagacttggggacaatagatcatgttcattaataggcattggatcaattgaattgcaattagcaggaggaacagtcatgacgattcatcaggttagacaagttccaaaaattaaaactaatctaattttcgtggcaatgttagacaaggaatattgctccattatggttgaagagggaactcttaaggtgttaaaggggtcagtggcgatgatgaagggatcaatggttaatggggtctatgtgatggagggtgttacctcaagaaacccaatttcagttgcttcaaaggagataacgaactcaatctctctatgacatagaagattgggacatgttatcttaaagggtctggaaatattgaagaaaaaagtggtagtaggagaaaatgttgtacaagatctaggtttcaatgaataatgaatactagggaaatccacaaaagtcaagtttggcactggtaaacacacaacaaaggcacctttgattgtctgcacttagatcattagggagctttcaggattgtatctcgaggtggagaaaagtacatcttcaccatccatgatgattactcaaggtatgttaagttatttattctgaaacataaaaatgaggctttcaataagtttaaagaatagaaaacactggtagaaactcaaataagaaagaaagttaagagactcaggattgataatagtctcgagtactgttttgatgtatttagttctttttgcaagaaatggaattgtaagacacaaaatagtgccaggaaatcctcaacaatatggccttgttgcgagactaaaaagaactattttagaaagagtcagatgtatgtcgatctactttggtgtggcaaagaacttttgggttgaggttgttgttactacatgctatttgatcaataggtttccctccgtagcaataggatgacttaagcaaaatccctaatcctcataaaatattttatggtatctttaatgattacttaatcttaagcaagtattttacattaatgttaacactagattgctatgtcgatgccttagtctagaagaaacttgttgtttcagactaagataataagtcacaaaaaaagttccctgaaaaccaatagtaagaggttaaatgtactcctatgtacgaatttaaccagactcctacagttgagagggagcgcagataaaatgtaatcaaacaaggaatattaggagataattaagaaatatttatgaaagtgacctatatgtcataggatagaggtgtatattagaatccttatatctacaccaactcataacaaattagagatggtgattactctgggggtgg

SEQ ID NO: 309812 - DNA, 796 bp, Cannabis indica
agatcctggtaaaataaattccaacactttgttcccacactttaccttactaccgctctttattatctcgtttcactttctctcaagctcaacaacattgcatcgccgccccaacaaatattccaccaccatcacaaaccttattgccacctccatcacgtccatcaccaccatcgccatctgaactcttgccaccaccatcactgccgcagtcaccaccaccgttagaaaggagttggttcgctgaaaaatcatgtgtggaggaaccgagacttcataaatattgggttaaactagcacgttataatttagataacacaccaattctacaagattgttgtgacactttaattgacgttacaaacaagtgccctaatgctgattgggatcatcgaattcttgattgcctatcatattgcaaaagtattaagaagaacaccatcaccaacaattagttttgttatttttattctactttatattagtgtttagtgtttttttaaatggattagtagtgtttagtttttagttttttattgatcttatttttaaagtttgagttattatttatttgttaatgttttattcaattatttaatcattaataatatttttgccttattattagagttgtagtctttttggatttgagtaagctagaacttaaaacttgatttcttaatatatttttgtaatgaccgctctagtaattttgattagtaaaggtaattagcactaatttttattattttattattatatgtgaattaatttaattgtggaccccaatatttag

SEQ ID NO: 309813 - DNA, 700 bp, Cannabis indica
tttgccggtaaaaggtgactcgaaccgccaaaagttcccaccttttggcagttagattgccaacatttaccagcgaatttaaggtatttcgccggtaaaagctactattaccagcaaagtagatcgccaacaaaagtgggacctggactaaaatttttgcccacttttgctagcaaatttattgactttcgccggcaattgtatacttttgccgacacaatttaaagtatacattcttgtagtgactaaacgaaccagagaaagaaccttaaatgaaccaaaccatatcagatgacaagacaacctaattccatgctatcgaatatatgaagggattatgggactatagtcttccatatactcttatgaattttaatcattttagttagtgttactaagtgttgctatatatatttgggaaatttttataaatatatattatatagatttatattacaaaaaaacttatataaaaataattcgttattataccgtgacacgtcatcacccataccgttactgccgggattaatttggaaccactggcgatgaaagagacgcgcccacaactccacttttctagaccatccctgcgcgtggttaacaagattaaaacggaaagctataaatatcataggaataatacatgaaatcaaaaaacagaaaccaaaccaaaattgaacgaaaaaacaccattgac

SEQ ID NO: 309814 - DNA, 1041 bp, Cannabis indica
ttgaaaattttgtcaggtattgtaattttctcaaaagttaatataagtccaaataaaagatctaatattattgtcttggcatttttttttcttaggaagttttcgctgagtattgacaaagacctacgttaattaactactgcacttgccggatttccttttgaatcattatatgaagtgagtttatatataatcaagaattagaatatgtatacaattttctaaacatatactcaagtttgactttttttttctttaatggaatcaagtttgaatctcactgtaatattatatacgtgaactaaattttgggctgttttaagtgttgcatggtcaaaatttctggacatgcatatcataataaaacagtattattaactaattttaatttaaaaaatcatccctttaattttataatatggtcaatcatagtgggaagaagtcaaatggttccctaatgacccatgtcacatgtggagacaagttaaagaatccatgcaatgcaaaacaaatcctgtgacatgcatattacatatgtttgtaaaagtattaatttaattttataactaattaaaaattaataatgatcaatgataaaaactcaagtagtataaatattgaaatgaaagtaatgttatgatctagtgattctgtgaaattgtatatcggagctataaggaccaagactgagaggtggccaaaataaagaaaaagaaaatgaggggccaagagtctttggccttgaccaccttctaattgaatcggattgagtaagttttctatgtttattcttatttagcacttattttaaatggtattatttgtggagtttgttagtgtgaaattcttatgttatcctagaacacggcgtttggttgggaagaatgaaaatataggaatagaaatggaaatgggaataggaataggaatgaaatggaataaaatttaaaaatggcataaaaaaattgataaaaaaatcattaatttttttttgttacattggaatggtcattccttttttttttaaattggaatagtcat

SEQ ID NO: 309815 - DNA, 1287 bp, Cannabis indica
gcccacatgacacagatgataagttcaaatttaattttggaatgtaatgttgaaagatggattatgtaatcaccattatatatttgttgagctttttgataatcaataatgaaggttgaatttttccaatatgactttgcttgtgagtagcagaaaagagcatgcccaattgaatcccatgcgtttgtacatatcgaacacactgtcgagtcgatgactttcctttgatgaagggctgttgctgttggaaaggcattatgcagtgcttttcaagcaaaaaattttaatttttggtggtagtattagactccaaaaagtttcccaccaattcctatggttgtccgaagagaaagattgttgctgttcctctaaacttacagccaaatggaatcctaattttttacaatataaattcatgttgtgtgataccaaatcattctaccattggatgaaaaaaaactcaggggaatcataactattttttcaatatccatccgtctaagaaactcctgaagtagctctatgttccattccctttcctttgtgatgaaatgtgcaactgggagtgaggcaggtcctctatatatcatctgtttaaattatgttagtctaggaacccatttgtccaaaccactctaaatattgaagccatttcctatttcataccgaagcccttgtgttaacaactctctaccctagtgaatactttatggtaagtgtcccaaccttgctttcaaaaaggagttatttgaaaaatacatacacttcaataatcatctcaacaaggaatttagcatttcaaaaattctccatcttgtttacctaagagagtttaattataatacacgaaagaacagaatcccataccaccctcaaatttggctttacaaagtaacttttatctttttccaataaatttttgtgttgtccttattagatccccaccaaaaattactatcatactttccaattgttgacaaaaagttttttgttaagcgaaaacaactcatagcataagttgaaattgactggacaaccgctttaagtaaacctctttgcccccaatagagaataatttttcattctaagcatgcattaacttccaaatacgctccttgatgtgactaaacaactccatcttgtttcatttaaaatatgaaggaagactaagatatcgttcatgacactcactaattagcatgttcaaagtatgatggaagaaatgtttcgcagcctcgagagtattaggagaattgtatttttagttaagtcataattgtgattttt

SEQ ID NO: 309816 - DNA, 2321 bp, Cannabis indica
accccataattctcaacatggtatcagagccatatcctttgcgggcaagtgatacggttcaagattgatgagcaaaaaatagccatcatcttaagcgggaggatactgaaattgagtttgagtatctccattccggaagcaagtttttgggctgccattgcagccactgtgtatcgcatccaaaagaatcagaacttagttttgtgagaatgtaaattgtgaaaaatatatataatatatgttattcatatggatattaaaaataggatgactatatcgtcatgccaaaaaaatgaaaaaattaatataccgttgttttattgatcaaaatcaaaaaaggaaaacgaatcttggaaatcattcgaattggcaattaacgtttgagctaaaattagaatacattgattaattattcaaaatagccaactgtagaataaaataaaggaaaaagataaagacaaaaaaacaaacaaacgtaaagaagcttaattaattatgcatacttttttttttctttcacgaagaaatgaatattttatttttgcaaaaacttgaagagtaagcttgttgtattcatcttgctaattaatgaatatgtgaataaatatatatatatatatatatatttatatgcatatattaaatacatataaacagcacatgcattatattagtaccccatgtcataaataatatataattatatatagtggactgtattaattaatttttcatattacaataatctgccaataatatataaattaaattaggaaaatgatgatacgtacatatttctataattagttaaaatgtatagaataattctatgaaaatgtaaagaatggcaaagaatattttactttttcattcgtgaagaaatgaatattataataattcactatttatataaatattacgtatgagctagagccaatgcattgcatgcaactaagaagagatattattatataacacaaagatatacaaatttaaagagctagtatacaatattaatggctacttcttcttcttcttctttaagtagtagcgatcatactcgcatgaggatggatcccaagctgtactatgctgcgattaatggcgaaattgaagtattcaagagccgccaatcactccaacttgagcagttattgaccccagaaagaaacacagtgctccatatccatatcatcacttcaaaaatgatgctaatgatgcaaccaaatgcaagagaaggatggacgacgatgaggtacgttaagtctcttattaataaacgtgaaaagttattattacctcaactagtactggaccctcgaacaattcccttcatagaagggattttgaacatgtgtccagcactgttgacgcaaaccaatgtaagaggagagactcccttacttatggctgcaaggtacggtcattaccacattgttgagtctcttattaaatgtgcaaaagtattattaccccgacaagtatacgaccttgaagtggacatctctgtcgtccaaaatatgataaggatgaagaatgaagaagaggacaccgcgttgcatgaggctgcgcgatttggccatcttgaggttgtaaggatattgacgagagaagaccctgatttctcatatcgacctaataaaggtggcgagactccactttacatagccatcgagaacaggtacacatatttggctcttgaaatactagctacatgttcctccccggcggttggtggcccaatgggaagaactgctctacatgcagcgatcacatttcaaaatataggtaattacgtacatataatgcatattctagggatataataacaagggtatagttttatcatttgggtatattattagtaaagcatgcttactttattcaaggctctatgtacacattggtgtaagaagaaaattatactcataatatatcctagtaccttaactactttctagatatacttaaaatttaattataggattatgttttgaaaatgtaattaaatttatattttatatatttatataacatatagaatcgtaacattaaattaaacattaactatttacaatttgcaacactaaaattatactcataatatatgacttaacacttgttgggtttcgttagaacatcatattaggtcgtattatattgtattgtattatattgaattagattatacatcatatttttatgtaatactatgttaaatttgaatttatactaaaatatcatatatttaggtgtccataaaaattaatgccacatatagttttacataaaaatattacataaaatacaattcaatataa

SEQ ID NO: 309817 - DNA, 1330 bp, Cannabis indica
cgtgatctgacttaacactatattttcttgtgttcgttacttttccatttgtttgtgtagcttcatttgaatactctccattctaggttgagtactcttttttttgttaaaaaattagaattttattttatttggtgttgtctaaatttctccgataacatttagcgtcgtctgtgggaatcgtatttatttttgattttggaggaagatcaaaatggctgcaaatcagataaacgaaaacaacaacattggatccttcaacatcgaaaaagtgaatgtcgcactcccaggtaatggagcaagcccggttgacataattaatgggggtgtgagacgaaccactatcaccccctcaatttatttccagaaaccgctagtcatgacggagatacgtcgacaccagcagccatcataggccacttctcgcctatcacaccagtcgtggtttctgaaggaattatccaactaacaacggcccagtatacagccatgtaggaacaaatgggggcgttgcaggctgaggttgacgggagagccaggactcgacgtccacctcgagtcccgaacacgcgttcgagcaatcctcaggtaactattgcgaataggtgatgaaataaacgtcttaataataatcatatttgtagggaacaggataacgagtagaagggtctcgatttgaaccgacccacacataattctatgcaaaacagagagccagccacccataacattggtcgcactagagaggaaagaccacaagaggaaggccctgaccgacaaaacccctgaagccgggctcaaccgcgagttgaggtaaatgaagtcgaatctcattcttcctctcataatagtcattcctcaagtgtttgtaccaggttaggctttgtcgaaacacgacgaggagggaggtgccatgttcatagaggtgatcttcgtgatcatctcaatgaaattttcagggcacaatcccgaagacaagggaacaatgataacaataagccccgtgatccccaaggggcgatcaaggcacacaaaacgataaacaacctgactaatgcagtcaatccgcctcacgcaccagctgcgactatgaggtgataatcccggccaacatagctgtgggttttgccataccaatggtaacacaggccaagcctattttaccaagaggaatagaccaagaaagcctcctgcgagcattgagaatgatcgagcagcagagaaagcccatttaaaaactccatgggacattgccttttaccgaagaagtgcgacaagctcaactcctaaagagctttagcctgtccgaatcgcttaaatacaaaggtac

SEQ ID NO: 309818 - DNA, 2645 bp, Cannabis indica
atttcgaatttcttagtgttagagtagtgcccacacacaacaagggatacctcaatcatagtgaggaagatcgtgaagaaagactttcagcaagaaggagtttcagcactaaaaaaataatttccaacagtttgatataatcacttgagaatatcaatcaaaggtcacactttggctaattttctaattgaagggttagtctccgaagaagatccactcgtcaaacacgagacagaaacttggaaattatatgtggatggagcatcaaatggctcgtgtgtaggagtgataatgatctcgctagacaactttaaatttcaccacacattaagattccaatttgacacttcaaacaacaaggtcgaacacgaagctttgttggctagtttaagaatggctggaatgttaaaagtcaaaaatcttatatgctatagtgactcgcaattgattataaatcaagatctaggcgagtaccaggtgaagggtttaaagatggcaaaatatttggagatagtttggaagaattggaaaagtttgattatcttaagattgaacaaattccaagagaacacaactcaaatggtgatgcactggcaaagttggcctcataaaatgagttggatgatttaaatttggtactggtggaaatgttacacgaaccaagtatatgtgaaaaggaagaagttgagatgattgatgcctcgcctacatggataacacccatactcaaatacctactcaacggagaacttcctacagacaaaaacgaggcacacaaactcttgtattcaatacctcgctatacaatggttgatggaaaattatataggacgggttattcaatgcctctcttatggtgtgtattgccaatagcagcaaacgagataatcaaggaaattcacaaaggcttttgcgaatatcatgcagttggcaaagtttatgaaagaaaattatccgtcaaggatcagagattttcacatatacctcgcataccaccaatagaattgagaataatgacctcaccgtacccattttcaatatggggaattgacttgattggggcattacccacggggtgaggaggagcaaagtacgcagcagtagctgttgatttccttacaaagtggatagaggccgaacctctagtttcaataacatgcaaaaaagttctcgattttgttgtcaaaacataatttgcagatttagaatacccattaaaatagtatctgacaatggaacttagtttgatggagaattgttcactgagttctatgaaaggaataaaattattaagagcttctcatcggtttcacgaccagaaacaaatggacaagtggaagctgttaataaaaccttaaaggatactatcaagaagaagttataccctgcaaaagggagatgggtagatgaactaccacaagtactttggactcacagaacgacaaagaaaacaacaacatggcacactccattcttgttagcatttggctcggaagcaatgctactagtagaagttaatatcgtgacccacagatgtgaattctacaatcaagaagaaaacaaagaactccttaagttgtcattggatttacttgaagaaatacgtacggagtcgtaaattactaatgcagcctatcaacatcgaatcacgagatactttaacaaaagagttaagaaaagactcttcaatgttagagatttggtgttaagatgggcatttgcaaacacacgagatgcgtctgctggagtgtttaatccaaactgggaaggtccgtatgttatcgaggtaatagtaggaactagggtttataaattggctcgtaggccgctaataaaaaaccactagaatagtgagcatttgcgaccctattaccagtatatattaagtgtccatcttgtatttctctatgtaaaatttaaattcctattattaatgaagtgaaatttcgctcaagtaattacaaagtcttctttaaaattacttgaggggcacatatatgtgtatatcaatgagaatttatctagaaaatacatattatattgcaaacccatcccattttaaaattttttccaagaaaggataattgattaaaattgtctttggacaatataaagtcaaagaaaaatttgaaccttttctttagaatgaaaattgaagtagcagttgtaaataagattaactcataaaataacataaagctacatgtgaggctgaatatttaacgagtcacatcatttaggaatttattataaatgaggcatagagatttcttaaaaaaataatagttaacctaaaatataaataaaaggcttaactattcaaataagcaattaaaaaaaatacaaaatagttcataaaatgaatcatacaaagtatgtataagtttgcttttaaattatatgtggcatatttaaactgcttgcataatattggataaaaaataaactactcgcgtataataaggcagactataattgctcgcgaactgaaaaggtataggcagagtatagcttcttgcacacatacatagtagattagtaatgttaacgcagattttcgttaaccaaatttgagcattacgatgataattcaacacagaaaaaataaaagctatagaaaaataatatatgaacacagggttttt

SEQ ID NO: 309819 - DNA, 3952 bp, Cannabis indica
attgtagtcgatgacttatgtaaagcctgaggactttcatctaacagtccccaaggctagttggactcttttaatcctcctcgctcataatcctaggcttttctcatacacttagagatggacttgtggcctccactaccaccacctccgcctctaagtgactccgagaatgaaaactacttctttaaagcccttagactccatttaatacactctaaaaccactaggagaaactgatttcgcaaaagccagactaagaataatggatgctacgaaaacagagagagccctcgttctattcggatttaagccaagggtcctctggttcaaataagagttgtgcggtctcttattaagaggatcaccacaggggaaaggactcgagacatgatgatcgctacaaaaatgatgaacgaaagtatcccgagtcacccttactacttctctaagatcggaagaacaaagggaacttggtttatcgaataacgtattcctaaagatgaccatcaaagcgagaaccccattaccaagcaagttagtaaaacaaaccgcggatccctgcaatacgactacacaagcgcgtccgccagaatgcccccttaattctgctacttttttttacacaattcccagccaaaactgaaccttcgattcgtcccttcctctctcaatcgggtgaattgggttgagcacacggatagtgagaatgttctttaatcaaatgatgcacctatcaccgacttagttgcgtcttctttcgcccactatcaaggaggaatctcactctggaaagcaaggcaccaccctccagaactatagacataggttttagacaggcccctgcgtcaaagccgtatccgtaacctccaagccgggataagcaggcacgaacttccgtagttgtgagacgatctctgcataagcctgttccgacttcgattgacattgaggaagagggatttctacttggcttgatgtcctttaactactcatcaaggctcatgtacctagcctgttcatcattccattcctatcgttatgttaatagtaagagtatgcgtgcttgcaaaggaagtaagtgagtttccaggctctcattcgtccgacccaacctcagactctttcttcccgacctatttgactctctggccgcagttatttaggtggtatcccgagattgaagagatctcattcctcccgggaacacacgaaacaaagatatgaactaggtaaatagaaatggaaaagagatgtttccaattcatcaaaatcagaagctttttctacatccatatgatctactaaagtagatcggtattgcccatataataaaagcagatcttggtccatggagtcccaagaaggtaagaactccaacctgtccgatgcttcttcggccaaatacaatatacaagtgggacctgcactatgagcaagctgtgcgaaaaaccgcttcttttttccggtttcgcaacaacttgggcgaaatagggttctaccgggaaaccataaattttttagttttcgccattggttactggtcaagccactggcatggaataagataagaatctctggagatctttcctctccacttactcgtaacaggctttccctctgtagactacttcttccgaatggcataattgtcctattttttcctcgatcttcaaagaagactgactcctcctactcctccttctcctttaggataggatcgtcgttggtccttctttcactaatgatctaatgatctcaccattttctagtagttcgcgcgaacgcgcgagggactatcctttctatcgcttgcgcttgcttttcactctcaaggcaacggtctctctcttctataaagcgaagcaaagcgcatggcgctgaagtgaagaaagctcaataaacacacacgaacacgatgcagggcatagcataaatgagaccgctgatcatttcataaaacatatatgctttccctttctcgatgcttttttgggggtgactcaccaaccgacccagcagtgatcgatgacagaatggtacgaacaaatcaaagtcattggatttggtagttctccattgacttctctctttacccctttgcatatgttcctaaatgggtgtgcacccccacccagatgggcaggggccggcctcccaccctcttatgcagcatttattagcttagctgagttgggtggatcgtgcaataagcctctctcgaccctccctttctcatacgtctttatgaaagcctctcgcctttcgagatccggtccatcatcaactactcagtcagatcttcttgtttgcttgctttgacccttaacggatttgatcggcatttcgtgcctgcggaattcgaccttttatccgctggttgggtagagcgtagtaaggttagaggcgcaactagaagagttggccctatctttctatttttttctcaattcgattgcagtctccgaaatccttcttgatcgatggtccccattagcattagtgccaattagcagccgctctttttggaaggcgaggatctgaaagagatcgcggattccacggtagcagtagttctagctctacattaggagcacgggggctctatctatctaaaggaggtacggaccccttccatagtagggtacgatgcagttgaaaaacgtaagcccaaccgggcttacgttttcttgcttttctttgttgaaccctctacggtctaccctctttctcgatatcccaattctagcgttcgttagcagaagtagagatagggggagataggatttattacaacatttatgtgaaaatgacagaagccgctataaagggaagaagcacatcctgcaccttcacctgcgaagcgctacgctcctgcttacgaaagactgaaccaaagaagggatgggatagacatagccatctctccctcaccccgcagctcaaactccgcatcctgatccagatccagctacggacttactagagctactacgcatccggggaaggaaaaaacaaacctaaaagagggcataaaagactgtctgaatcttcctaaagtagcagaagacatgaaagtcactaaacagcgctttaaaactattcaatgtgggcatataaacaataaaagaaaaagaccgaaccagcaagactaatgtatacttatacctttgagaggtccacttatactattgagaaagtctcttaagctaccgtaggttatataagattcaattcaatctaacaagcggactacctgaggatactacaagatctttagaaaagaagctgagcctactttacgcacttccgcactaagcaggcaaggccaactacacaagcaagaaggcatcgcctgcggcttccaatccaatgacaagcaaaagacgaagaaggaacttactataccttacccccttgtgcccatagcttgacctcagccttgaactacctgcacggatgccttcccttccttgcaaagcgaacctagccaagcaatggaaggaaaaaggactaagaccttcctcgcgcacagacagacgaccatctttagcgaagtccctccttcccctaaagcatccgtttcgtcaaagaaggactacgcaggcacactgactactctgattgggcgtggactgggaaaaagtagcagctaaaggaaagctaaaaggtattggcgaagaagtaatggagggtccgaaggagaaaaagagggaaagctaaactagctaacgaaggctcgagagacctcgccctagtacaccaaccaggcaataccttgacctcagacctcacccgagacaggctgccacagactccagaagaaagtcacaccgctactctaccgaactcgagcggtcaggaagaaatatttcttatataataaatagatgtttctttaaccggatttctcttccaagagccaatgcgaccagaaatgttttaaaacaaaaaa

SEQ ID NO: 309820 - DNA, 1267 bp, Cannabis indica
tttttttttcttttttttcttaatcaattaaagtgatcgtgttaaaaaaaaattagtacatggatcataattacaagttttgtgtaagtttagccattacaatagacttgaaatcagcagaaatattatgctgattaaaaatacaatctgacgaaaaacaaagactctctagcaagacaatgagcagccctatttgcagatcgcttaacaaatacatgttaatattattattgatgcaatttagtattgagtctcatataatttaatacaataacttttaagaagtatcactaaccaatcacatatatcactgtgccattcgaggtgaacatcaccttaatttctcgtgactactatttagaaaagtatattgtattgttttattttataattagtcatcatcatttattaaaatcatgttactacaaaagtaaaaataaataaatatcaaataacagtctttttaaagagtgtcaaaattttttatatcacttaaaaatataatattttattatatttttaaaaatctaaatttttttaaaaacctgttcattgcgggtgggtcaggttcaacctgatggacctaacaagtgagtttctgtttaatttttttggacagaccgagtttcaggttggacccgtaacccgcaagccaactcggccaatttatatatatatatatatatattaagggtgtatattggtcggtttgatcgggttgtactatactttttctaacccagtataaatgagttgcaaatatctaattgtaaccaatcttatatataaaataaaaagtttaaccactcaataatttcattaatttggtcgtgttaacctgtccaaaccaattattattattattaaatttagtgtttaaataattagattttaaaaatatatatatagtatatatttcaagattaaaatcattatagtctaaattaatattaaaaacttaaacatagaataaatataaattgaataaacattaaagtattattatctaaaaaaaatagattctaaatgttagcttcaatatttaaatataatcaaaattatcaattaaaaaattcaaatttctaattaaacactataaagtacaaactttatattgtaaaataagttaaattattaaacataatttatgtaatatattatagacaattttagtaaaaatacaaaaattgatatatttgttttatttgaattattattgattttttttgttatttgtatattattttttatattgttttgttgttat

SEQ ID NO: 309821 - DNA, 2423 bp, Cannabis indica
ccaagcaaagtctgtgaaacttggtgaatagaaaatgaccaagagacttggtcacttgggggcaccatactgtacaatgcattgaactaacacaaagaacttatgcagagaaattttaactcttagtataagctactaaacttgcctttaagtcatgcaggcatacttcgacttggcaaagtaaatctggacccttacttgttaaggccataagaagatagccaggattaaagacagcctggtcggccacataagaagatagccaggattaaagacagcctggttggtctgcctagagttattggaagaaataagaatgtggcgtttggttttttgatagagaaggtgaggaaacgcattctaaattgggatagtaagttactatcgagagcgggcaagaaagtcttattgaaatcggtcattcaatctttgccctcatacactatgagtgttttcttaatccttttggaaatttataaagatattgatcgacttatggggagattctggtggcattctaagtcttcccatggtaatggaattcattggaaaagttgggacaagctttgtcttcataaacataaaggatggttgggtttttgtaatttgcaagattttgatctatcaatgttaggcaaacaaggatggagtttgctgaccaatccttcgtctcttgttgctcgggtttttcaagccagatattatccccaaggtacgtttcttgatgctgaattgggttctaacccgatttatgcttggaggagtgtttttgaagcccaggatgttgttaaattgggagctagatggagggtagggtctggtgctgctattccagttcttaatcagctatggcttcgatccaaggataacccttttgtggtctcatctcatgaggcacttcatgattgtagagtctttaatcttctcaaggttgatttttttgactgggatgaagagcttttggaggatctgtttgtccaaagagatttggagttgattcgcagtattcctctacctttgactctagagatggacacctggttttgggcttttgaagcttatggaggttactctgtcaagagtacatattgagctttgcaagtgcataatgggagatggaatttgcaagataactctggtttttggaagaagttttggtacttgaaattgcccccaaaagttaagaacttcctttggagggcatttaccaattgtcttccaactcttgtttctcttcaatctatatgggttaatgtgtatagcatctgcccactttgtaatggagaggaagagattatctttcatatcatggtttgctgccctttcacctgagcttgtaaagatcgaggtctggggtttaatttttgtgatgggggagatgagtttggtagctggtttgagaatttctacaatgctcatctaggggaaagtttagataaattggcaatgatcctttcgggtgtttggggggctcaaaatgacttgctttggaacacgaaaaatgcttatgtggagagagtggtttctgctgcagttactttccttgaactctagaagtttgctcaggttaagaatggtcacttttcgataggtactgagctgcagtccaagctgtatgttggtgagttaaaggttaattgcgatgctattctttttacaagagagaagagtcatggttggggtggtttgctcgaaatcatgaaggtgtttttgttgcagcagctgctgtgaaaaggagtggtgagcttgatccacttgtggctgaagcaatgtcattgaaagaggcattgagttgggttaaaagtaactggggaggtgcggtttctcctgtaggggatatacttggtgttgtggtgatggagactgattgtctcatgctgattcaagccattaaaagcaacaagcagattatttcaccacttggtcttattatatcagattgtattagtcttttacagtctatttctttgtttcacatttcagttcattttgttaaacgatctgggaaccaagcgactaattggttagctcgttcttcgggtttatgtcctgaccgtctttccagtaggggggttgtccctgactttttagaagctattttaataggtgatttgctttaatgaaagttgaaatctttgtttcaagaaaaaaatcaacagcaagtaccataaacaattaacaagagaaaactgattataaagttgagaaacgaaaattaaccctaaaaccaactaatgtgaaatacaaatgaatctcaaatgaccaaagcaacatatcagacctaaaacaaactaagaaacaacatttttcgaaacacgtgaaccataccttaaagcgataaaacctaaaatagggaaaaaaaactaaaaaaaaaatagtaatacaaacctcaattaaataaggagcttgattcttcccctttt

SEQ ID NO: 309822 - DNA, 3343 bp, Cannabis indica
atatctcaaaatcatttcccacacaatataactaacataacagagagctaatacacacatttaaagctcaaaatcaaagctcacatgcataaaaattagattgaaacaatatacgatataggctccaaacttgagcaaaatatcaacaaattcaagctcaaagtgactacgagtcaggtcgaagcctcaagtccagattcagatctcgatcttggatcccggtgtagctctagtttgggcctcggtcctgggctgagtcctaagtttgggtttgggtccgggttcgaggttgaaacctggtagtcacgtcctaggttctgggtccaaggttgggtcttgtgtctcgagtcttggggtcgagttattagtctaggtcccgattctagggtccagtttcgagtccaagtcccccatctaggtccagatccttagtccaagtctaggtctaggttcgggtttggggcctaggtcccccatctaggtcacagttcggttctcaagtcctaggtctgagtctcaagtcccgagtcccagtcccagtcttgggtcccaatcccaatctgggttctagtccaagtccaggttcagggctcagtcctagtctcggtcttggtccgagtctcaggtttgagtctgatttctggtacgagtccggctctaggtctgggtctgcgtctgggtcaaggtttgggtttcagtcaaggtctaggtctgggtctgggtctaagtctgggtctggattatggtacgggtcttggttctggtccaggtcccaggtcccgggtcttaggttcgaagttctgggtggcaggtcctgacacaagtctaggtccaagttcaggtctgctctgggtatgtatcccagtctgtgtctaggtccatgttcgattcaacgtctagatccagttctaggtccaggtccaattcttgttctaagtcctgattctagttcttgtttcgatttcgggtcctgggcccgagtctgggtttgggtcctggtatggaaatggttctaggttcaggtcttggtacgattccaagatctagacaccgactatgggttgggttcaagcctcgggtcgtgggtcaagattcgaatcccaatcttgggtcccggtctcatttcgatttggatctttggtccaggtccgtgtctgtgttcttgtccgtgtcaaagtcttggatgagaccgaggtcgggtcttgggtctagtcccagtcttgggtcctaattatggttctaattttgggattgggtccccaatctaggtgtgggacctagctcaaggtctgagtcttcaatctcgatccgggtcctacattcgggtctaggtccaagttcgtgtctgggtttgggttcgtgtcccgagtcccaatctgagttttgattcaagtctgcgtcccactctaggtctgggtctgggtcctagttagattccagttctgggatcgagaccgggtcctagtcccctggtcttgttctagggtcccagttcgcttctagtttcgcttccaatttcgggtcgcggggtacgggtccgggcctaggtctaggttttggtccgagtcctggtctgggtttgagtccgggtgtgggtcccagattcaaacatcgactatgggtcaggtctgaaccccaagtccagattaggatcgcggtctcgggtcccactctagctccacttcgggtcccaggttcttgtccgggtccttgtctagggtccgggctcgggtcacgtgctaggtttcgacaccagttcctaagccagggtcccaggtcccccatccaggtctgggtcctaggccccagtccgagtctaggacccagtcggggttcaagtccttgttcgagttcgggttcgggattcttattgctgttcgggtctagatctgggttcgagtcgcgagttcgagtccaaatccaggtccaggtccgagactcaagttccgatccgtgtctgggttcggagacctgagtccacgtccccatctaggtccaggtcctaggtccgaattcatgtccatgtttgggttccagtcctagtcccagttccaatttcgattctgtgtccgtgttcgggttcaggtgtgggtttgggttggggtgtgagtcctagtccgagtcaagggttgggtttgggtccaagtttagaaccagtctgggtctgagtttcagtccacgtccgactccaagtctttgttatgggtccaggtttgggtctgggtctcggtccggatccaagtcccaagtttcgatcctagtctgggtattggtctgagtatgggttcgagtccatgttcgttccaaatccatgtctagattagggacccaaactcaaaattaaaacctaaatcgagacccaagacttggactgggactcatgaccggaccccggtctcggtcccagacccgaactcggacacggacacgaaccgagacccaagatcagaatcagaatgagacggggaaccaagattgggattcggatcttgacccacgacccggggcttagacacaactcttagtcagtgtctagatcttggaattgtaccaggacctgaacctggaaccatttccagaccaggacccaaacctagactcgcacccgagaaccaaaatcggaataagaactgggatcaggaccttggaacaagaattggacctggacccaaaccggatctagacgcaaaactgaacacggacccagacccaaaccgagatcgatacccggatccagaccctaacttggacaaagacttgtgccaggacctgtgacgcagaacccagaacccaggacccgttacccgagacctagaccagaaccaagacccgtaccaaaatccaaacccacacccaaacagagacctagacacagacacgaactaaaacccagactaagacccaaaccctgacccagacctagacccagaaccggactcaaacttgagactcagactcggagcgagatcaagactggacctagacctaaactaggaccgagacctgaacttagactgggactagaacccaggctgggaccgtgaccggcacctgagactgggacctaggattgggaccgggacccgagacccgatactcggacttgggacctgagaactgaaccgtgaccatgacccatacgaagccaagacccgagacaaggaccagtactaaacacggacctggacctgcactcggaatgggaccctaacccagatcgggaccaaggacccttacctaaattggggacccggaccctgttgggttttatgccctaaataaaactcatttcaatataattatatttacttattaatatagatcagaaataacatttaatgtt

SEQ ID NO: 309823 - DNA, 1370 bp, Cannabis indica
aaaataaattggacgaaaaaatttcttggacactgaaacagatagaaggtgttgacaataaaaaaaaatgaactataaatctcttggaactatttttatgcattgattatatatatgttaaagtagtttttcgtcaatggatctacaaaatcgtagacaaggaagatgaacacaagtgaatgtttataaaatagaacattgataataacaaacacaaggttttatagtagtttactctcttttagcggtaatagactacttcacttaaagttttattgatctcaatgttcaaaaagagttctccaacgttatgttttccaagagttcagttttcaagtgagtttttttggaataagagcgtcaaagaaagtccctttacaattaacttcataacctttatataggcttacctcataagctagggtttcttaacctggttatatctttttcttaacccaggttaagttacatttttaattacaaaaataataataactaatcattcaaaaacttagatatcttcacatttcattagcacatgtcctttgcactaggtggacccgaatggacatgggtagatctaaatagacaagggtagacccgaatggaggtgggtatacttaaatggacatgggtaacctgaacagacatgagtacacctgaatgtgcggggccaatccttctataaggtgttgttgtgaaaattaatatacgcaagtacacacagtcgcacaagtagtaaaatgataaataagatcgtcttcacagggattgcaaacaaaatatgatgtaaaatcaactaattatagcttaaagtaaaaggaaaaatatgagaatgattgagcaatgattcaaatttaaaaggactgtaaataaacttgcttaaaataatgctactattactagaaaattgcatacaagaaatgtaatatattaaaaagtggcttgaataactaatcccccatagtcaagtttttcccagtcgctataccattacttcagcattttcgcacagaaataacagaaattcttctatgtttatgaaaattttccaaaactcccaatttaagttccaccacctagattaatgtattcctatatcaaaccacattggagaacactatttaaacatcatttctcaagttatgtaaggtaaaagaaatattcttattccttttataagaaatacctaaatctaggaattcacttggttcatccaagtgaaaactactaaatctagtctttctgaaataagatctagcttagtaaattgttacccatggccaagaattaacaatcaaagaaaatagcaagctcacttgaatgaacaaaggaaaaaatgctaaaatatgcttaaaaattaatcatac

SEQ ID NO: 309824 - DNA, 3149 bp, Cannabis indica
taaccgattggacacctgctttgtatataaagaggtgatccaccatgaaatggcacctacgaatcctttgctacagtgaactaagcagatcacaatctgattgaaccactatatttctctgtcttattgatattttccagttttgttgattgttttcccgttcccaatcgagtactcgccgttctaggttgaatactcgcacttgaaactctctttcgtattagtaaaataatataatttggtgttgcgaaattcactcgacaacataattgaagaaccacgcgctactgattacgatgtattcactcagtagagatgcgaattcctgagaaggatagatgaccaagagtacatcctttgatctcaccaagtagagctagatcgccacaatagataagccaccgacttgataaggacgttcaattagagaaccgatggaagaggccagaatctcatcagaaatccactccaaggaagactttccttacctaaaggaggacatgccttcccgcgaaggcctaatggcgagaacagccagatcttgacaactagttgctggggggcccgccagggatctcaggcttaacaacagcccccatcaactagcctttgggcagccagacacctactcgagtacccctggccagacaggggagtacattccctccctgaggggagcgagcaactcaaagcccaatcttcaaccgataaggaccgggagcaggtggaaacacccaaagcgacaatttgagaagtgaaacggatcacttaagacatttagatccaccaaacttcagaaactggtgcgatttacctcatgtcaatacactggcaacatcaaccaactgaggaatcacggggggccagaccctgtcctatgcaggtctagccggccatggacaacagcctaatgtaggattggacggccaaggccaatatccctacctgggagtggtcggccaaggccagcaacacagcacaggactggctaacctccaccataaaatctctcagaatatggtcggctagaccctggcacatcaaagtctaaaaccctccaaggagggccagtcagtcaaatccctataacaacagatcaatctgtgcaagcacagttagaccaactaagggatatgattcaaggcctagctagtccaaaaccttcagatcttaaactagatcgatcaaggggatcaccattctcggcatacataaattttttgcccttgcccaaaattaagatgtcggtattgaagatgtatactgcacgagaagacttgttggtgcacatcaaatacttcgagatgcagctcgatctctagaaaattattggagatatgagatgtagcatatctccagccactttgtcagaaacaacttaacaatggtactttaaatttgctccaggaagattcaattcttgggctgagttttctcaagaattttacacacaattcttgtcctcaaggcttgtaccatcacaactagaagaccttgtcgaagtcaaacaatgacaaggagaacctttgaaggattacatttagagattcatggccgaggccaccaaggtcaaatgccttacaaaagagggctgatatacaaccatactggggggtatccttccattaagtgatttctggaaagatattcagagaatttcaactaacaacatgaaggagttcctcgacagagctgacgacttcatcaaattagaagaagttatacgacaagcccagacagggcatgtcaacaataggcagtcacaagacatcctacagtctcatgacttgctaagggctcaggtaggtactagcgacactgcccaaacctttggtggcaagaacacaaggagtaagcgcaacaacaataactctggaagcaaaaaggggaagtttaacacttctcccacgccacaaaatcaaaagaacaaggaggagaagcatacatgcttcaccctcctaacggagaaacttgagaccatcttcatggccactcagggaacagtctcctacaaaaagccctttcccatcaaaagggagttgagcaagagggacatgtcgaagttctgtcagttccacaacgacttcagccatgacaccaatgagtgtcagaatttgaaaagagagattgaatacctcataaggcaaaataatccccatctacgtcgttatgtgtagaacgaccagactcaagcacaaggtgtctagaacggagatccaatgccaccactagtggcaggacccttaggggtcatcattggcagactccacattacaagagagaccaacaaagctagtgagcgctatgcaaagggccctctcactcgtctttagattctgagctatccaagacagaggcacatcatcatccaaattagggacttgtccatcaccaggacaagctccctctgcaattcagtctctacactaaccgatgggccatgggctcttacaactctaggagcaggagggtacaagccgtacttctagaagttggccacactggccaatctaattatgtttctcttctccatagaaagagacaagatgtaggtttccctatccctcatctacaatgtagggatggagcgcttgtaaaatagcacgcgctagaaatggtagtgtccgacattctaaatgtcataagaaatgatgtaatttcgggtatacccacatacttttggacatgagtgtgttatttgtgtcacccaaccactagtggccaacctgactgaagtagaagtacacagtcttgttctgcttcagagaagaatttagatcgaaatagtatccaatctcataaggagtgggctgaggccaatctagctccttatacaaaacaaacatcatcgaaaagtacttgatactttttggggtgatttgtttcggacacatctcaaaataagcagcaatgttcttgaagtaaggatagagcgacaatactacccctgctctatatgattctctgaccacgtcatccaaccgagggtaagccggtgcgccctttgatcactagcgggtatctcataatgaacacccctcactagcccactagcaagtatctgttgggttttatgccctaaataaaactcatttcatataataagatttacttattaataaagatcagaaataacattttatgttgca

SEQ ID NO: 309825 - DNA, 1192 bp, Cannabis indica
ttcttgacttttactgtcggttaggtaattagtgacagacatagaaccgacgcaattttgtttattttttgtgacattttaaaaatgacgaatatattgaatatagtactattcacgtcggtcaacgcgatgaacagtcgcgttgaccgacgggaatagtggattttgtagtagtgactataaagaaggtttctcaaggaaggaaaagaattaacataataactgttctatttctcatagttatatatatttttttatggctaaagtaatatataattaaactactaaaagaaatttgtttttgttgttttttaattgacttataagagatttgcaccggtaagcaaaacaaacgtaataaccataaacacaaatagtatcttctttacgtcaattttcaataaatgcataaaattttatgaaaatgttcataaccgatgcaaattaccaatatatataaacatatttactcaataaaaaaaaaaaaccaaatttacgatggccatctcgaacccaaatctaaaataaattcattacatctgcgatttgaacgaaagagataaaccacccaccgctaccagatctaagtataaaattaatgcatgtaaatatatacatctataagatatatatacatacatatatatagcagagagagaaaaattgcaacgccttaacaaataggcacgttacccaagatacttaagaaaccataatcccctaaccgggattactaataaaagttagcgcaaaaattaaactttaactataaattggaatgaaaataaacctgtaataatttaaactttacaaactaaaagttgcaagttttgggatcccaaaaatactttacaaaatattattacaagtccgttttcactggccgacctaagcagcaaagcagagtcttggctgcattattttaccaggatctagatttactaacaagtatgttgaattaacatcctaaatatgaattctctaaaacaatgaaaataaaaacataagggttttagaaaaccttacattgatcgtagcggaatataatgactccttttgttcaagatctctagcccttgattcctttctattagggctgcaaatttagacctgcgaaccacccaccccgacctgctgccaaaaaaatcgattgcctaaaaagccgtgtagtcgggtcaggttcaacccgaaa

SEQ ID NO: 309826 - DNA, 888 bp, Cannabis indica
acaccgtcattaaaaaaatagttagttttttttttttttattttttactattttaaattaatttttttttttacaatttttatggaaatccatagcaacccacataaaacctatcagaacaatctaaactgtaaatttgaagaaaaaaaaaattcaaaatagtatatgtgataattccaaaaaagaaaatattttgagttataatttttccaatttagctaagtttatgtttcacaaatttaagaggtatatataaggatgtgtcaattttggacatcaagatcaattaatttataagaattttgtgtccaatcgtgtatagggttttttctcatatatgttgcgtcgaggtggggattaattataattaaagataaaaaaagaattatttattgatatataattattaaatataataaatacgtataattacttgcattgatgcaaactaaaaaaaaaaaaaagtagttttatttgatttaaaaagaaataaattaattttgtatatcattaataaagagattaattagacaataaattacaattagagatacacacgagttagagatacacacgaggtagaaaattagcgaacaatgctacatattctcattaataattttaatttctattcttgcatattaataatttttatattaattaaaaaaatatatgtatctgaacattttattttattttattttttttaaaaaaaagtattaatgcatcttttgctttattatttacacttgtgcttttatatttattataaatgttgtagtcagtgcaattaaaaaataaataaattatatatataatgtatcaacaaacattttttaagtaatatataaaattgaaccttctttaggcccgtttgatcaagctttt

SEQ ID NO: 309827 - DNA, 1241 bp, Cannabis indica
agatcctggtaaaatatattctaacactaagaactactctaccacttctcaaagactttggctcgaaacattgtttagggaagggtgttcctcgaaagggatagagttggacaacacaaagatactatttttataaaaagatttagaaggagccttaagaacatccttatagcttagggaagggggataagcatgcctatcacaatgttgaagaaatttgtcacacttgttaaaagtatgatctaaattcctacactggtaatagtaattatgaatcccctcgtaaagaaatttaagccatttggtgatggatagtttcctaaagtggacattcattccactatggagaggcttggtggtgtcaaagagaactctaactctaataaagggtattatagagtcatacagggaggaaaggttcaccttaataaggtcccctatagtatcagctacaatctgagctaaactataagacatatttccaaaaggaatataatggaccaacatccaaaggggaatatacctgagatggtttggaaggattgtgttaaaaccatcaggaataccaaaaaacatgagggaacggtcaaaaacccaaggttgaccttcatcaacccttctataacctttacatccaaatcgcaccagaaaaagaccagagtgatactcaaagaaagtaaaaggaaaacaagctatccaagcttctttcaacccattcagctttgaggatcttagaagtaagaattttaactaccagacagtaggactcaaattgaggctcaagatgaagggaaacatgatcaaaatcatggattagtacttcatctttagtgagttgaataccatggttagggttttcagggttggttgtcatggtagaaagcatgcaaggtggtataataccatacaacattcagaataattgtaaagtaggataaaatctacacctgaaacgtacccttaaatagccaaatagacagaaataatacctggaagatcgcatcccaggaaggtggagagatgctaaatcaatcctagcataccatagcccaaatcttctgcagcctaaaaccataatgatccatatgatggaaattgttgtgctcaaatagaaatatcaaataaataagattacaactctatgacaaataatacaaaggataaaatcatggattaaataatgttacaacactacacaaaatatacacaaaaaatagagaatatagagatgaagagaagaa

SEQ ID NO: 309828 - DNA, 1004 bp, Cannabis indica
tattaggtatatgtaagtatagaaaatcaaatttcccttatataattaatcaatctatattataataataaggatttttttttttttgaaagaaacttagttctaataataaggaaattagtagagtagttgaagtaaataatagtgagtgatgtcacgtcatatcagcaatatgccaattgtgccaattgccaagttccaaatgcacaatcactattattggcaaattaatgatgaacacactgcactgcacctccatacacatgggtgaagggttcatcatatatatatatggcaattaaaatgtaataaaaatcgtatgagttgacgaagatcacatcaatatatattttttctaaaatttattttacttaatttctttttttttttctcttttcttttctaaaaagccatatagtttatagttgttggccgcgtaaatataataaagttgatccatcgatagtagcggtaaaaagagaaagcaaagatagtaaattatgttgatacctactgatgttgttctatttatacagtcttaatgagaatctgctttttatttctgtaaacttttgaccaattgctacttctattccaatctaattaatcataattattataatattaaaatcaccactctatttcatttattaattttcaaattagactaacatttctcccttttttgttagacgtcgctggatcagaccctttattgtttttctttttcttttttttttttttgaaagaaccctttattgtttttcaaagagcgaagaataagtattttcagtcaaaattctgctattctagtcaaacgtgcgtctttttttttttattattttttattaattttttttttttaaaagggaatcatctttcttactaaaaatttccatataaattaaaaaaagtaataatttacttagagtaactcctcaatatacaggaggcttttttatcattaaattacttttagggggcgtttggtacgaggtgttcaa

SEQ ID NO: 309829 - DNA, 1755 bp, Cannabis indica
ctggtaaaataatattctaacaattcgatctaaatttatatagatgattagttaccaattaaattttagatgaaatctaatatttcttaacataacccgacttaactctagtaagaatgattgggtgcatgtgataggaaataattttattttttaattagaaaaataaattaggatattctaaatatctgaaacttagtaattttaaaatctataatattcggtgaaatatgttgattggtgtgattaatttatatatattattatatgcttttagttttaaacatagtaatcggtccgctaataccataaaacatgatttttctcttactcttaataatgttatgtgtggtgtctagatctcccaaattttatgagcatttgagctctttgtaggccattgttttataatgaaatgaatgttgtattttttctttaaaaaagaaatgaatcttaagcaaaaagaagaaagaaaagaagaagttgtaataaagaagaaggaagggatgatctgtgggtgattcatggttagaatttctatcccgatccaaaaaatggtcgccctgagagttggaaaaagttgcaaactttcttactgaggatgggaactgggatgttgacaagctcaatttcctgtttgaccaagtgacaaccactaatatccttacagggggtaggccgggggcaagacagtgataaatggatttggacaaaagacccagctggtcggttttctacgaaatctgcctatcttgctcagaccatgtcctgagctctgcctagcacggtggcacccacactttggaattctagggtattggagcgtcataagattttgtagtagaatatcctctcaaatgctctaccgatcaggaatgctctagctaaaagaatgcatattgatgaggtgttctgccctctttgcagataagaagaggaaactgtggagcatctattcctatattgcaattttgttgctcgcctttggagatcatccccttggggtgtgatgcaaatgctggagtcggggggccgaacgtgggattgggttaagttcttatggggcctgaaggacaaaggagtggaggtcaatgagatcttcctgtgcacttcgataatcgtggatacgatttagaaaatcaggaatgataagattcatacactaattatacttgtaacattaaaaagtgtactgacgatattttttcttgctatgcagattatagcctttgtttgttttctttgctggtgatttgctcgactccttcttggtctccaccgccagacgattgggttagtatcaactgtgacgttaaggttggtaacgattcgatgtgtgtgatggccttagcggatcataaggagtcaattttgtgggtggcaagcaaaatcttcaaattctctgacccttttattggagaaattgagcttgtctgttggccctggaagcagcagttcaagagaagcattcttttgtgatcattgagagcgactcgaagacgatgattaatactctgaagggaactacttcgacttgggatattactaattatgcacttcaatgtaaaaagctctcaagcattttgacgggctgtaattttgctttttacttatagactgtttaattttacagtctgtaatgtggttaaatgaacttttcagtagcaatttaattggtatagtgaatctgtctttcataccgtgtaatttaatttagagcaattcgcggcgaaaccctcttatgttttaattttt

SEQ ID NO: 309830 - DNA, 2241 bp, Cannabis indica
cctattagtaacctgctattataggtcaaaaaaaaaagtaaccatatggttacaataaaaatgtaactattgaatagtcacccatataaatatatattacctagaggagggccgacaccggtggtggatggccgatggagatagaggggactggtgaacggagctcgtggctttcaaaagtcggtcgtcgattttgaagggtggtggtgaacggagctcgtgggtttggtgggtttcgtcgccgacacccactagtgagggattttgtcaccgtcagccactagagaggagttcgccgtgagttttgtcgccgtcagtcacaatgcgtcgtggatttggtgggtttttcagagtggtgggatgtgtgtgtaataaaatggaagatggttactataatatgtatatataattaataaattaaaaaatatatataaattggtgtacctgacggttttcaaccatcaggtatagggtttaattgttttatatataatttttatgttttaataataactgtcttctattgttgtagctattgttcaaaaccgtcgggaatactcatttttccccacggttttatacagttgcttaatttttttagcgagagtctccaaaaaaaaactattttcaagccgtcgcaaattcaaatatttgtagtagtggtgcgacatcaaatacaaacaaggatttcgacttaggtccattgccagggagacttcagttgttttcctcctaaacgagtgatttgagaagaaggctatagcactagcgagtcgtctaggataggtggttggggtctcgaatagataagagttggagcaatactccctcttaaagactacttcaaggacttttgcaactacctcgccatcccccctttccaactggtacgaaattcatgtagaatattttctagtttaaaagttttgtatcatattctgaagtgggagtgcccaacccccacttgaaattccttatttttacttagtgaaggcttgtcccgccagaaagtaaggagcaagtggtttttactacctcgggaccaacacaaatgatcaaaagattattgtgaggttgcccaataagaatgaattcgaggatgaattcttttggacatcaggtcttgcctctatcaacacaattgtattttggatcatacgtaagtattgactttttctcaaaaacttgattttgagttttaattttaataaatgtaggcttttactaattttgtttgtgttgtattgacagcggttacgaggaggcccattccgactccaaaaattgaaaaaagacacaagatccttcttggtcttccctttagattgtgagcggctgacttcttattacatgaggataacttgaagacatgcgctcttctcggcagcaaacaatccactggtgacttcaaagtcccaaagtattcagactggcaataggttccagttcttgctaatgaggaagacagggattatgtggctcgcacccactatttgaagaacataaaccctcaggaagctgaaaatgatgcctcccgaggtaataaacttagcgcttgtagatggtcctcgactgtacttagggccgagcatacttccttagttaaatttaaggaaagttagtacaacttttacatttggaatggtgtagatcgaattgcccataaatttgatagttggtactccgagcatcatgttcaattaagctataatagttcttacttcagaatttccaaacaatatggcactaacttcgataaggcaagccatccagattgggacatgcatgtctccactaaacccctttgagctttacatgattaccggttctagggagtttagtaattattttaattcttcatcttcgtctgatgactatggtaattttcttaagtaggagattatctctccacattttctttatttattttgtactagtgctgacactttgtcttttgtcttgcagacatggactttgaaaatctcctatccacttcgggttccaagaagggcaaaaagcgaggtacactgactatggtatctttgtttatttagtgttcttgtaggtatcaccaatgaaggggattatgcgttttaaaaaaaggagaaagttaagcccaaaattaataggtccttttgagatactggacagagttggccaggtaacttactgtttggccctaccgctaacattagtaaaaatacataatattttccacatttccatgttatgaaagtatgt

SEQ ID NO: 309831 - DNA, 1602 bp, Cannabis indica
acaaaaggtaggggtccgatggttactaatggcagggggtccgatagtgtatgagaaatggggtccgatgggattttgtggggtccgataggttacgaaaggcaggcccgatagtgtctcgggtatggggtacgatgggtgctggtggtcgataccggtgctggtgggggtcgataccggtgctggtggtcgtgcggtgccatcggtggtggtgggtcggtggtcgtcggaggtgaaggctgtggcgtcgtgggatgtgggtgtaggctgtggcgtcgttcagcgagagggagagagagtagttttgagtttttgattttaattttgaaatgggaggggtctttgtgggatattagtaataatatatgatcaattttaataactatgcatttagggaaaaaaaaattaggaaaaaaaatttagagtattgtaagcatggaatttcaaatttcccttttggtttcattatgtagcaaaacttgcaattaaccaaacatgataaataaggataagatataaatttacatattattgtatttttctaaaatgaatttacatattattgtttgtgttatagaattgtgagtttaactaatgtgtgacaattttatttttctttttttaatacataatatattggaaagtgagtcctaagatcatagcgtaaacattaaataagttttaagcgttacaacatatatttaggattgaaaattttatatttagacatacactatatgctactttttatgtaaggtatttagacttagacatatacttagttatgtggtaagggaaagtatagagcaattttcagtatataataaaaaatgaagttagtaatatccttaagaaagtagtagttggttatttcttacatgggaaaaaagggaatcaatagtttgattataattgcaaagctaatttgagaataattatgtgtgccataattaataaaggtgtaattaaaaataaagtccatatgggtgaatgaatgagtgttatattttatcttattattattttcacatgttaagtgacccagctagctagctgcccagccatttacatcattagaattcatgaattccattgttgtgtaggttccccatcactttctcattctgctcttcttcttcttctttttattttttttttcatagagtaaggcacgcgtcatcatcctatcaaaacctattactttaaacaatttagaaaaaattatagtatacatacaatctattaatctatttgggcattaaagaaaaaatttcaatctaatttatttttcttttttataattgtatttattaaaaataatttgtaaatttttaaaaaattataaatattttatatgaaaaaataaaaataaaaaaaatttacatgaaaaatacaaaacccaacttttattacattcttaccttctcaagagtaggatgacttttataccaattcttttgttttatttattaaaatatcactcgcacacataattctcttaaaactgatgtcattgttcttccatcacactcaataagcttatcttttctatacagtttctgtatattatttcaatttcttcttttttattttattttattt

SEQ ID NO: 309832 - DNA, 1247 bp, Cannabis indica
ttttttaattttttataatatttttaattttttaaaaaattaatattacgtggaccactaaaaatttgccacgtgtacaagtgtgtacacgtggacagtccactgtggcacttaacggtgatttttggacggaggtgtgcagagcaaaacggaatgggagtttaggtagtttagccgccaaaaattcagttttggtggttaagtgttacaaaccgtaaagttcaggtggtttagccgccaatatccctagaattataattgggtgtatgggcgcctaattgtaatctagtttatgtttatgtttttattatgatttttttaatgagtctttcgactaacaaatattatttacatgtaggtaaacgcaaatcaaaggttgaacaatagtgaactggagctaataaagaatgtccatatcgaagcgattagacctagagtgtttgatccttgggataacaagctttatttttatagttgatgggtttgtgactaagtattttgtaaaaagagttgtaactttttaacggaatcccggattatataaagtatttatatatttaaattaaaatttaattatgaaagtttaaattattcacgtttttcaataactctttggttagtaaaggggtgcacagtaaattaaaatcaagataatgtacctaaactagtagggtgttacactgtctaaaaggaaatcaaagaattacacgggaatgttataaccttgttctatctaagaccaaaaaagaagacaactatggccaaagtttagaaaagggtaaaagatttgcctaataagaatctgcccaaggcgggcaggaaaatatagaccctgccttagagaaccaaacacaaatattggatcggaggaagaattagaagaagttaaaatcgatcccaccatgtcaatctactaatgataatcatagaattcaatgaatataaataggagttcatgtatacttaggattcaggctgatccacgaataataatcattatgatatgaataactctttcatcgtaaatggcagttaatgaaagatgtttattacatattagttcagtcatacataatctaattatacacaggacctttactacatgtccatctacatatgtgatcttaatcaaaatcacacactagaagtacattgtataataaccgtactcagtagttctatattaaagattctcattactttaatacactactgatttattttattcatatcgtataatcttaatt

SEQ ID NO: 309833 - DNA, 1285 bp, Cannabis indica
gttattgtattcttggatgaagtgaatatggcaatcacggaagggtgccacatcagattatgcatggttagtatataccctccgctcctcggcatcatagaaggtgatatataccagaagcaacccagagttttttcttgttagtaaaggtagtggaaaggactccgggagtctcattaataaaactgttaaaaagaaggatcagaagtcataagtgctctaggatggtagcatgttagcctgttcccaggaaagcctttgccaaatgttcttggaactcacttgggtttgtcttatctggagctaaacgcgacgattgtataccttctgacaccaaatcagatttttcccctacatcagaccttggtagtgggcatacgtgctctgtagctcttttttgtccaacagttggtctagacaccaactttgcaaggtgaaacctttgggtgatacgtgtccttagtccctcgagttaggttgcaacagtcgtgcaccacgcgatgaggaagctccctacctaccaacagtcagatcgccatgttgtaaacaccaattattgtaacgtgctgagtaagaaaccctaggtgggaaaaaggtatgccctcacccatacatgtgcttataaatacacacctacttatcatgtgtaaagcgtgaacaatttttacttacagaacctctgtcgatattcctatgagctttcttcttctctaagagaaacaaaaggaatacataattaatactcatattgtaaacacttgtaacacttaaacactcaccagtaaggctaattcaacaaacttgtggaatagggattattaatgcccggaccacataaaaaactacttgtctattatttaccattttatattttcttaagctctaattaattggttttcaaaaatctcagtaaatattttggtgctttcattgagagctaagaaaagtttactagtcgttcaatcactccaaccatggtgaatacccaaaaagaatgtaagcaagaaaactctattggataccattgtggaggaagcaaactcccttgccactggcccctaaataggtgggataagagaagaaggtatgaccaataccgagaactgcatggaggatgtcgagaatgtgttcgatggccttaacgaaaactaaccccccaaacgatggggaagaataggacgatggcaatgactatgtgagagatgggtacgtatatatgtggttaattattatgaacacgactcgaacctactacgagtgatcaaagagttagaagctactcaga

SEQ ID NO: 309834 - DNA, 568 bp, Cannabis indica
ggcatgccaagaatggacattattataagatttattacacagagattgatgaaaaatagtaggaggcaaatcaggttgctgcagcaagaagtagagatgaccaacccttttagcaatcccaatcctcttgttctgagaaccctgaataagacaacaattttaaataaagaaaacactgtgagatagtgtttggagaaaagtgggaacactaaataaattgaagtgaaatttagggacataaagaacattgtggtgagttagtgtatccgaaaatttgatacttcctgatttttgtattgtgatgcacattccagtagggagtttaatggaggtagcagtaggtttgttgttaaactggtaaaagagatcaatattacaacaaatgtggtgtgtagcaccaatatctacaatccataaatttttagaaaaaggtttgattttaccagagatgttggaagcaaaacggctgggaaacatctgcagttgagaaagtgggctgtaatttctgacttaatagagagattagagtctgaatgtcttcttgtttggtgatgttggccaatagaga

SEQ ID NO: 309835 - DNA, 470 bp, Cannabis indica
gagtttaggtagttttgcccccccacaaatcgattttagtagttacgtgttaaaaaatttaaaattcaagtggtttaatcgtcaatatccatattaaagatactgtaaggtttcgatagtttcgatgcaaattacccaagttcgataaataatagggttatttacagcgaaacatgcttatgttttgattttttacatttaatccctttttattatggtaaaatctccttgtgtttatttttctttgcaaatttaaagtgtcagctagatattactgttgaataccaattatattattactataatgattttaaagttttacttttgtgtaaacagtgatcattcagttggtatttaacgttaatatttaactgatgccttaaagagttttgacactaaaaaataagaataagaaaattgtgtataaaaataaagagttttttttattattattatttttacacttcaaa

SEQ ID NO: 309836 - DNA, 1464 bp, Cannabis indica
ggggccctcatgaaattaagccaacactggaaggctaaaaaatcaggaggtgaagaggaaataagctgagaggaaaaaggcagagcaagaaaaggctaaaaaggaacagaatgagttcccaggacaataaagaagtttttgatcctaagtcttgggactctagatcctcctccaagacaaaaacctagcaattatctagaagaaatgcctttttgttcaactcttcctccaaccactctgtccttctcaatcaagctagttgagcagacaaaggagtacaatgtccaactgagaaagcagattaactcttccagaagtgattcaatacagagtcagatgagggtaggcaaagggccaatatacttgcctttcggtgcaagatagagctatgaaactaaagctcagaatccaaagctaaccatttagttgttgaccatttggtggctttaaaaaggctccggtccagagttggtagtgatctagctctgtttgtttccgatcttttggagcatacaattggtacctactgccagctgagtgtggatatgtaggctacaacagctagtcaagacccagtcttcctagctcattcactccgtcatcaggctatcggaataataaaacattatcagacacttattgaacagtattgaatagtttcgagcataactaaacattgtaaaaaatattgagaaaaaaaatacaataaacatattaaacaaataccattgaacaatgtcaagcataatcaaacattgtgaacgcaagaaaaaaaaacataataaacatactaaataatcaccatcgaacaactatataacagtgttaagaatattcgaacattgtgaacgcaagaaaaaacataataaacaaattaaacaatcctaatcaaacaactttcgaacaatgtcaagcataatagaacattgtgaatgcaagaaaaaaaaacaacacaacaaactcgtcaatccttaaaataatacaaatttaaatcctacaaagattacaaacaaagaatactttaatctctccaattttaagtagctttgttgtgtcctgaactaccgcacttgctacatttttgatgtttaacttgttagaattattttaccaggatctagatttactaacaagtatgttattaacatcctaaatatgaacttctaaaacgatatgaaataaacacatataaagtatcaggaaccttacagtggttacagcggaatataatgtctcattccactcagatctctaacccttgtatcctctctgtagcagagtatcaccaagatctgagtccgaatctccttctcttgaaactggattcttcacagccttacacactatgattgagtaccacttgatgtgtgtgggcactcactctttcactataggcttcggtttagaagagaggaagagagagagaggtttcagctagggtatatgagaggaggctaaaatttt

SEQ ID NO: 309837 - DNA, 989 bp, Cannabis indica
ttttatttaatatacaattattttacttaaataaacccacatggctcacatataatatttaatatatttaatattttgtgtgtgactggtctggaaaagtagtgttgagggactcaatccacagccttataaaaaataataaaaatagaagaaagttacctaatttaaagtttttttatatgtaaaaaaactaatttatttgagaatatgatgaaacttataacctttatgctatttttttggtatacaaaatattaaatattttcttctccaactatttgttcaaataatatcattaagattagtaagttttttttaaaaaaacaaataagtgtaaatatatatttatatatataacgagaaataaggaaaattgtagcaagtttgttcttttttttttttgtaatagaaaatataaagagatttatataatattataagaagtaggatatttttttttattttattattgttttttttttcgcaatcatagcaacgacaatgaacttttccatttctcgacattactttttcttttttgttgaatttttattttgtgataatcctgtaaaatatcatgtaaaaacaacaccaatagattaattaaataaataaagacaatgtttccaattacaattgatacatacactacttaaatattttttaatagctagtactataagagaaagaaaaatattccataaaataaataacaactaaattatatattcatatctccaacaaatataaaaaagtgatttttaatacaaacaccaaaacataatatttatgaatatggaaaatagtattagcaatttatggtagtcttttggactttcaaatgagcaattactaatattattaatattgatgatgattatattattgtattatatagattaaattttacatatatcataaatatgagaaggttgaagagtatttattctatataaaatgtgactataactgaattattggtttatgag

SEQ ID NO: 309838 - DNA, 1970 bp, Cannabis indica
gtatacatactcacgtttacattcatgtactatatctaatttgttcattaaacttttgtgatgatcaatcatatcatgataagaggagggagaaggttgatatcccggtttctgttctcggcaaagaaatccatctcgttgataatgaccgtccgattattattgttattattctcatcggatggctctggagaattgttatctttgtggtgggtgtaattgaggttgactgggaactgaagagtttgatgatggtggtgatgatgtggaggagacctttcatgatgatgaatggtactgcttgcatccatggaattaatagaattattactgatcttcttgttgttgttgaagtcttcttcaaaggagttgagtactgtaggtttatggataaagaaaccaattggatctgaatcaatggggagtccacttcctttggccataaatcaagaaaaattatagagagagaaagaacagaaaagagagaggatgagaaagagagggagagagaggtgtcaaatctttgaatgatatgcaatggactaggcattaaaaaagggaagttgagactttagaagaagaccaaatagtagtagtactagcaacagatcagaggtgtggtatttgtgctaaaatgttttctatttcttagatttgaaaataaacacatctctttctttatttttttttttaatttctttctgaaaaattcatttttatatatctttttaagggtattaaaaacaaatagtcatgtcatgttatttgtaaacttgcatatatcacccaaatgtgagggcatggtttataagttgggagctttattaaataccatatgagtatattctaattttcaaaaaaattaatattaataatattgtcttttcaactactcttatataaaatatagtccatttttgttcaaaaaaaaaaaatacagtccatttcaaaaaatgtatatatatatttataaaataaagtcttttttaatatttaatttgtgtatacagttttgttttttcttatatttaataaaaacatctcctttttcctccgatcgaaattcagtcgacatagaacattttttttaaaaaaattaatatatatacttaaattgaacgtatagaatttttatttatttattttaattcaaacatcacgcaattgtccttaaaaaaaattatgcaattttatttttttgaaaaatagggaattcataaacttaagtgtttataataattacttataattataaatgaattgatatactctcaagagtgtttataagtaattttccatctaattcacaatgcaaacatataaggctacctcaatattttccaactcaaattgcatttccactgtgaaaccttcttactatagcatttatggttattagaagtgaaggattccgttagtaatagtggtggggtccgctagtaataatccgccaataatatttctaaaaatgagtattagcagcggactgacgctcgccgctaataatagtgtcagacacataaattgacattattagtagcggcaaaccaatacgcctctgatgcttttttttattttattacatgttaatattaataacaattaaaattaaaaataaaaatattgctcatttagatacactactacaagaaaaggctttttatcccggtttcactaaaataaaaaccaggatataggccaataagataaaaggtatttaaaaaatcgagataaaggaatactttttatcctgattttttcatgaaaatcgacattttatctcgggataaaaagtatatatcccttttatcctggtttttagagaaaaataggataaaatggtacttttaatcccatttttgatgaaaaaactaaaaggtaccattttattctactttttatgaaaaactctagggataaaaagtcaccttaattttgatcccatttttcaaagggctattttcaaaaat

SEQ ID NO: 309839 - DNA, 1378 bp, Cannabis indica
tacactattaaatattcaaatttattttttattatatcaaatcaataatacctccatagacactccacaattaaggacaaaaatgactatttgatcattttaatagtatttttatcttttaaaaacactttagttaatataaatgatattttagtaaactaatttaactactgaaaatgaatgctctatcattttaatgcttcaaccaagctcaaagaaaactgtcatttttacttctaacataatagaatctatagatgttcatatctatgactaacactctcactcaattatgctactgagttcctaagatgtaagtatgggctagtccgtaaggtaagttggtaacgaacaagtcaaaagatctcgaataacaaaattagcttaaagcttaatcatgtcaggattcatgtttaattgatctatgataaactaagtgatatgacttagaatagatataactataagtttataatatatgttctactgtcaatattggtccactttgatataaaattatatattcaatatcaagtctattttaccaatgtcttggaaaagttatagcatttgccttagtataaatagactgcatcaccgattatcacatcagtataaatctagtgcacttataaatctcgagactaaaatatttgaatcatataataataattatttttaactaaactttacttataaactcaaatgcaaagtggtgaagatgaaaagcttaagaggaacttagaacattaatggagaaaaatagttgtgtattgaatctctaaactcttttgcaaatgattattttctaatctcttttttaatgaaagagagaggtatttatagggagttctaatggctctaaaatacaagttgtcccaaaagttaggggacaagattacttttataccatgaagatcagcacgttagacgggtagtggtacgacagttgtcaggtgtcagttagtaatccgaatgagaaaaatagtgtctccattacttgtacttgtcgtacaaccactacttctttagagttatgcgtactttagcgacttcatcctttgttgtacgttcccttggcatccctctctttacgctcatgatgcgagtataacactttagagaaataactaagtgatgagtctatgggaggtgagtcttgtttaatcttggtagcaactccctctcccatctttttggtagtcactccgttgtaacatatatacactaaatgtgattgctcccttgtatagagaatgtggtgttaggtgatgattaagggagtaagggaacaagtgagagtgagtgagggagtggggagagggaatgttgtggggagagaggggagctcctcactcatctcaagagtgttattcgt

SEQ ID NO: 309840 - DNA, 665 bp, Cannabis indica
tcaatagcatggttttgtgacatattacgggatccagtagtgaactgcattgtaggatatattgaggtttcaaattacttttgatgaatcagtagttgtcctagaagcaggaaaagacacttcatcaaaaataaaatttctagcaataaaaattcttccatcagcattttcacacaagtatcctttatgttttggagagtatcccataaataaacactcttcagacctgtactcaagtttgtgatggttatagggtctcaaatgtggatagcaagtaaaattaaatggtttaaaaacattataatcaggctgttcattaaaaagacactcataaggactaagtgtaacatcccggaaaaatatattgatattttaattggacatattttattaaatatgtgattatgtgggaattagagtaggattataatcctacttaaactaattatgggttgattagggagataagaataaataaagcataatttattaattacggagattgtgttggaatatgtgggtatcgtagataccataatttaaataaaatatttttttttgggtctggcaattgtgaaatttgacgaggaggtcagaaatgtcacgacaataagagatgaattaaattggaaatataccagactagtttaaaattttaagttgtc

SEQ ID NO: 309841 - DNA, 940 bp, Cannabis indica
atataccataatcttttaagaatttgaatctaattctaacaaaaaatgaaaaaaaaaaattattgattttttttatgtgacaaaagacaatataaataataaatagtttaaaaaggttaagttttgaaatgaggacatttactaatatagtcttataatttagggccatttgctataatttttttgaaatgaggacatatactaacatagtcctataatttggggtcatttgctataatttcccttggattaaactgagaaagattggattatatcgaaatgtaattgttttacaatggattggactattttttcttaaaagataataaaaacaaataaaatttaaaatattatttaataataaataattatagcataaatctaattaaaataataagtttttgtaaaaaaatattaaattatatatgttgactttgtttttagtcaacgacgcggagtcaataaaaccacaatagtgatatttgataattagtaataattgaaagcaataaatgatgagatttatagagatttggctccaaatattggtaatgacctacttcccttatattgtatctattcaatataaaatgtgcctatataacagaattcttggttttatgagaaagtcatggatgactttttatttatatcaaaataaaatgatttattaataaaaataaaatggtttatgagaaattcatagtttaaaatatttaatttgatatcttaattattaataaacaataccataaatatacatctacgatcatataagaattttattctaaaactatacgatcatagattaaataataatttcttataatctgaaatgaagacacgaaaaacagaaactaattgaataggactttctattcaattggggtgtcgaccatgcatggtaagtaaaaagctatatattaaattttatgtcatg

SEQ ID NO: 309842 - DNA, 1018 bp, Cannabis indica
ataaaatagattacattgaaatggagttttatttagggcataaaacctaacacatctaccatttgcccatagtatgggcatgtggccttggattggactgctgactgttacgagcctatgccgtatgatcagctacatacccttctaacccgctcatggggatactagattcagttatttgttgttggctggtaacctggtaggctcttctaatcagcacgacggcttgcctagaattgttgtcaatggttgcttcctaagctctcatgacttctttttcccgatccctccattctatgaattgacatctttgcttatcaaaggcaaggttaatggttgcacagagatcttcttgatcatggtacaaggtgttattatggccttgcataagtccaagcacattctgtagatttttaagttcagtgtcatctttaacaggcctttgagtgctattggtggatgggatctcggtgccaggactttttttgtcgggtgtcgtattggtgtgcccaatttgatgtcggccttgtgtgaaccaagctagaggggaagtcactctgtggcctactgttggtggttgtgtattggtttgttcggggttcctccctagtggtcatctcacgtttccaggactttgcatgttcagatctgtcagcatcggattgccttgatcagccaggtctccccttcaagtttttacaaccatcttgttaacatgtcaagactttaagacaaaagattgtgtttttgctctcaataaaagtatcaaaatattgacctcgcttctatccaacgatagtgagtcaagataaagtgactagataaaataaataaccaaaagcagaaataataaggtaaaaaatcaccatattttctagaggtttcgccccgtgagaatggtaatagcctactccccatttggctgtattgacctgagaaaaagaatgaaaagctcttataattgatctccgagtaatgctttcttagatcgcttttctctcttgagtgttcttctgaa

SEQ ID NO: 309843 - DNA, 1927 bp, Cannabis indica
taatttcaatttctttgtttttttgtttttttttttttaaatttcaattttagatggaaataagataatttatgacaataaatttattagtttttttgaattaagtgttccaaactcacttatcacctgaacaagaagaaattcactcaaagatttgtaaatagcaatttattttttttttttttttaattttaatttacattgataataataaatttgttgggtttcttaacatatatggtaaaaataaagattttaaggatggtggaccgattttctaattacacatctgatcttttaatagaaaataaagtttctatgattatattgttgactttattggtcatgcattggctcttcaaagggatgtccattacctaaatgaatgtgaatttcctttcactgatgatgttatctcatatcttttatatatttcagatcctttgtttttattctctttaaaaaaaattattctctcttttgaagattatgttttttttggattcttagactatactgtttgtgtaagtgttcttttttatttatttttttcttcaggaccatgatattgaactcgaattattaacacttgcctttagtgaccctgtttttcaaatgttctttcttgattctctatagtcaatctgacttggttattttttttttcaggaattctacattaatctaattgtttcacataaggtggcttgagattttgcctgcatttattgtttgaaccttgtgaaataatacaaaaataaagtgtgagtaagagtcccatatgggatagaaacacttcatttgaagtgtataattagtgcaagtttgagatatgggtttaggtcccaaggggtacccagttttgtgcgcatgggtgaggactcacacaccggacccccacacacgcgcggcgccgaccgtgctgagcgggtgtggtgtcaccttattttttgggaaaaaaattatttatttaattattatttttgcatcgttcccacgatctgttccaacgttcccttccagtaacgtctttcttcccgttactactttcagcgcattgcctatataatgtgactgaacagcggaagaaaaatatctttttcattctgaaaaattatacgatacatttacatactactataatacatatttatatttttgagcagtagtcggttttgagtgtattatttcgatggtactctatcgtacaatagagtttcgatacagtgtcgactgggctgttttatcctgaggacgactggcaaattccgactgcttgcacactcctgggcagtgccgcaaacgtcttaaagaaaacgacttagttcgcgactcaacccagaattcttcattcggtaatatcgttcctcttttattttgctagcagtttactcaacatttaccgatgcaacttagtcaacttagaacattcaagaaaagcatgtgttaccgtttctggtgctgcatggcagaggggacaaaaggtaatggtatgatgtgtctatggtatagatttgaagcaacagggatggcattaaggagaatacgccaaacacaatgctcaatcttagaaggaatagatgaggaccagagcttagatcagaaacgtttgtttcccaaagaagaagaagaagaagtagggatatctctagaactaacagcaagatgataagcagatttgacactgaatatcgctgagctctctttcccccaaataaggacgtcaggacaattacgaccagcaatgggaacatccaaaatattgtcaataatgaaatcatgaaagtaattgttggaataatatgtctccttccactcagatctctaacctttgtatcctttctgtcacagagtattatcaagatctgagtccgaatgtccttctctttgaattggatccttcacgatcttccaaactatgattgag

SEQ ID NO: 309844 - DNA, 2071 bp, Cannabis indica
ggatcatgcaggaggtccatgaacttgaagggttctgtggagatcacatcggaggtccaagtctctaaaaaaaaatactaagacaaggatattttttgccaataatgaagaaagattgtgtagactacgtcctaaaatgtgattcgtgccaaatatttgcgaacatacctagagccccacccatcgaaattactctaatgactagcccctggccctttgcggtgtgggaaatagatctcattgcgtccatacccattggaaagggaggggtaaagtatgccataatatccgtagactatttcacaaaatggacggaggcctagcctatgaagaccataactgctaagaaagcattagactttgttatcaaaaacatcgtgtgtcgatacggcctgcctcacaaaatagccttagacaatggaaagcagtttgactgcgaagaattcacaaacttctgcaaccaacacggagtcgttaaaagcttctctgcggttgcaaggccacaaacaaatggacaggcagaagccgtcaacaaaatactaaaagtcaccctaaaaaagaagctgctggcctacaagaacaactggcctgaagaattgccaagagtattatgggcctaccggaccaccccaagaactacaaccggacactcaccattctcaatggtatacgagtgtgaagctatggtcccagtggaaaccttgttcccatcccatagaagggcgacatatgatccggcaacgaacaaagccttattacaagaagcgttggatcaaatcgacgagctccaggatgagtctctagtacgaatggcagcttaccaaagaaaggtggctaaatacttcaacgccaatgtcaaagatagaaaattcaccattggcgaactagtcttaaaaagagtcttcccaaccactcaagaactcgaagtgggggtacttaggccaaattgggacggaccacacgaaattgaggataaaatcggctctgggacctataagctaaaaagaatggacggaaccacagtgcctagggcctggaatgctaaccacctccgaaagtactatcaatagttaagaacaatgtatgtattctgtaaaagaatctgtggcggacaagtgtatgcaacctcttatataattttttaagactaagtgacctaaaaatttcttttcatgtcacttaagggggtattaaggcatatcatacgggcaaatataaataggataagcataagaaaactgaaaaaataaatatattcaaagacataggttgttcaaaaaagtaaaagaatcctaaaaagaaaaggcctagggacgggccataaaaagtctctccttaaaagaaagcagaaattgtcttataaatgaggggaaggacaagataaaaaaaagaagtaacaatgagaaatatacaagcaaatcacttagtcagcccgaggcggaagacgagggcccctgcgctcttccaacactgcatccagcctcttctatttatcccggaagcagaacagaacctcttcaggttgggaataaaaaggaagacgaaggttgtagtcgttagttgtccaacacatgaaaaccccatcgccaaagcgcttctgacactgttgacaggtgactgggatggccttgggatgtatatgtctccctgccgtttccatggctttttgcatgacaaccatcacctcttgcatccttttcttctgttccttttgagctgcaagttcggcttcatgatcagccgccttttgcctcaagaccattagttctgtatagctgccttcgtcataggtgtcgtaccctttgaagttttcctcgcattcttcatcgtttgcccaatcttgcttctcaaagcccacatttactcgtgaggccacttcttcgccttgtgggttttgagcatcttgaggaggacggggctgacgtgtattgttacgagtttctaccattgttactctgactcttttgttttgactgttgtctttttgacgatgcttccttcagctctcaatgaaagcaccaaaatgttgaccgagattttcggcaactaattaaataataaaatgagaaga

SEQ ID NO: 309845 - DNA, 2829 bp, Cannabis indica
taataaaataataaaaaatttaattaaataagatatttattaattaaaatattaaataataatatttaaatgaatatttataaccgattttattatagatttttattttaaatttaaatatttagtttaaactaaatatataataaccaattaaaagaaaaatctcaactacttaaaatatttccaacaacttggaaagaatttctcaaccgttggaaatgtctaaaccatatttaatatctataactattttttaaattcaaatttaaataaatatttattttttaaattaattaattaatctaaaaataaatccaatgggacccaccaataattataggcaataggcccttatcactattattacacaatgaatggccccatcttgtaataattattacaatatgaagtttgttctgagaacatctttgtcttcctattttatttaaacaataaatttaaaataaataattactattttgctaattcaaaataaattttttcagcatcattatcttgtgttttccatacccttaacggtattgtaagggggcgatctggggaccatggacttataatactaagctccaataaattagattatttattgaatctcatcaaccaaataatcttatttattaatttcacgattactctactaaaatatgtaattgaactcttagtcattacagaattatatttactgagtttagctaaaatccattaatataatcaatactaatgattagtcatccatgtatcagttcataattagttttagtcaaattaccgttttacccttctagttatttctttatcctttagtaccattaattcactagtgaaattgtaatttagagtcaatctaaatttgtgcacaactttttaattctagaattgacacttaaagggagccaatattcaatttgttaggaaagtcatgattcgatattataaatcaagttctcaatcatccacattattagcttccaaaaatagaagttgtaagagtcatcttttctgagaaattttaacgagtgaatcaaagaaactaataatatgaataggaatacatgattacttagaatttatgtcaatctactaattgatcatctttgtgatatgaattaggtccttataaaaaatggctagtttgataaagacaacttaattacatatcgatcattatcatatataatctctattatatacaacaccttcatcgagatgtcatgctacatcaataatccaaattgagattgcttgcactaaataacaggcatcaacaaactgtactagcaatcgttaattaaagattctataactttaatatgttactgactattttattcatgaccaatgatattaattctttgtacaatttaagtcatggcatcataaatgaataataatttttttgatatatataaaaattattaaatataaaatattaataatttaatattcaaacatatatcaaattgttcaactattatttatataattaaataatgtctttataagttttttaaggcataaactctaacaaacagtacaaaagatcccgagtcttttccattcgatgatagagaggtaactaatttttatgtattgtaatatatgtttgtagttgattatagtgttactgatttagtttggttattttgtactattattacattttgtgggtaggacgaaactagttcatgtctcatgattttttttagctttgttgtgttattttatttagtttagttaaaatcaatttcctttttgtctattttaatgtttttgtattattttaacttttttttgaaattgtttttatattgttttgtgcaagtctatttctaggatttatatgatgatgttggtgggttacagttgtctgttcatactactcaagttggggtatagacttataacattagtatttcattttttgttattatgttttgttctaactagtttcttatttttttagcaagatggagaaggtttgctgtttgatcaagtctttgttgattctgatattttaaaggggctggttgatggtgctgtcaagagtgctttgaagacaaatatgctttgttttctgagaagagtgataacatgagtttggtgttgtatgatgaaaattatttgccttcagagatgcgaaggaggcaaccaaaaccaagctcgaatattctgtcgccatatgttattgattttggttcgtttgaatctccaaaagaggacctcatgaggatggtttaagataataaatttgtcgtgaatgggattaatccatttgaaaatgagattaattataataatactcttgagcagggtgctagattttcaaattttactaagcagaacatgatcatgaaaaagagataagtatctgcttttaactattacttaatgtatttttatctttccattgtgtgtagttttatttttgagttttttttttcgtaaaaaaatgtctatggattaaaacaaagaggagatctagaggtcattataaacaatatcagttggtattgagacaacctcaattgagccaaactaatgacaagctagcggcaacttagcaatcttatgggcataaacattacaattatgaggaattcaaataaaattacaatccaacaactgattagcaatgattcgacaattttgagtataattaattatagcccatcaactttgtttcccattaagagatttaacaacatttaaagagtcacattccacaatcacacgctcatgtttgtaagcaataattttaacgccctaaataattagacacgctacccaaaaatacttatgaaaccctaa

SEQ ID NO: 309846 - DNA, 489 bp, Cannabis indica
gttgccaatgagagcttttagttcatgattcatggcatgcacccatttttcaaatcgaattgcttcttgatatgtttgaggctctctcatggtggcaactgcaaaaataaaggctttataaggatcagagatgttggaatatgaaataaaattagagagattgtgtggtgtggatgatttatcctgaattgaagaatagcactcgaaatctctgagataagatggaagtttagtggtgcgggttgatcttcttgtaggatttgaatttgaggcagtatcatttgtttgtgtactggaagcaggtctgttatctggtgtatcttgttcggttgctgtgttgtttgttgtatcaggtgcattagttgcatctgagtcaggtgtttcctgatctgaatgaacatgatctgaatgaatatgttgcatcacaagttcgagcgcgaggtgagaactttgttctgtgggcagagagtgttgaagcaaaagcaagac

SEQ ID NO: 309847 - DNA, 2297 bp, Cannabis indica
tttattttgatggaacaataattatcattattattagaaaaatgattggaattcgcttaaattatacaaactttttatatgcaatgatgtgtaattaatctcgattatacaactaaaagtgttatgattttgcttaaaaatataaatgactacacattgtgataagtgtgtacaatttgagtatgtatttaaacattactcaaattatatatatattgaaatgaaatatgttatagatttcaaacgtgcaaaggctagcacactcattttccacgtcttattatttataatcttatcctaccgaaaagaaaagtaaacagtttccaaatctaaagaagaatgaaaaaaggaaagatattatactacaataattataaaaaataacaaatatatgagagtatttttttatttattaatattcttttaataaatatgatttgtccccaaaattatgtttcttatataatttcgcctcttaaattttattctattgcaaaaatttacttggattataaaaattaatgtaaataacctcctacaactatattcgactcatctttttaaataatttgttgatataacactaacgagacgttaacatggtataataaaaagtttagacaaaaaatacatacataaataatagacttataataaattataagaagttcataggctgagaagccttgcatatctctcaaaagtgcgatttcatggctcataatgtggtgaaatgggctatcaaaaaaaagtgtagtagtgtcttaagaaggaacgaagtgctccatgaggtgctaaatacctatacggaatggatgagtacttgagttattttaaaggtgtctaagaggtcccctcgttttgttatctctagcatttgggctattatttttctctagttttttgcttgggatgtttcttggcttttgtcatttcctttccttgttgtattagatgttggctttttcttggtttttaatctactagtgctaaggtaccccctcttcataagaaaatatgtataggcattcttagagctattgtatatttaaagccaataagttggattttaagtagtttaaaattgttaaatagaccatcatactacaactatacttgtaactcatgtaaattattttaaaaaagtaagcagcatataattgaaggtggatatttacagcgatttgtatagtttgaaaagaattttcgccacaacaaaaaaaaaatcacaagataaaactttataagggtcatagttcaaggaaaaagtgttatttattcttttgagtgtcttttgtttaggttattttaattactcttgtctctgtgacatggttttattaggaattataccttgaaaagcttaaaaaagacattttgattataaatataagttgaacaatttgatattattgctatgcccatattttaagccataaatatggacatgatacgttgaaaaatttattattgttcttgcccattggcgtagtcctcggtcgtatccaccacactgcatttggtttcttccataatctgatctaacaccgaagacttatcacctcaatcagacctccatacttaatagggtgtctttagaaggtacttgtcgcctttgatcacaggaatcgagtaacagaatttgtgggcaaaggtttatgggatgtagcgaagatggagagaatcgagaccaggtcattctatttgagcttcgttatgttcccaacgaaggtaaaactctagttagtaaggtttctcaacccgctcacggtgattccgccactcgaagactccggtcccataatctaacagataccatatttggacttaatgagaaaattaaattatgcaataataataataaaatattttttgcagtgcagttgagattgatcagaccatcgtatagtaaaaaaaataagttttttaagataaaaaacacaaactttttcaaaaaaaaaaaacaaaacattaaataagtgggactcacagtaaaaattaatattaatttcgtacactacaccacattgtagtggtcatgtacccctttttatatctacaaaaatatagtggggcccattttataataaatcctcaggtattttcaaaattccctaccttaaaaaaaatcttatatatatattgcacttttaattttttatatataaaaaaaatatatatagcatcaatgccatggtgtggcattaatgtaaatttcaaaaatataattcttttatctctaatggtatactatagcattcatttattcttctatttaagctttccacctcattaag

SEQ ID NO: 309848 - DNA, 2468 bp, Cannabis indica
aaccaattagttctaaatccaccaaaggcaccagctttcacaatctttctgattaaacttttgtcttaagtgataaagtttacgccaataccagcttgaatcatgctttagattataagaccaaaagcaagtagacttcaggtaaatgttatcaacccactttacccatagcagatctttttggtagtgatagcccaaacatttttcgcaagaattgcttggttccacctgttaccgtctttgaacccaagccccccataaatcttcagaaggcaaactttatcccaggaagttaagtggatcttgttcctgttgccgtttaatccccagagaaaacctctacacaacttttctacctccttggtgatactatgaggaagaacgaaaatactcatccaataattccgaagcccaagtaacacagaatgaatcaattgagcttttccagcaaaagacaggtgtctactcaaccaagtgtggagtctttgttttatctttttgattatgatcccacaatccccagccttccattttgttggtctaagaggaacacccaggtactttaaggggaaagtgccttcaactagctgtaaatctctaagaatatcttggatatcaacattactcatgcctccaaaatagacttgagatttgctagcattgatgtgtaatccagacaccttactaaattcatcgagaacctgtttcaaaaccagaatagagggagtagaacccttactaaacagaatcaagtcatcatcaaaacagagatttataattttcaaccccttacacatcggatgaaacctgtaagcagagttattagcagccctttgaagacttctcgtgagatactccattattaaaacaaacaataaaggcgaaatagggtccccttgccttaacccttccatggcgaagaagaggcgtgctgtgcgaaaacctagctctcgtatccctgctattgattcgaaggaggatgatcagcaggaggatcaaagagaggaagtggctgattcgtttcaggtttgttctgaggaagaaggcccagtgggtgtaggagatgtaggtcagaattgtcattattattattattattattattattattattattattattattattattattattattattattattaggtcataatacttctcttaataatcacaaaaatgtgaaagaactcattatctatattataataattcacccataagtgtcgatcaaagctctttagtggtaccctgatgatttttactttaggttccaagcttgaaaagtcgagtgcaggatatgtcaacggaactaggactatgaaacttatttgtactatggccaagtattataagataatagataaaattagaaaataatacaacactctttctaaattatagctttatttttctttaattttcttattagcattagttttatatgatatcaattttatagatcagtacctacccataactgaaaatgtgtggtatggtatttttattataaaaaatattcatcttccacgacaaataataataagagattgattcgaaaaaaaaaaaaaaaaacccaatcttgaacgattaatttattgtctactcatcaccatgagtttcgactccaatcactctatttataatttttattttttatggagaaaactataatttttggtccatcgaaattaggacttatttttttttttattcacaaaatctataaaaaattattgaagagagagtcactattctagaaaacattacctcttttaaaagatcaaaagaagagactagagaatacctaacaaaaaaattctcatgcattatgttgcttacaacaagtcatgacagataatctttttacacgatgaaagaagcatgagatcatgttgtaggaggagtttcgaagagcaattaaggtacacacagttagactacaaaaatttagaagagatttagaaaatattaaaatgaaagataatgagaccacaaaaaattaatattctaaaattaaagaaatattaatcaaatcagagtctatgaaaaaataatttttgacaagaacatagtataaaaaataccaatttcttgttcataaaaatgtgatttaatagtttctgtgatagaggaaacaaaagatttagaaactctatcactgactaaatgaacgagttctcttgaagcatacaacaatagatgagaaataaaaaggaaattgaaaatgcctttcaatctaaaataaaaccacactcaaaaaatcaaaaggtaatgggaaaaagacaggaaaaacaaaaagaaaataaccataagtattctccatgtgtcatttgtaaaagaaaaaattacttggagaaagattattgatttgaagaaaaattacagtgccaaaattgtaaaaaaaaaatttgacacactgaaagaaggagtaagttgaaaaatactacttttattaatcaatt

SEQ ID NO: 309849 - DNA, 790 bp, Cannabis indica
ttatgtaaaattttatatttatgcccttattttgacatatattttttgtataacattaacatgtatacaaatatacaattattcttaattgtatactaataacgatttgtatgagttttctttatttttttattctgaataaattatgaattggttgaattggtacaaatgatgtgtatatatttgtttttacccataagacaattatataaatatataactttttccactatttgtattttttaaaaattaaagtgtctctctctatataaaaatttatataacttcttccacagtccactatttatattttttaaaaaattaaagtatctctctataaaaaaaagtatctctatataaaataaataaggtctaattgttcaaaataaataaataaataaggtttgaacaagcaagttggggttgaaaacattttgatatggtcagcctctatttaaaaatagaaataaaaaactatcataaattttattaaggaatacctaatatcgataaaagttagagaagacgatatgcgaagcacacaattttagtacatgaattatatcaatatttaagtaaaattaaagaaaattggacagaaatttttgaattcaataatttcattggattacataataatcactcaaattagagaaaattaggataatcctattagggctcgtttggaacgccgtattagatcgtattgtattgtattgtattatattgaattgtattttatgtaatatttttatgtaagactatatgtggtattaacttttatggacac

SEQ ID NO: 309850 - DNA, 1065 bp, Cannabis indica
aaggatgctgaaataaataaatgcaatttgtcgttttttttttctttggaaggggacaatagattttaatggtgcaggatatgtttcatggcatgatttgtgtaggcctcgaaaggaaagtggtttggcgtttaagaggcttttgcaatggaatcaagcggctcttggaatatatttttgggtgataggtactaaacaagacacactatggatgaaatagatccatgatatttatatcaagggtgaaaactggtgggattacaggaatactgcgcatagtagttggtattggaggcaaatagtgcaagccaaagagaagttcaagcaagtaattagtctccgacaagccgcgatatgcaaatatacaatcaagcaaggatatgagaaactgaacaagaagttatgtcctggtatggggagatttgggactgatttatcactccagaacataaatttattatatggttggctgtgttaaataagcttcagaaaaatgatagattattcaagttcaatattagtgatgatgataattgtttgatttgtgcacaaaaagtggaaacaacaagccacttatttttttaatgttattatagcaggcaatgttttgaggctatctcagattggttgggttggaagcggattgactctcgattaatgagggtgttaaaagccattaaaaagaggaggtgcatgagatttagaagataagcttttgctacaacagtagctacggtagtgtattatgtttggaagggttagaatgtggtattttggaatagttctttgccaacattgagtgttttgatttctagagtgatgcaggatgtgaagtttagactcttaggagtcttaccaaagaaattatctaaagttgatttggaatggtttgaaagcttgtaaggtgaattgtgtataatataataaatatactatacacaaatcaccttataattaggggtgaaaatcagtcggttatggtcggtttttaaaattttataaccgaccggtcggttacgatttttattttacgaaaaccgtaaccgacagtttagaaattataac

SEQ ID NO: 309851 - DNA, 1145 bp, Cannabis indica
gcttaaggatgcaaatattaaataatagacaaataattttacgtggttcagacgttaattattcttagttcatgagtccattttattagtcttaaaatattgcaggttacaagtgtttacatcatgtatctattctctttattcctctcgtttcgcttgaaaaagataaagtttataggaattttgaagaggttccttgggttcagaaagtcctccccttgtccatgaaatatatgggtatttaaaggaggtttcttgctcaacctgctcctgaggtcgaccttactatgagagattcgactgttgatttggtaggtggctgctccatcgtatggtgcgcagagatgaccacccgtaccgtttggatatttcatacgtgtcacccataggccttttctttttgaatttccctcgtgaatggccgctggacaatgggcaggtgcggtggtgcacatgcctcgtactacgacctgacatagcggacaaaactgacgttgtactaaaaaaagcattgtcgttacttctgtaatctgacaggtgcggacggagatcttccatgacatcatatggggataaaacccatcctaagtctaactggaacccacataggtgtacttaaggaagtcattggcttttgtagggtgcttcccttttcgaaagacagacctttccttccgctcccgggaataagataggttatgcacactgacactctgtgtgtccctgccttgtgatagaagtatccttcgcgggagccgagaccgaaggcactagttagctaaagattaacctagcccattccgttaggtcccacgtgtcgcgcttacaaaaatctaaaaaatatttatcccaagcttttgggacaatctgtagtccggtagcttgtatttccttgctttatcatgattgatttctaacacgtggggcttcttgagatctcattatgccatgcaaacagttgtcaactaataagtcattgatgggggatatcattaatatcttaaaccggtagcactctaaatgcggattcttacaatgcgcgtgttggaaattattttatcaggatctagatttactaccaagtatgtttaattaacatcctgatatgaattctaaaacaatgaaaataaacacataagagttta

SEQ ID NO: 309852 - DNA, 1334 bp, Cannabis indica
tgatgtttgatggcaaatgggtatcttattgtgatattatagttggtattcttgaggaaaatactctcaatcttctctcactgctaaacatatatcatatataaatcatttgcatttgatatttgtgtttgtcttgtgaatgtgtaattgacttatattgaaatggaatcagggtccaaacatcagagagataatgagaacatagatcactatctaatagtttggactttgggtagtgattgtattaattatttttgatgtaattgctttttgtttgaatttttttatgttttgtcttattttgaattttattagcttgtatgcttgaaatctaaatttttattggtaaaaacaagggttttaacccgacccaacccaaaccaacccatgatatgttgggttgggttatgcaaaaaatttaatgtgaatgggttataatttaataggcagatctcattgggttggcccactaaaatagcttcaactcggccaacccaacccatgcacacccctaggtaagctcttatctgattgcctccaatctagccattttgcaatctctaagaaacactgcattttccagcagcagccaaagaagaggtgatcctttgtctcctcttgattgctgcagaatatacaatatgaattatctacaatgccaaatctgtacaatttgaacaatctattttttagcctaggttccagatcgatttcatagttgttttctcaatgttaccttttggaatggttttacgcttgattttcctttcaggtccccgaggcattagagttcaaattgtatcaattgttgaaaagacggggcattctggagaaaaatctactgaagctgtcaaaaacgcttcaatagtcgcgtacgaggctaggcagagagcttgtttaggctttatgtagtcgcgactatgggcaaaacacgagaagattggccagttttgaattttcgccattcagaggtagcatccctaatttctatttaagggacttgcgttttagaacgaaaatcatcaaagattagccttgaaaagtgaaaggaggagaggaagctattgtgacgatccagagagcaatcaccaactagttctttcttaaactcttgatttgcatgttaatttctgttttagatttgattatggatgttattatggattttataaactaaactcctattggggagatgatgaatgttgattgacgttatccttagttaatgttaattgctattcattctttcttgtttgtgaaattattcatatttgtgtgcatttacatgtttaagattgataaccttccacatgttctatgatctcaattcaaaa

SEQ ID NO: 309853 - DNA, 1258 bp, Cannabis indica
ctcttcattatctaatcttttcagcaataaagtaatgcgatcttcagattctggcttcagctcatccacaaatgtccctttatataattaaaatgaagacaattttttaggtaccaacatatttgttttgccaaaataatattgttaactaaagaataagtaagcggcacttacaatgggagatgagattgtgccaatgaccaaggttgctaccacttttaaaggcaaatggcttacttgccaaaatatggagaggagaaagtccatgctcatcgacggagttgactagtttcgggtacaactgaattatctgaaatgccaaatctgtccaaacacaaacaactgtctgtctataaaatatgtcatatatgtgagattctataattatagtgaatgtagaagttttactgaccgaagtactctcctgctattgcacaatgaagaacggtctgaccgtcacgcctacggcaaaaggagccgtcgtgagcggtggccgtacttaggtaatgcagacagagaaaagcttctttttttcctcttagagcggccaaaaacagaggagtctcgctgttatggttacgaacaccaaccaacaagggatcaactttggccatacaatgacacattctgacgtaccccattgaggctgccagatggagaggagtgttccctctgtcgttttgaatagcgagcactgttttcgaattggaaacgacacgtcgtaccagcagttccactacttcttcttggcagtcagagacggctatgtgaagtgccgtgtcacctgacttggtgatcttagccttatgcgctctgtagttttgctcgtaaacccttattacttcattccattcgcctttcatggccacattgaacaactctttgttgattttctccatttcacaatttttcatattggtttccaccttataagttattgtgctcctctattctatatataaataaatatatatatttatagtatatatgtatattcaatcataagatttgttatggaaaagaataggaaaagtgaaaggttgatgcttatttgcagtaatggtttttttttattcttttgataaagcagtaaaatgttatttaattaatgtgcatcttcaaaataaggaacgtcttgtaatgctatctatattgagaaatgcttaaggcatattggatttttgttaggtgtaatattattattaatgcaatttaatattgggtttcacttattttattttaataaatattatagaaa

SEQ ID NO: 309854 - DNA, 1864 bp, Cannabis indica
tagtgttatataaaaatatgatatataatctaatttcatacaatacaatacaatgcgacctaatacgacattctaaactagcccttaatatccacaatgataattcatcaaaatataatatccaaaataattaatcttatcttattaatttgttaatagtttttttagaagaaatttgttactaacttattctccccatctttaacaagattatatcatacatagatgtggatacaatatagatccagactcttcttcttctccctctcgacatgcatagtctgaacagacctcctccttcgttcccaatgagttcacatttatctcctacgcgttcccactcagtggaacctttaccaagccccagatctctcgatctaggtggctccgattcttcctccatccacactcagaacatctcgactcgcccaagccgtctcagctgcatcgaaatgatccgtcccaaccactccagtcgtttcaaccataactccggccagtctcccagacgctcgaaccgtacaagcattaatcatcctcttacaggtattaactcctttgatcatcttttcctattcactgtcaaatctcatcagagaaatgggtatttcttagggtattttagatacaaatttggtttgcccattaaattatctttgtataccagataccagaaagggattttgggtaaagaaaatgattttatattaatttccagaaatgttttaattccttttgcccaaatttttcaacttttagcattaatattagtctgcaattgtgatctacctggtacaattcaaaatcctcttgtgcagcaaccctgttcgaaagtaaatgcttcagaagtgatagttaccaaatcagttcataaccttttcataatgtttttcctatataagggcagaccctccctttggtctcgcacctacatccttataattcctaagctttattctctgcaaaaaagtcctaatattagctatttctacttagatatatattttattcactgtagtagcccaacgtttcccccaaagtctctctctcactgcacacacccgagtctagttctgcatttagttttaagtgtctctctctacgacctctcaagctttctgttctggtgttgcactgtcgttaagcttatctatttgttgcaatcttcaggtcattacagttccacatttagttggtcattagctcaaactccccctgtttttagtttaacgtgtactatcggtcagatacattatttatcctctctatcttggactcatcttcctcttctcagggacatatttcagactctttatagtatcctttttatcccgctcccactgtcctaccacatttatattgtcgttttcgaattaagtcactatctgttcacttgcatcatggatgagctaaccaattcattatctgttgctctcaacctcacagagaccgaatgcaccattcaaacccttcatgagcctattcccacaaacactcctgactctgagattcaacctatccctttattccttgtggtcaaggttcgcacggttaaatcatttaaccgcaagaatttcatagaaaaaatgaccaaagattggaataatatctcccgcaatcccgtgaccataactgatcgatccaatggtctcttccttgttgagtttggctgtgacggagatagacgtcgggttttgctgcagcaaccttggacttatctcaaccaagcaatccttatcgacatcccaaactctttggatgtcctcaatggggatagcttactaaaaattccccgatgggttcaagtgttcaatactcctttcctcaaacgctccgaagagttggcggggcttgtctcatcctc

SEQ ID NO: 309855 - DNA, 1126 bp, Cannabis indica
tgggaaaattattaaatatacagctccggcaagggtagttttgtattaataaaaaaacaactatatgatgtgtcgatgtttgattggtggtgttttataacagttggagcttgaagtaggcattcaaaaactaatcgtgttcccttaaaacttatccgtggacaccttggatatggatctgacgtggtactggcctggaagaggcggcttccttcagcataggctacatttttttttaaataattagggtgcattttgttaattgttaataattatgtttccagaaaatatgttgggaaacagtttttacttttcttaaaaaaaattattttttaaaataataatcgaagttttaaaattttcaaaaataaaataagttacgcttggctggccaaccttgttgaaaggctactcagtccatgaaacttgttcaccctggccgcccaggaccctaccggtagttgtacagttctgtctttgtaagtctccatattatctaccatgcaactatgggatttccaaggttggaaggctgcatgacactaacctggctgattagtgttgatctgtctccaatgtgtcttttgctttttgccatgtggaggtgtcacgtcaggtgggtaaaaattgcgataacatttgtccctcaagtctctattcgaacgtttatttgggtaggaactttacacatattgtaacgctctttgtcatgcaggtatgcccaaccgaatattggtctcttcgactgacatgattttatgacagttattaattttacgtcgatcaatgtgggaaatcgtgcgattgctgcacattttcctccaaaaactatataagtacctcattctttcttttttcattctttacttcttttttatattctttgagcgaaaaactcactcaaagactccatagagccaaagccttgcaagcccaagttcttcgtgaattttcgaggttttgacgctcacactcgtcatgcggacttgctcgaaccttgcatcttctcagtgtgtacgttcaaagcttcctctctcttcttcactctttagatttctgctattgatgagtttttaagcttttatgaacttcttgattctcatgtcttaggatagtttttatgcat

SEQ ID NO: 309856 - DNA, 754 bp, Cannabis indica
ttcatcgttttagaaaattcatatttagggtgttaatcaacatacttttgagtagatttaagatcctggtaaaataatttccaacacatttgtcatagtgtcatttcctttcttgctttcctcttgagtaaccagatgaaagacacaatttacttcaggtaggggatccatgagaagcatgctgctccttgtgagtaagaatctgaaagtcccataagaaaggacatgatatactccatatagtgatattcttggattttcttaacaccaccacaagttcatccattgcagatgaaggtgggccgatagtgagacaattgttaccatatagtttttagtttagtaaagtacatactaacaccttgattatcctgctataagttcatcaacccttttcttaggttgtatatatgtggatcattcttttcatgaaattgaacctttaaatcataccatatggcagcagcagattaatcataaagaatgctagaggatatttcttttgaaatagtgttcaagacccaagaaatgacaatattgttattgttgggaatattttaccaggatctagatttactaccaagtatgtttcattaaaatcctaatgtgaattactaaacaataaaataaacacatataaagtttaagaaaccttacattgggcgcagcggaatataatgactccttccgttcaaatctctagcccttgattcatttcagtagcagagcattatccagatctgaacctggatct

SEQ ID NO: 309857 - DNA, 2084 bp, Cannabis indica
aatcacgtaatacgcctatgttagttagggtgttacatgtggcctcttcattattcagccctgaagggcgtgactttgcaatagtataggcataatcctgtcatgaagcttgtatgctcctgatctggtgaatgaatcttccttttcttggctttggataaggccaggttgtatagggcttgttagcctatcatggcattgaaagctgacggaacgttgattacgacgaactacactattagagttctggtagttgaattttctccaatagtgggggctaatctgatatactcgatgggtgcgatgccttggccaaataggccatacatcacttgactgcaaggtgacaagtgaacgagttggagatcttttcatatgttgatttgaaaagaatgttgaaggaggcccttttgtccaccatgtatcttgctatattcatattctcgatttgtgtagtaatgaccagggtgttattctgtggaaaactgacttgggcaagatctccttttgagaatgggatcgtgggaatctccaagcttcggttacttagagtcccgttctttgcctcatgatgtaacttttgggctcgtgacagagtgtctaagcatagcgctccctagctttgctggtcttgcctgcagtatggggtccgccaatgatgacccctaagtgtcctgccaccagaggtttgggtagagttgctagcacctgcctgtatgcctgaccagagatggaggctagccttcggagatggaggccagcctttagagtgcctattgctggcttacctgcttggacgtcttggcatgctttgctttgggagttttgataggagatgaagtatgcacacttccccccacttctcccttgggcttcatggcctaagggaatcattaaatttctctcttttgccattatgttggtgagagtcatcgttgttgttcttgcctccaccattctcaatgttggaaaatcgacagagatcatctgcgatggtttgcatgttggacagtgcttggggtgctatgaggccctgtgtttgttcgtcgttgacttgccctcttatttgggcttgtcagacagcttcttccaactttatgaagacatacgattgcttaaggaactccttcatgttgttcgttgagatcctcttgatatctttcctgaagtcactcaattgtaggattccttcgagtatggccatatattggccttcttctgtctggcctttgaccttggtggcctcagccatgaactgttgaatgtagtccttcaaaggttcatctcgtttttgctttgtttcaacaagatccttcaatcaggcaggtatttatcttgaagcagagaactgaatatagaattctcgggagaattcttcccaagagttaagttttcttggggccagcttgaaataccattgttgggctatttcagctagagttgctagaaagattcgacatcgcacatctctggatacttgttggagatcggtttggatctcaaagtactttaggtattctaggggatcttctttctccgtgtacatcttccaagtcagcatcttgaatttgggcaagggtaaggcatttatatatgccgagaatggtgatccccttggcctatctaactgaagttctgaaggttttggactagctaggcccttaagcatgtctcgtatttgatcctactatgcttgcatataatgatctattgcggtaggggcctagttgattggccttttttggttgagttgtagtcttggattggccagagcctggctggccataccttgggagagggtatactcaaagttggccagccctgagtctggtacttgtatatggccggccaaccctaagctgggcagggcctggcttgtaacaccccgaaatttagccttattttacaaaatactaactttgatgcataaattgaaaagactcaaaactgtttagaaatacacagcgggttttactataaatatgccaaagacgaatgatcattcatattaaaataaaataagtagttgagtgcattttttttttaaaaaataaatttaccacatcccgctgagctcagaatac

SEQ ID NO: 309858 - DNA, 619 bp, Cannabis indica
taaaatatttccaacagatcaatcctatgaaatgtacatttcgtgtctcctctgggaagttcctaggtttcatcatcacctcttggggaattgtagaaaacttaaagaagattaaggccttcgttgacatgcctttcccaaaaatcacaaggatgtgcaaagtgttaccgaaagaattgtggccctcaatcaatttattttgatgtccatagacaaatgcatcccgttctttaatgtgtttcaaggaaacaagaagtttgaatggactgaggaatgtgaagaggccttccaaaaattaaaggagcatttgactaaagcccctttcttatcgaagctggtggaaggtgaaaatttgtacctttatttggcagtgtctaatcacgccataagtcccgccttagtgcgagaatgaggaagggtcctgctactgatgtactacatcagcaaaagattactgggtgtgaaattcaggtatcccttaattgaaaaattgaccttttgcttactagtcacctccagaaagctcatcctctctgcaaagtgcttcaaaagtcaaaggcatctggtaggttgttaaaatgggcaatggaacttagtgagtttgatatccaatatcaac

SEQ ID NO: 309859 - DNA, 652 bp, Cannabis indica
accaatcaaaggaatagaaaatacctataccattccaatggcaactcaaaaaaaaaaagttactattgaattttgataatgatattttaggtaactacaagtaggaagatacaaacatgacatgagctaaagcaactatacagaaaaaaccacctttgaggttaataagcatattgaggatgccatggcttgcatcacatcaactgctgagcaaatagcgtccttcacattttgtacatcggcctgcagcaagcgataatgaaagctttaactatgtcaaacttctgggcaaatgaactgatgataaaaacggggtgtagcagggtgacaatgagaaacaattcaaggaaaagtctgtcacatatacccttgcccctgcaacaactagaagacggagagtgctagccttcaaagcttcaaaggccccagacaatgaacaagtatagtcccaatctagaaccgaccactcttccaaatataccatctgcaataatcctttacaaagacaaacaattaagacttttatttcataatgtaaagatgcaatagtgttgggtgcaaaaagaaacacatgcaagctattaataccatccatgaaaattgcagattaaaaagtaatctctcaaaggtaaacaaagtataataatattaa

SEQ ID NO: 309860 - DNA, 2593 bp, Cannabis indica
ttaggtattttcaccgccaattttttgaggttgaggactaatcggcatcaacttcaagtttttggggacttttgccgcaattatcccaattaataataatatagtattagcagcggagaaatatttattaccggcggtgcaatccgccactaataataaaatattttaaaaaactattagcaatgaatgtatttattattaggcgcggatcccacggctaatagtattatacaaatcaaaaaatttagttattggcggtagataaaatttttgcacgagcgggaaacgaatacttcccgcatatttttttggattaatagctatatacatagttgttttcttcatccgttcatcttcttcatttctctctaaacccaaaaattttaaattgtataaaactgtgtaaaactcctaaatttctaacgtagaacccccgccgactcattctctctcctcaatagttctttgtcgcgtccatttctctcactgtaagtatatatatatttatattttctcttaacctctaagatctctcctctcatagatcttattattgcgtttaaatgtatctaactagaattttcgctattaatttttcttaaaaaatattatgtgcacttagatttgtctcaattctttgtttttttggtcttccaggatcaacaatttgaatcggtagtctttcctcggctctgggccttcgataatcatcttcgactctagcaatcgtccccaccggctctgctccagttgcatttgtattttgaagcatatatatactttattttattatatgtgtacattcttgtagtttactaatactctaataattttgtaagatatattataaatctgttgttatttttataccaggttcataatttagagaggagattatatacacgttgtttgaatatttatgtatataagaaagttgctcatgctctattttttcttattttctttcttgaatacggtatatgtatatacacatatattggttaccttttcttaacttttttaagaggtaaaatgcttgtggatgatgagatttggatgattgtccttttcctctatttggacgactcaaccttttgttaaagaaaaaaggttcacttatcattttgcttcactaatgaaaatagaaaatattatgaaatacttggtattagcaacttgttctttcataaagcatggaaaaaatatgaattgaaacaaatggagctcactgttatatttatattttgttcaccattctcagtttttccccaagataatatgaaatactttaagtatgaactgatattattttttaaaaaactattaatatttattagtacttataacattaaattatattaaaaaataaaatatcagcggtggactcattatttttatccgctggtaatacttataaaaaagtaaatttgacaaatttattagtggcggactccgctgctaataatattattagcggcagagacattttctgccgctgataatggttaatagcgaccctttattaccagcgggctccgccggtaataacttttaccagaggactgttccgcccctaataactatatttgttgtattcaaagattggaggagctaatatgcactcctcgcataatacaaacccgtgccttctttaaacaagcatagatggtcctgtgattgagcgaatcttagaggaatttttaaaatcaagttcttatctctttccacaaaaaacatcatttagtatatccattgacccgatcaaattataacaaggcatgttgcatagcagggtgatctgagattaccataggttaaataaggtcagggagccactactcaccccaaaatttttgtctcagaattgtctcccacacaccactgcactctagcacgaaccagagattgagcctcccaaacgctgtgccacacaaagttagattgttcccaagataagcagaaagataattccccccaaggaaataatgagctttaaaaatgcgagacgcaagagaatcaggcctagtaataaatttccaatcttgttttccaaagagagccaggttaaaatcatgaaagttatgaaaccacataccaccattacttttatgatgacacatgcgctccaaagacatccaagatattccttttgtatcaccatttgagcttttttcaccagaatttggccaataaactctctatatctctgctgatatcccaagggagtaagaagatactcatagcataactaggaagagattgagccacagacttaatcagaatttctttatcaactcttgataaaatctttgattcccaaccttgaagcttcttacgagcacgatcccttaagtaacttagaacaactaatttatttccccccatagtgctaggtagacctaagtacatacttctattatcagcttggaacatttgtagcaagtgattaatacttgttctacaattgacatcagtattcaagctataaaaaattgaagatttacccaaattaatttttcgaccaaatgcgctttcaaatttatgaagaagctcacaaattttgcgtgcctcttgaatagtggctttgtaatac

SEQ ID NO: 309861 - DNA, 861 bp, Cannabis indica
tacaatacaattataatatttttatacaataaaactataaaatatatatatatacacacaatacatatttaataaaatacaaaatacatatatatactatatattaaggtttaaaattttaccttataaccacaatccgacaatcaataccgacaaaaaattggccaccatgcacataaaatttacaaaaataaaaataaagcaatgtacattactaaaatgaattgaaattatatttatactttaatggaggttaagatttaacgttttctctactaaaatttgcggctagagttatagccaccacattatttcttggcttaagtttacattgaaaacatagaaaaaatcaaaacttttgggtgtataaaattaggtattaaaaataaaagattttaaaaaaatgggttcaaatagtacaaaaatggtagagatattggatgtgggaagtaggtggcgaaggtggcgtagggtttggtttgtctctgctgggtttcatgaggaagaagaagatgatgaagaataggagaagacgagtctaagggttaatatataaccatatggtgtcaatttatttaaaaataaccgatgacataggctccacgtgttcagccatgggctacacctacataaggggttttttatttctgattaaaaactgcctctaaaattttttaataaatgatatagctacgattttcataaaaaaaactgcctctaaatgttaattttaactaggcgggtttaatttcccatttaaaagttgtgaaaaaatagcctttaaaagattgttttgtagtagtggtgttttatgaaattcaagaaacacatggattgatgactgaccctacaaaccaacac

SEQ ID NO: 309862 - DNA, 700 bp, Cannabis indica
tttgtttttgttctgtagcttatgataatgtctctgttttgcagtcgagaaatgcaaaaggcaagagagcaacattagcgtaactgacacttttggtgaaataaggtatctcatattttactttgtcaaatgctatggaattttcgggccacttattggctatatttcagactctggggtggcatgtacaaaattcaaaaatatctgaaaggaagcgcaaaatagataacggcatacagatacagatacagatatatacaggactaacagtctaccacaaataagtatgctattatgctttttccaatctttgatgtacgtgtatatagctcgagcctaaacgtttaaaaggatattactgcagtttcatctaacttaaattttgtcaagtgatcaagaaaaacataccatccaaaagttaggaggctgcttcatggctataatgttgaaaacttgcacaagttgagaggttacatgtgtctaatgcctgaaagttctctaacacagcaataaaagctgaaggtttgattaattcaatcattcctttttacagttttagtgaaatttttttacaatggtagatatcatgttccactattacagttacagtacatgataatcttgtttggctataacctattttttagtttttagaattaaaaaaaaaatccatgtagaggtgtttggataaaaaatgaaa

SEQ ID NO: 309863 - DNA, 1394 bp, Cannabis indica
agttttttaattggtattagagcgggacactaaactcttaatgtggttctttaacctgtttcttgttttttgtgaaaaatgttgttctttgtagaagaaagttttatttctcgtccacctcttctcaatgactctaactatccttactgaaaggtgaggatgggagctttcatcaagtctcaagcgaaaaagcttggagatccatattatcaggttggtcccatcaagttgtgacagattcagaaggtaatgaaaaacttaaacctgaacttgaatggtctcatgaagatgataatttgtttgcttacaataataaggcattgcatgctatatttgatggagtaggttagagttttattaaacttatatcttcatgtgaatctgctaaagatgcttggtaaattccttaaacacgatttgaaggaacttttgatgttaagcgttctaggtttattattcttcagatcaaatttaatgatcttagaatgtctgaaactgaaactctgtctaaattttatgaaagattgtctaatatagctaatgaatattttgctcttagtgaaaagcttaataaatttgttcttatgagaaaaattgttagagttcttcgagacaggtttgacactaaactcttggctatggaagaagctaaggattttagcaagatgaaagtggaggagttaatgggttctttgcgcacttttaaattaaatcaacaaatcaaacagaaagatagacctaggtctaacactgatagaggaaagggtatcgctttaaatgttgctaaaaagaaagttctgaaaatgagtgcgatgatgaaattgaaaaggcaaaaaataaaaatattgcaaaggataatgatcatattttcactgcacacacttatgtctgataagtgaatacaagagtgtaagtctcctctactcgaataaaattaaaaattaccctaattcacattattttgtaacttgtcttttttctctcaacatttatgtgtgattggtatttgagatactaattatttatcatcttttgaaagcataacatgtgtatttgtctccttttatgaaattttattagttaattgctctagaataacttgtttttcttatcaatttatttttagttattcgaatttttatataaaaaaaaataaaaaaaaaggaaggaggcgcttgtgacttgacttgtgggttaatgaaatttagttcttgatttgtttgctaagtatcaatatttgctctaattgatttattatgttgagtttccttttaaagtttgatatcttattcattgtattttgattatttgttaatcttgaatgattttttcctatcttaattggcctatttttgtaaagtatcatgatttatttttgttttcttttttttttt

SEQ ID NO: 309864 - DNA, 3635 bp, Cannabis indica
ttatgccatttctgcacaatcccgaaaacctcgtcatcaataatgtcttttcaggcgaagtgtaacgtgattcatgaaatgtcactggcctctttgggtgtatcaacgactaagtaggtggagctagagaatcttgggtagctttcatctttcctttcccctacaacaaaaataactttaattaaaaaaatctaaaattttcaacattaagtttaattaaagttacataaattacctggactaaacgagctggaggtatttttattagtttctttggccaaaagacgaaatgttgcacagctaaacacgcttggtagaagccttcctgctttagaggacatggcatactggcattttcgttaataaccttttctacgaagacatgtttaaagtcacagtacttcttcttttctccatgtactgtgatttcacctttgtcattcgttttttcaaatttgacatacccaaatgcaactaagccgtccccttcaatgttgggatcaatcacatgcaaactgcacttttttgtgttcatttgtaaaccataaaatacacaaacttgtattacaatataaaattaagcaagttcactgaatagaattataattattttaaaaatgcaagtgaaaaataccttatctgaagtatctgaagatggtgctggtggagcagatgctctaacgattgttggtggtcgtggaggagaatagtccttggtagaaggtgctggaacagaggtagtatcaacacgaggtaactcaacacctagtgtagaggccctggtagcagaagctggttcgttggatgctcttccaacacctgaaccagatgtatgtgaggtgtcagcaacaccgctttgttggccttgtactacttggaggagttgttttaataattcgacagtctgcctacccctttccgtaactcatcctacattgtaaataatagttagtaagaatttgaacaacataaaattatttagttagaatttgaacaatataaatggtaaatgtaacttacaatccttttagcaacttcctgagcagggccattaagctcgcccttcttgttagtgtgtaatttgttccacaagtcacatctgtcgtatgtagtaagttggtggcccaactctctttccatatcttcttccactttcttaacaccacctcgcccccgtggtggttatattgatttttggccctaactccttgcatttttgctctcaatttttttttccattcaggagttaatcttgaagcaacaaatgctttccagtcttcaggtttgtagcaaccggaaaaattatcaagaggattgtcgatcatttcaggagctttgtctttgtatttataaatgtggttatttgtaagctttgtcttatgatctttccatttatctccagcagtttttaggactaagtgcttatcctctggtttcaacttaaacatagaccgtaataattatgaatgataattagaattacatcaaatattaaatttcatatcctatatagaatcagtttcataatattaccataatgtaagtctataagtcatctttattttctcctggcattaaatgccaatttttgtacgccaatggaaaatttcttcttgcatagaggccaatatcgctaacaatttgagtcccattcttaccatataattagctcaattggttgaactcgacttcctttttttttgttggtccaatcctttatatgtttcttgcctttatatgctccccttcctttttttctttggttgaggttttggttatggttctacttcaacttcaactagatcatgttcaggttgtggttctccgccaatggattgaccccaaagggaaaaaacgtcatcataatcatcgtcatccataatcaacgaacctacaaataaaaacaaaacaaatcaaatattgtagtaccacaaaattttttgactgatttaaaaaaatacaaattaatagacaaacaaactaatatttgtggattgataattcaatcaatccataatccttcgctgtcttcacgggatgatatgatttcatccacgatggtgtcaaccataggtggtggattgattttaaatgtttgattatcaagtgttagatcttcactagactctttgcaattataatcttttggttgtgttgttaggacaactgaccaacgagcatctagtggatcactcatataacacacttgaatggcttgagatgccattataaatcgatctgacttgtgtcctattcaattcaagtcaactaacttgaatccaaactcatcgtctttgactccattatcactcctcacccaatcacaaagaaaaattaggattcttaaactaatgtaatctaactctcaaatttctttgattacaccgtaaaaggtcatatcacattcaataggattttcatcttttgaacaagctatttggtatgtcctagcaacaatcattacacagctattttttgtttttctagcatcatcaagatcattggtgttgaattgagtactatatatgtagtatgattgatactttagtacactgaataaatgaaaacgtgatatcaaaagtagtgagtgagatacattatttaaggactccctcgtttcagaaatcacgtaacataaatgaagtttattaacaataaagtaaatttttaaagaaaatatagccactctgcaaaatagcataattatattaccttttcctttaaccatgtataaaaatttcgataatgttcatcttgcacccatttctagtttctcaacttactagcataagtggtcttgatccaatcaaaatgtttccttcaagatatatttttaaatcattacaatttcattttgaaattttttatttcaatcaaatattaaaatctaagctatacttactcaatgtacggttgaacctcgtcaatattttccaaaacgagtcgatgtgtttcatctcgatcatctcgacttacgtcgcaaacagaaacacccctaccccctttacttatttcattatcaactcgaggacagcacaacccaatgcttacaacatttgacaagtagtctgaacaaaattctactgccctttcaataatgtaagattcaataattgaaccctcgggcctacttctatttcttacataaccttttaggatttttatgtgctgttcaaatggataaattcatcttaaatatacaggtccacacaatcttacctctctcaccagatgaacagtcaagtgaataattatatcaaaaaaggacggggcaaaaattgttccaagtaggacggggcaaaaattgttccaagtaacacaagacttcaatgatttctaaatggagattttccaactttgacacatctaccactttgcaacaaagagatttgaagaataaacataacctagttatagcatatcgaactttcttaggtaaagcagaacgaatactcacgggcataatatgttgaatcaatatatgatgatcatgagacttcaacccgctttaaattaatatgtcggtatataccaaactcgagatatttgaggaatacccttcaggtactttcacctgagacaaagaactacacaaagagcgtttttcttccttaattagggcataacgcgccggt

SEQ ID NO: 309865 - DNA, 1215 bp, Cannabis indica
ttaatctaaaattaatactaaaaataacctaacaaaggcagagaagtggctgacagttattgaaaggatcttaaattttatgggcttcaccggtaatgatcggggtgacttgtgctacgtttcaattctaggaagacgctctggtgtaaatagaaatggtatcccttactcaggacgttactagaatgatttgggaagaatttcaggatttgttcaatgtcaagtactataatgaggcagtttgtagtacaaaaagaaaagagttcactgagttggttcaacaaaagactatgttagtgatagagtataccacaaaatttgaccgactcactgagttggcttcgggtatagtacccacgaatttcagtaaaaagagaaatatttggcgggtttgaatgctaagatcaaacacgatttggttatcactactaatgatactactacaaacactaaaatggttggaaaggctcttcgagccaagagtgtggttgagtttctattggagtcgcgagggactcatagtgttggtgggactgccactcttcctacttcaggatttggtagggatggtggtgattctaatatttatcagaagaggaagacttttctgatgccatgtggctcaaatcagagtaagaggttccatgggaaccaaggcagaggtggtcgtcaaattcatagctaccctgaatgtcgtcaatggaagaagcaccaccttggtaagtgcaacaaaaaaatatgtttttaatgtggtctggttgggaatttcaagaaagatttccccaattgaagaaggaagagtaaaaataagaggtgaaacttactccagctcgggtgtttgccattacttaagcagatgttgcccttctatggttacaagtcagcttcttgtcaacaactcctattattctgtactgtttactctatcacctcctacacctgcacgttgatctcctttaagtggagtctaattgtcaccaatagacatggcgtttacttttgctagctctgatactaagtgaaaaagttgaaaatgtaaattgtagaataatcttagctagctcaaggcgagattgagggagacaacttcatttatagaaatggcgtaatgcccaaatgattacagcaaagaataataaaggtgggaccgtacattctagaggtaattttacaattttgtatgcattatattaattaattacaaaatatgtgcaa

SEQ ID NO: 309866 - DNA, 1724 bp, Cannabis indica
gaactcatacattgatcttctaaatcaccatcacacacaaggattagtgtgggctgagaggatacacaaaacaaagtgttcttgggttttactcaacacatgagcaaaaatgatttctagaaagaaaatgagaatactcctaaatatatcgtatatatagatttaagattatactggtatattaattataatcaataaaataataataaatatttaattaaagaatatttattcatataaaatattaaataatcatattatagtatttacataaatatatgtaattgttatagatattatttttaattttaaatatttaaattaaattaaatatctaattaataattgagagaatctctcaaccactttgagagaatatctcaaccataataaatatctataactaacttttaaattcaaattcaaataaatatttatatatgtttactcagaaatttgacctgatgacatggacaacacttttgacatgtggcaagaaggtaacaaccctaggccccagctaccaggactaatggtggtcaacttgggcattggaaaatatgtcactaccctagttgaccttagtgggcacccatgtacgcactaagattcagtgaaaacgtttttagctgccatcattcgataaagttcaagagaacaagtcccagtgaacttaaaacgatgaaccatgaagttgaggatgttacgtggacatcccagggctcaacttgcgttcagtatcagtgttgggcacccgggttgacatcatgtgcgccatctcgcatcaattttagttcccatcaacatctaatggtcaatctgcttagccattgtcctaagatacatgagagaaatgcctcagccaagctttaaaatttgaagatgagtctacatgaaatgacactcaggcacctagaagccctaatggacacccaagttaacatatagtcaatctaggcgcaccgtggctagggtttaaattttggggacatacttggacccaaattcctcaaatccatcaaggaacatagcaaggacatgaaatttcataaataaataaaagtgatgaataagagtagagattgatatcatgcgcctctattctcatgcaaatcagccactattccttctctcctctctccatgcatgtgccacatggcacttttccattcatcagccactttttagcttcttaggttcccagggtgccaagcatgcaacttgtatagaaaataattaaagcaaagcattaagggatcgtttgttacaaagtttgacttgatgggaatcagtttagcatttcttggacattaaaaacgggaatattaaagcataggaatgcaagattaatttgtttggttgtgtataaaaaactaccttactaaaagttttgatatttttataaaaaaaattatttattattaaataatcatcaaaaattatatatatttcagcggaagaattttttcattcaaaaaaagaaaaagttcaattaaatatatatggaagtataatgattttcattttttattccatacattttatttttaaatatcattcacttattccaatgtcatataattgtatatatagataaaattatatgcaatattttaataaaatttagtacagctcacgttaaaaaaaatacagtagtattttgtctattcgagtaatattaaacccaaaaattggaaggagtagacattacccccaaatcaatg

SEQ ID NO: 309867 - DNA, 1245 bp, Cannabis indica
ttttattattattatttattatataatactgatatttatttttttatttattttttgttaaaaaagtatttaacaaatggttaatttacttccactcaaatatatattttttttttgaaaaggacttccactcaaatttggaagacccaaataaaaaaaaaggcttgtcacattataaaatggattgtctttaacaagacacgtgggtctttataattaaaatttaaaatacacaaaagaggataatcaaatacaactaatcttattataaacaaacaatacatagctatttgatttaaaatcaaaagagtgagtaaaaataatgctctcacttaagaaatatttgagcattcctattaaggattttaaggtgcacaataccatactctagcacgttaaaagtagttaataaaaatatatggaatccgataataaattacactaatagcaatatgatacgattactacacactgctatatcttttaacatttctcttggaatgagtatactatttttggagttaccgtttgcagatcgctttggtagtctagaaactgtaagttttataatgatatcactcacacgccgcatatgtgaaattattaaccagtattttagagaagtgaaggctcttgtttctagatttgttgatgcctactcgcctaaaaccccttctccttcagaattgcctaatattttggatcatgttgtgacaaatgtgttctttgatgctcttttaaatagggcattggtgttgttggtgtagtagcggtcggggcaaatagagttaagggtcttcatactgatattttccttgcttcttcagctagaagtcagagcggatcttttggttgttcagtgtgctcaacaagctgggtggtttcaagtagttttttatcggattgcaaggttctttgtgaggcgtctaagcttcgtcgaagcctagggtgggaagtaactagtatttgccattttttttgttttatttattcgatcaaagttgattatcacttttgttgaattcttaggaaggataacattgctgccaatattttagctaattgggcaaaactttctaatttttctagagtaatttgcggcaaaatccccttaactatcaatttacttacaaaaaactatccaacctcatattttggtggaaaaccctccaaagtactgttctgtttacattttaagatgccgtctgtccagctcctaattttgcccacgtggcaatgacaagt

SEQ ID NO: 309868 - DNA, 1077 bp, Cannabis indica
catgctaagtccttttcggtagagaatattatccataatcacatatcgatgtgcctgatactgtagccttctggacaaggtcctttcttgaggcaactcacctttggttttgtatttgccgatggggtccatccaatttgactcttgctcggttgtcacaactgtatctttaactctgatgcctagttctgtgaggcgctcaacgggcaccaccccagtctctcaatcttgctgtctgatgccaacttggccaaacagtctacgtgagtgttcttttctctagggattctttccactttgtactctgtgaactcatggagcagttcccggacaacagctacgtacacagccattttctctccacgcgtttgatattctcccgagacttggtttaccacaagttgcgaattgctgaagacttctactcttgtggctcccacagtttttgcgaacttcaaccccgtaatcagggcttaatattgagtttcattgttagaagctgggaattcaaaacgtagggccgcctggagccggagtccgtttggcgatatcatagctatcccggcactggattcgctttcgtttgacactccgtcaacgaataccttccatgccgaggtttgcagtgttggcttgcttgcactagcttctgcttcattggactctgatatgaagttaggtagggcctgtccttttatagaaatacgcggtacatagtgtatgtcgaactggctcaattccatggcccatttgaggagtcttcctaacgcttccagcttctgtaagacttaccgaagcgggtagtttattagtaccttgacggggtaagcctggaagtagggtcttaacttccttgaagccattaggaggcagaaaactaacttcgcaatcaatggataccgtttctcgacccctatcataagcttactgacgtagtacacatgttgttaaactttgtcttcttcccagactagggctgcgctgacggcgttctcggagacggcaaaatacaataatagatcctctccgtgaatcggctttgatagaactgatggcttagtgttgggttttgtgccc

SEQ ID NO: 309869 - DNA, 1543 bp, Cannabis indica
atcattctctcaacatatgtcacaacttttatcaacagtgcatggacaaaccacagaggttctagaacaaacttcgtttgggaggattatatcatggagtactacagaggtgttcattaggaattgttttagcaagttttaaagtttcaactataattacaagtttattatagtttgttaactttttagctgtcctccacatttacatgaccaattctattcgagatgggggtaatgagttcatttactttattctgcatcttctcacacaaaggcactgggtggctattgaagttgacattgagcagaggaaaattaatgtgtacgattgtaattctagcatttgtaattagaaggacatggcagccatcctaaagatctgggaagatcggttgccatcattactctatgcgtccggagattttcaaaataataaccagatcatgacgttagatatgaacaatatcagccaactttcgaggatgtattcatctcgagtcacccacgatttagaaggtaaaaaaaagtacatatcttaaaaaaaaagtactatagtaataaaatctgctttacattctactaattctatattttatgttgcatttagtggtaattttagcatttatgccattgagtatgtagagaatctgatgatgcaatgtccaatagctgatgtcacgcatgactggataaggatgtttcgtgaacggtggtgcgtcgatctctattaccagaacatcggttgatatatatatctatgtataattgaaaatacgttgtataatttgtgtagtgtttatatattttgtatagtttatttattttctatttttcaatattcatctttttaaataattagtgtaacgatttattgtcatagtttatatattttgtataattttacttaatttctattttgtataagtagaagtacccagacttgttttacttgggactgaactttaagtcaaatagccagttggtattatgggcggatgactaaccccatccttgagaagcgtacaacacaaataggcagataagtacttaatgcccttaggagtgagaaaggtcatactcatgttgtagtaattggctatctccttgaagtatggatgcaatgacaacattgcaccttgtttggtgtgagaactcgatcacacgcagtaaccttctccaaggtttgttgccagctacccgggagagggaaggaagcattcgacttgtcccaggaggcctttctcaaagagtttggacaatttcttaaaagtcagaacagatggtggagaaacccatcgagctcccctcggaccccttctgtttatggggcgagcctcagaatactcctcctctacgtagttctggctagcttccaagacttctcctatctttgagacaggttctcccttctcattgaagccaccgaaggatagcacccgagctaccccctcttcctcttcctcttcaccctcagcctcaggaggagtagtaggacgaacctcaccctagtcctcaactgttggatattattttaccaggatct

SEQ ID NO: 309870 - DNA, 13030 bp, Cannabis indica
tttctaactttatatgtgtttattttcattgtttttgaattcatattaggttgttaatccaacatacttcttagtaaatctagatcctggtaaaataatttccaacaccaagtccgagtatcaggttccagtcccagtctgggttctagtccctgtccaagttcaagtctcagtcctagttcgggtgtgggtccaagtcctgatctcgttctaggtttgagtcccaaattccagttcgacttctggtacgagttcaggtgtgggtctggctctggtctgggtgtgggtgtggtccgggtttctgtccgtgtctgggtcctggtcttggtcttgttttacttctagctttgggtctgggttctggtatgggtctcgtgtcatgggtccttggtcccatgtcctagcacaagtctgggtttgggtttaggtcttggtttgggtatcgatcccgatcttggttcgggtccgtcttcagttctacgtctagattcggtttcgggtgaaggtccaattccttttctacggcctaattccgattcttattctgattttgggtttcgggtttgagtttgggtttgggtgctggtctaaaaaaggtttcgggttcgtgcctcggtacaattctaagatctagacacaaactatgggttgggtccaagcctcgggtcgtgggtcaagatccagatcccaatcttgggtcccggtccgtgtctgtgttcgggtctgggtctaggactgacaccgtggtcgggtcttgggtccttgtccctgtccttggtctcgattctggttctaattttgagttttggtccaaaatcttggcttgggtagtaggtctaggtttgagtctccaatcgcggcctaagtcctatttctgggtttgggttgaagtccatgttttggttcgggttcgtgtctcgagtcccgatccgagttttgattcaggtcctagtctcggtccgggtttgggtatgggtcctagtcaaattcaagttctcggactcaaacccagactcagactcagaccaaaatttgggttacgggtaaaggtctgggtgtgggtctgggtccgagtccgggtctgggtttgagttcaggcatgggtcctagatccaaacactcacaacaggtcaagtctaagccccaggtccagatctggatcacggtcgcaggtcccagtctaattccacttcgggtcccaggtcgtagctcaggtcctaggtcagggtcctggaccagtatcgggtcttgagtctcggtcccaattcttccgcccgtgtcccgggtctaggtcccccatctatgtccgagtcctaggtctcggtctgagtccaagacccggtcggggttcaagtccttgtgtgagtctgggtttgggttccgatctcggtctgggtccagatctggggtcgagtttaggtccaggttcaggtttgagtcctaagtttcgatctgggtttgggttctgaggcccaggtcgggtttgagtcctagtctaggttggactttgggttcgggtctaggtctcgttccagctctgggtacacgaccgtgtttaggcccgagttttggtccgagtttatgtccagggctaggtctgagtctggtctaggtttgggtctgggtcttggttactgtcctagtctttttcaagggtcatgatctggcaattcttgttcaggttctagttttcggtcctaggtctcgatcagggtttgagtttaggtcctggtccgggttcaggtcatggtttgagtctcagatctggatccctgtcatgagtcctggttttgttctattttaggtcccaggttctaggtctgagttttggttcaggaccgagactgggttgcggttctagattatgaccttaattctgtgtcctgggtctgtgttcggagctaggttttggtcccgagtcaggctctaaattgggatctgggtccatgtcccgattcgggtctaggcttgggttagagtccaagtcctggtccggttaaagttccaggtctaactttaggttcggttacggttcgaggtccaggtctaagtcctggttccggtcccgttcctgtgtcctggtctacttcaagttttggttctaattttgggtcacagggtacgggttcgggtccaggtttgggtctaggactggattcggatccaagtctgggtttcggtctggggttgggtcccagatctagacactgactacaggttcagtacaagcccctggtccagatctggatctcgatctagggtcctcatttggttccattttttgtgtagggtcacgagctgggtcctagtttcatgttcgggtctggggtcgggtcttgggtcccggtccttattctgttgcccaggtccctatcctgattctaagtccatgtccaagttctggtcttgttttgggtctcgttctaggtttaggtttgggtcctagtcggaattcatgtttgggtctcggtctgggtttttatttggttttgtgttcagtctaggtccttgtccatgtcctagtcgtagtccacttcaagtttcagttgcgattctgagttcgagttcgggttcgagttcgggtcagggttcgagtcctagttcgagtttgggtttgggtctggatctcggtctaggtccaaattgggctccaaatgtgggtaaggttccaggttcgggtccgagtcccaggtttcaatctcgatctgagtcagggtttactttcaggtctaagtcctgggttctaatcctggtctgcgttcgagttggggtccgggtccgggtgcaggtctaggtttgggtctaattttggttctgggtctgagtttgggtcccaggttcgggtttgattttgggttcgggtcttggtttgggtttgggtctttgtatgggttcgtgtccaggttcttgtcttagtttgggactaaggcaagttttagatctgactcttggttcgactttagattcccgtgtctacgtcaggtcctggatccggttcgagtcccaaatttagatctgggtcatggttccaaggcctgggtcactggtctaggtcccccatccttgtccggttcctaggtccccattttggtccaggttctggtttgggtcccgagtctttgttttactccaggtcccggtcggcgttcaggtccaagtcttggttcgggttcaggttcgggtccttgaaagaatcaagatcatggtctaggtcccaagtcttggtcggtattcgggtcctggtctgggttcatgtccatgtccaggtctaaatcctagtttagttcaggggctgggtctgggttcgtgtccatgtccaggaacgagtccagaatttgggtttgggttcaggttcgagtctctgtcctagtctgagtctggaaccgggttcaatactaggtttgagctcgagtttcaggttgggttctgttctagttctgagtcacggtcctggtccaagtcctagtcatcgtcccgatcctattccagggtccttgtcacgttcttgttcaagttttggtttcgggtcccaagtctgggtctggttctaggtctaggtcttgttccagcttctggtccttctgcgagtcctaaaccaagacatcgactatgggtcttgtccaagcccaatgttctggatctcgggacaagatctggatcccaatcacgggtcttagtctgatttcagttcatgtcccaggtcccgatctaggttcaagaccgagacttgggtgtagttctgggtctcgatcccaattctgggtctcgagtcctgttccatgttcctgtctatgttcaggtcttggtttgggtctcgagtccgtgttcaggtttggatttaggtttgggacccaatcccagggtgggtctgtatccgagtccgggtcctgtatctattaaagttttgggtctaggtccaggtcatagtcctagtcctgatcttgggtctcgatctgcttctaggttcggatcctaatttgggtttggggcaaggttcaggtctgggtttctgtctggattagggtccaaggtagggttcagttctgagttcgggtctgggtccaggtctcggtcatgttccagatcctggtcttgttccagttccagtttagttttgtttcccatgtgtgggtctaggtctgggtatgtgcagggtcctagtttgagttcgagtttgggttcgggttctggtctaagtcccaaatccagacaccgattacgggtggggtccaagcatcgagtcccgaatcccaggtctcgaggtgggtcctaggtctaggttttggtctagggtagggtcctggatccgaatccaagttctgaggaccaagttcttgttctgatttaagggcccagttatcgggtcagggtcccccatctatgttcaggtcctaggtcatggtcttggtcaaagttcatgttttggctcaggttcgggtctcgagtcatggtctaattccgggtcccgatttggtttcgagtccgagttcgggtcccagtcccagtgtgggtccaaccctaagttttttcgtcttggtttgggtctgggtctgggtcccagtctgggtctaggtcccagtcttagtttaggtcccaagtcgcaggtcccatctgagtccaagtcacggtatgggtttttgtctgagtttgggtttaggtttgggtcctattgtggtcccaggtctgggttctagttcctgacctggttcaattctaattctgagttcgggatcgggttttgatcctggtctgggtctaggtacggactcgggtccgggtcctagattcaaacactaactatgggacaggttgaagcgtcaggtccagattcagatctccatattattcctgttcgtgtcccgggtcttgggctgggtcttaagtttttgtttgggttcgggttcgggcagtagttaggtccagggttctgggtctagggtcgggtcccacgtctcgtgtttgggatcgagttttgggtctcggtcccagttctgggcccagttttgggtccaagtcccccatctagctctggatcctttgtccaggtttgggtttggggcccaggtcccccatctaggtccggatcctaggtccaggtttagctccaagtttaggtttgggtttggatcccgagtatgtgaccgagtttaggtcctagtacgggttcaggtttgagtctgggtctgagtctcggtctgagtctaggtccctgtttgggtccaggtcagggtcgcgatctaggtcccggaccaggttctgctttgtatttgggtccgagttcaagtcctgagtctgggtctaggttcgggtcttgatctgggtccagatctgggtcctgggttctgatcacggtatgggtatgggtctgggcctgtgtccaggttagggttcagggttttgggtttaatgtttagggatttagggtttagggtttagggcttagggtataagggtaagtgtaaagagtttaggatttagtgttaaaggtttaagggtccacttcaagctccggttccaatttcgggtcaaagggtattatttacggttcgggtgtggttctgggtctgagtcctagtttgggtctaggtttatgtttttgtttaggtacgagtcttggtcccaaattaaaacactaaccacaggtcaagtctagttcgagtttcggtactagttcggctgttggtctaggtctaggtccgtgtccaggtccaattcccaaatttacacaccgactatgggttgggtccaaccctctggtcttgggttctgggtcgcgagtccaaatccagatcctgatccaattctagctcatgtcttagttcctcattcgggtctcaagtcgaggtttgggtctaggtttcggtcttgggtcctgagtcatgggtctgggtccctgattcagcttagggtcctaggtccttttatgggttagggtcccagtccgagttcaggtcccggtccgtgttcggtactggtctatgtctcggttcttcgcctggtctgggtgtggttcatggttcagttctcaggtcccgggtcccggtcccagtccaggttcttatcccagtcaaagttaaggtcttactcatagtccgagtctgtgtcccagtcctgatcatggtcttagttcgagtctcgtgtttgagtccgagttctggtacgagtttgggtctgggttagggtctaggtttgggtctgggtctgggtttgggttcgggtttgggtttcagtccgtgttttagtctaggtctgggtctaggttttggcacgggtctggaatctggtccaggtcgaaggtcacgggtcctgggttccgggtttttgtcgcaggtcctggcgcaaatctaggttcgggttcgagtttggtaccggtatccatctcggtcttagtctaggtccatgttcggtttcatgtcaaaatccggttttcggtccaaatctaattcgtgttctacgattctgattccatttcttgttctcattttgggtctcaggtctgagtctgggtttgggtactggtctagaaattgttcaaagttcgggtcttggtacgattcaaagatctagacaccgactacgggttgggtccaatgactgggtcgtgggtcaagatcagaatcccaatcatgggtcctggtctcattccgattcagatccagggccagggtccaagtccgtgtttgtgtccgagtctagatttgggacccagactggggtcgagtcttgggtcctgattttggttctaattttgagcttgggtcccctatctaggtttttgtcttaggtcaaggtttgagtccccaatctcagtccggatcctaggtcaaggtttatgtccaagtccgtgtctgggtatgtgtcccgagtccgaattctagttttgattcgggtccgtgttccggttcgggtctgggtctgggtgagattccaattcccagactcagacccagatttggggtacaggtctgggtctaggtcagggtctgggtccgagtctaggtttgggtttgagtccaggtatgggtcccaaatcaaaacactaactacgagtcaggtctaagcccctggtccagatctagatcacagtctcgggtcccagtctagttgcactttgggtcccaggtcacgatccgagtcctaggtcaatgtccgggtctggggtcgggtctttggtcttagtcccaattttgatgtccgtgtcctaggtccaggtcccccatcaaggtctgagtctttcgtcccagtccgagtccaagacccagtcggggttcaagtcttggcctgagtccaagttcaggtacctatctcgtttgtcgatctgggttcgagtctaggttcaggttggggttcgagtctcgagttctgatctgggtctcggttctgaggcccatgtcctggtccaccatctaggtccgggtcctacgtcccggtctgggtccatgttttggtttgggacctagtcccagttttgatttcgattcagtgttttgcatcaggtgtgtgtctgggtctggatgcaggtctgagacccagtctgagtctgggtccgtgtctgtatccggatccgaatcccagtctggctctgggttcaagtctaggtccgagttcgtgtcccgggtgcaggtctaggtctgggtctgggtcagggtctcggtctggatctaggtcctaagttttgatctcggtctgggtttgggtctgggttcgagtccaggtttgtatcaaatcgttatcaaggtcggagtttgggtttgggatcgagtctcaggtctaggtccaggcccggtcttggtctttgtctaggtacacgaccgtgtctgggcccgagttccggtctcgattttggtctggggctaggtccgagtttggttctatgtctgggttcgggtcttggcacgatcctagtcttgttcgagtgtcctagtctggcagttctagtgtaggttccaatttgtggtcccgggtctgggtcagggttcgggtttgggtcctcgtttgggttcaagtcctggtctgagtcctagatttgaatccctgtcgcgtgtcctggtctggttctagttcaagtttcaggtccctggtccgaatttaggtccgggaccatgactggagtgcggttttaggtctcaacctcagttatatgtctcaagtctattttcatgtttgggtctaagttcaggtcctgagtccaggtgtaggttggcatccgggttcgtgtctcagtttgggtctaggtcttggttggagtttgggtcctcgttcggttaaggtttcggctctaggtccaagtccagttacagatccatgtctagggctaagtcctagtttcggtcccgttatcgggtcccaggctacttcaggtcacagggtacaggttcgggtctaagtttgtgtctgtgactgggtttaggtctgagtctgggtccgggtcaacttcctggtcttggttcgggtccaaggctgcgtcccagatccatacaccaactttaagttcagtacaagccctaggtctagatccgaatcccgctctcaggtcccagtctggttccattttgggtgtcgcatcacgagctgggtcctaagttcatgtccgagtctggggttgggtcttgggtcccggttctggttccattgcccaagtccctatcccggttctggtctgggtttgggtcccgatctaggttcgggtttgggtcctagttgcagttcgggttttggtctcggtctagatttttattttggtttgggttcagatctgggtcttggtcctagtcctggtcttagtccccttccagttccaattgcgatttcgactttgagtttgggttcgagttcgagtcccaggtctcaggtcccagtcctagttaaggtcttgatccaggttttggtctgagtttgggttggttctggtgttaggtctgggtcctagttacagttccagttctgattctgggtctaggtttggttccgggtcttggtccatgttgtggtcaagttctgagtcttagtctgagtccgggcacgggtttttcgggtcccggtcttggtccaggtctgagtctgggtccaggttcgggtcctaagtccgggtcctaagttcgggtctgggtcttcgtttgggtcttagtctaggtctcgtgtttcgatctcgatctgggtttgggtcggtattcgggtctgggtttgggttcgtgatcgagtcccaagtttgggttcgagttcatgttcgagtctcaatcctagtatgggtccgggaccgggtcagggatgggtccgagaccgagttttggggctaggtactggtctagtttggggtcccggtccaggtccaagtcctggtcacagtcccggtcctgttccagtgtcctagtcatgttctggttcatgtttcggtttcgggtccaaggtttgggtctgggtcatggtcttggtctagcttcgggtccttgtttgagtcacagatcaagacatcgactatgggtgttgtcgaagccctagttctcggatccctggacaagatttggatcccaatcacgggtacaagtctagtttcggttcatgtcccaagttcctgtctgggtctgggtctaagttccggaccgagagtagggtccagttctcggtctcgatcccaatttcgggtcctgaggcctgttcaatgtttggctctgagtttaggtcttggttagggtcccgaggttttctttcaggtttttaccccaagggatggttttttgtcctgatttgggtccggggcgaggttcaggttcaggttttagtctcgtttagggttcgacaatgggtccgattctgggttcacgtcgtggtctaggaaccagtcacgttccaacatcccagtccagttccaattcaagtttcggttttggttctcgagtgttggtctaggtcttggtatgtgtccgggtcctggttagagttcgagtttgggtttgggttttggtttaagtcctagatccagacaccgactacaggtcgtgtccaagaatcgagtctcggaccccaggttcgtgttctggttcggggtcgattccagtccgagtccaggtccccgtttttgttcgggtctgagttcgtgtctcagtcccagtctgggttcgagttatgggtcccactttcgagtttggttcttgggtccgtgggttcgagcaccagtttttcggttcagagtcttggtctaggacccagtttggatccaggttccagtcttggtttaggtcccaggtcacaaaacccagtttgtgtccaagtcccggtatgggttctggtctgagtttgggtttaggtttggttcctgttacagtcccatgtttgggttctagttcgagtcctgctcttattcttgttccgggtccgggtcagacctaaacttggcacccgatcccagacctagacttagacatagacatggatctagatacgaaccttgattcaaaccaagatcgaaacttggaacatagatccgggccgagacccagacccaaaccttgacccgtacccaagactttgactcggaccaggacccaaacctagacccagaccaggatccagatttggacccctacccaaccctggacttggaccaggactcaaaccccgacccatacccggacccgaacccgaacccagacacggaatcaaaatcggaattaggactaggacccgaacccaaacatggacccgaacctgtatgtgtgacccagtcaagtctaggttctggtaaaagttcgggtcctaggtctcaggtcccagtcctagtcaaggtctcaatctaggtttttgtcagagtttgggttatggttttggttcggttctggtctcaggtgtgggtcctagtcacagttccaatttttattctgggtccgagttagggtctgggtctaggttggggtcggggtccgagtcttagtctgagtccgagtccgagtacgcattttttggatcccgtgatgagtttaaatcccaggttcgggtttgggtctttgtctgggtccgagttcaggtcccgtgtttcgatcccggtatgggtttaggtcggtattcggttccgggtctgggtttgtgtccatgtccaggtccgaatcccagtgtcgatcaagtcttggtctgggtccaagattgaatcccgagttaaggttcgggttctggttcgagtctcaatccatttctgggtccaagaccaggtccgagaatgggttcgagcttgagtttcgggtcttggttatggtctaattcttggttccggtccaggtccaggtcttggtcatggtcacggtcctgttccatgatcctagtcatgttctggttcaagtttcactattgggacccatgtctaggtctgggtccaggtcatgatctagctcttggtccttattcgagtcccagatcaagaaaccgactatggatctttttcatgcctcgaatcccgaatcccgggacaagatttggatccaaatcacgggtcccagtctggattaagttcatgtcccaggtccctgtctgggtcttggtctaggtccgggactgagactaggggcagttttgggtctcgatcctaattctgtgtcccgagtcctgatccatgttggggtctaagttcaggtctaggtttgtggctcgagtcccgatttgggtttggattcagtttgggacccaatcacagggtgggtctttgtccgagtctgggtccttgtccgattacagtattgggtctaagtctaggtcctggtcttggtcctattcctcggtcctgatctgcttctggtttcggttcaagtttcacgtcacagggtacgggttcgggttgagtttgggtcaaagtctgggttcgaggtgaggttcaggtttggatttcagtttcggttagggtccgagggttggtccagttccaggtttgggtctgggtccagatcccggtcctattcctgttccaagatcccgattcggttccagttcaagtttcggttttcgttcctgagttcgggtctgggtttgggtatgtgtccgggtcttggtttgagttcgagtgggtacgagttctgatctaagtcccagatccagacaccgactacgattcgagcctaagcatcgagtcccggatcccaggtcgcgaggtggttcctaggactaagtttgggtttaaggtggggtcccagatcccaattaaacttttgaggcccatgttttggtcccgatttgggggcctgattcctgagtctgggtcccccatctatgtttaggtcctaggtcctggtccgggtccaagtttgtgttctggtttttgtgcgggtctcgagtctcggtttgagtccaagtctcgatttgagtttgggttcgagtttaggtccaagtcctagtgtgggtccgagttttgggtcccaagtccaagtctggttcttaggtcctgggtttggcaccggtttttgtgtttgggtcccgatctgggtctaggtctcagtcatggtttaggtcccaagtcacaggtcccggtcccggtccaagtcccggtatgggttctggtctaagttttggttaggtttgggtgatgttgttatcctaggtctgggtcctattcctaaaccttgtctgattcttattctgggtctgagatcgggtttggatcctagtctgggttcaagtttgggtactgcactgactacgggtcaggtcgaagcctcaggtccatattcagatctcggtctttgatctcagtcttagatctcggtcttgttcctattcaggtcctgggtcttgcgctgggtcctaagtttgggtttggatctaggttcggggttgtgtcccggtagtcaggtcctgggctcttactctcgtgtcacgggtctggggttgagttttgggtctcaatactagtttcagggcccaaattttggtccaagtccccgatctaggtatggatcctcgatatagttctgggtctaggttcgggtttggggcctaagttccccatctaggtttggatcctaggtcttcgtctaggtgttggaaatttatt

SEQ ID NO: 309871 - DNA, 1714 bp, Cannabis indica
tctttcgacccctattacagtgacgatggatcactgggctaaatgcagaagggaaaattttccttttccttataatatctataattggtaagaacacacattacatatttagaatacatagattgggggattcggacaacttgccataccctttgatacgatccctggattgtagggattgcttttgtgcttcacaatgtatgtcttgaaactgccaagtcttgatacattgtttggatcgtctacccttgccctgctcggtcaggcagactctatctgtgcagatgtatgctgagctctgttcggaatatctcttcagctagatgtgggaaataggagccacgtgtcaccagtatgtgttgccacgtcatagtacgaaaaataggataacatgtctatacatttttttccaattcatccaattaataccctcgcgttgagaccgatttgtttgccaccaatactttgccattaagcactcaaaataataaatatggttggatttcaattcaccaaatacttcattatctaattttatttcttaaattaattgtcaaaatatattgacaattaattgtggtacagatactgatggaatatctcgcttataaatatagggtaccggtcccaagctcactattcattttatgaaaagagtaaatctatctaagatagtaagagaggttggaagtccgaatacttacaccaactcagattttctttttcttttgtagatctaaaattcatgtgggatcaaaacacaataataagacatttcaattttttcattatacaggatatatgttcggttataatttatttcgctttcatataattgttcttatgtttcaaatttttctattaatttttttttttactagcttgggattagttgtgagttgttgttgattggggttgggccgaagggtcaagcgatctcgtgacatatgctatgacgaggagttgatgttttttttttttggatggaggagttgatgttgatcatcaaaatatagaatcttttggattacaataatggaggagaaatcgacaataagacaagaaacaaattgatgagggaatggagactgcctccattttggaatttgagtattatttcatcaattaaacaacgttgagagtaaacttttttaagtgttttaactttaaatttaaagtccatttgggatgcctacagcctagtacctacctctctatgcctttcatgataagacgattaagtttttagcaattggaattatagtcaactaaactttaataatgtaaacttttgttgatatacttcactttttaattcatatacacagacaattaaggtaaagaatgttagaaattgttgtgcatattataattttaatcaaaagaaaaatgatggattaaatagtgttagggccgtctcaaggtgtggagagacttagggcaaaatttaaaatgagacctttttttcgtttaccaaaaaattaaaattaatattatttatttattattttgagatattatttattatttaaattttgaaacaatataatttaaaaaatttatctccatatgacaaataatttttctcaccatataagctaacataaaaaataaatcactagtatgcaaaaattatgttaattttttttatacaaaaactgttttttttagtgacaataatttttttgtgactaaatgtgtcttttagtcacaa

SEQ ID NO: 309872 - DNA, 613 bp, Cannabis indica
tttagggcataaaatctcaacacgtttttcgcactatgattgagtacttgacttgctatgtgtgggcatggtactctatcactaaaggcttgaagattgatgaagaacaatgataaggatttgaaatcactatgaaatgagtctctcatcgacttagttgtctgacagagttagaaaactaggtttagattagttgtatgttgagttggatgagaatgagaacatcatgttctttttatagtatttcaactagcgtttaggatttaattatatgtattaaaaaaaataaaataataggcaaaacttagggaccgtgcttcacattcaagcatgataacccaaattttcctttatcaactactatttaccacgtcactcgttttatgataaaattaaatagaatatgatagaaagatcacattactgtaaacgttatatttcgatagatgttatcaacgagtcgtatactataaggagcaaaacttggtaatgtaaaaaaatcagaaaataaaaatattaagaggaattttatttgcaccctaaaaatttaaaaatacacccctttcaataagttttattgtacataaaatatatatttaattatattagtttt

SEQ ID NO: 309873 - DNA, 724 bp, Cannabis indica
catgactattaggaatttttccatttattgctatcttacacaagtaagagatatgaaatctctttgttctacttattagcggtccataattggctcgtggtcagcattgtagtttgagtcataattgaggtcctcttgaagtgggtgccaacctgatggttcatcatcttcatctcttccagctggtggacacgcatcatattcaaaatcaacaatcttccattccagtccattgtactaaaagggatagggatcctgaatgatttcttggtccatgtatggatattgtgaatcctcaaaaatgtttgttttacggagtaggacccctacagtgtctgtttctttgaatagttgtgactatttttcagaaatttggaatttttctagagcttttgctttgcgtcgcgaataatctgagggaaacatttaccatgggacatcatttctatttttggccaaaattctggtagaatagtctggtttttctcgaaaataacctcttggagatccctatactctgaactttctctgaaagatgcttcttgggagccgtatagttcaaaagttggactgaaaactattttcttgttctcgtccaattttgcattaagattgataaggaagatagtgtagcaatccatcatgttggctacatgtggtcttgatggataaacaaagacttgcctattgttgcaaactttttcccattcatcccaaagtattt

SEQ ID NO: 309874 - DNA, 1547 bp, Cannabis indica
aatattttcatttttcattttctaattaagtacttcttcacatctgcatttttaatatttcagggacaaatgaaagagaaacctaaccaaacgtcaaaatagattaaatccactaactaacatgtaacaactcaagctttttcttttactttttactttttaaaaaaaaggaaacatcaaacaacatagcaactataaaggaataggctggtccatctcaatacaagcaatcaagggacaaccccattccaactagtcgaagctttagactccaaagccaacttaactgaactatgaacaagaagattaacatctctaagcttgaaacaaaactgaacagaatcaaagttgcaactcaagctttttctagagttgcaaaataatttaaaaataagaatttcttgtatttaaatttatagttaccgaatgttgtcttttatctttggccaagtttgccgacctttcctaggcataggcacagtttggtcgggattgtatttgctattgcgattcgatttttgcaactgcgattagtcttgtctatgtgacatagttttcagtattttagttttgtctttgggacatggttttgagtgttttagtttgtctgtatgacattattttatttagttttattgttggttattctttctttgatgactcgccatcattgttagtagttagtgttaaacctgtgagccatgaggaattacacaccatgaacaacatgaacagaggaaagagcagagaaagatagagagaaaggtaattgagagaaagacaatggagaggaaagagaatctcattgaatgaatgtacaagatatttatacaacattcatgtagatgcagcaaggaaaacaactaacaaaaataagttgtaacaaccaactgaaaagctaacagaactaacaactaacaaactcaactaacagccttaacagttatgaataacaagttctatgtgagtaaatgagttaaatgaacttactgtaacagtttctattattttattttgaacagtagatgaaattcaatataggtgtttttaaggtctgtgatgatgcaatttttttaatttgattttatttttaatttttttatcaaataatttgaaaattaagtgattgattatttggcttatttttttgattctaattctgaatgtatctctaacgaaagaactgttctgattagattggagattactgttaataaaattgtataattaattgaaaaaaaataaacaataatcgatatttcacaacaaactcatttcaataataataaaacaataagtatatgttgaaccaaaatattcaccatatattatacaatacttttcaaaccagatttagaaaaacgtgcataagttaattaagtatatatcattactaaaaaaaacaacaatactaatcatattgttagagtctccatgaactctttatctagtaacatagattcaagtgtctgagctcgaagacaaacctcaaagtcaatgcttccctgttcagagccaggaaaaacagtcaacttcccatcatactt

SEQ ID NO: 309875 - DNA, 1214 bp, Cannabis indica
aatgtaagtttttcttaaacccttatgtgtttattttcattgttttagagatattcatatttcggatgttaattcaacatacttgttagtaaatctagatcctggtaaaatattcccaacactaacacgagattccaaggtaatcaaggtttccgacgaggtggaaaaaaaaactggagaacctatctagagtgcccaatgtgcaagagacgccatcaaggagaatgtcaagctcaagcctgctaccagtgtggggtagtgggccatgtcaaaagaaattgcccacagttgcagcgatcaaaatagaagaaagatgacactttggttcctacttgggtattttctctcacccaagcagaggccgatgcttgtccttcaacaatgataggttagatttctattgatggtacctttttgactgatttaattgtatctagtgccagacattattttgtgtcaagttgagtgattagaaatctgcataaacctagtgatgttttaccaagaggttttggtaccttactacctactagagagttagtaatctctagtagatcggttaggtctcttccactgcatgtagaaggtagaaaattgtttgttgatttgatcgaactgaagttagaggattttaatgttatactggggttggactggccagaaaagtataatgcaaacatcgattgtaagagaaagatggtgaattttgaacctgcgggtgaggacccatttatgtttgtgggcagggttcaaggatcctgaattccaataatcttggcgcttaaggctagagatttattgtgggatggatgtgtcgattttctagccagtgtggtggataccatgaaggaagaaccaatgggaccgaaacacgttctggtggtccgagagtttttggatgtctttctagaggagctactggggttatcaccaaagtgggagattgactttgaaattgatttgataccaggggaaaaacctataactaaatcttcgtttcggatggcacctacagaattgaaagagttgaaggttcagttacagggtatgttggctttgaagtttactagaccgagtacctcaccttaaggagcaccgattttgtttgtaaagaagaaggaagatacattaaggatgtgtattgactaccgggagttgaataaattgacagtgaagaacaagtatcctttaccaaggataaatgatctatttga

SEQ ID NO: 309876 - DNA, 3186 bp, Cannabis indica
gagagagagagagagacttagttttaagtctatctttacccttctcaaataccctaacattgactacaacatataaccctttaaactctcctacccaattctaagatattttacatcaatccatcaaaggcttaattcaacttaaatgaaaattttcaaaaatttcattacttaactacttggtaatcaataaccctaggataaaattgtcataatccaataccctaatattctaaaatactaatccatactaatgtgatattttggacaatccgtcgagtttctactgttgtcatgcattaaacatggaatcattaaatttcatatgtaacatatataatatacctaaaattcaataaaatctctgtaatcgagaaattattttcctaaggcgtatttctaacaataagccctaattatttactaaaaatcataaactcataaaataatattttaatccatacacatctaataattctcaaaattaagttatccagtcattacaggaagtttattgattacatgagttgttgtcttcatacttttggcccaaaatcttcctacaacattctttgcatgtagcatgctttgacatgtctctgcaaggtggcaattcttcctttcagctactccactatgttgtggcgtatttgtacatatgaattaatggtgtatgcagcattctcgaagatacccaaaatatttaacgaggtatatttgccattgttgtctgttcaaaggcattggattttcttctcgacttctcattcacctatttttttgaactctttaaatgttgaaaagtttcatacttttttttcataaagaaaacttacacgtaccttgagaagtcattgatgaatgtagccatttactgcatgacgttgattgatggttgcttgactcgtccaaacacatatgaatggactacttctaatggtgctttggcgttgaactttgaatcttcataagcaaattaatgcatcttatcgtattgacagtgggcacatatgatctctgttctgccctcaagttgaggaagacctttcagcatagacttcttcatcatcaccttgagtttgtggtagctgacatgtcctagcctagcatgccacaaatctgttattttgttctttcaagtcttgtctacataagttgattttgctaacattacataaaaaaactttaaacattgtcctttcatcatcaatgttctagaaatttgaagatcttagtagatcttaacatcttgaggaccgaatatgatatggtggcctaatgctgtaagtggagctactgacattaaatttttcttcttctcaaaaacgtgaaaaacatcctagagttaaacgtctttcagactgaatctcaatgtgaatattgctttaccgatatgagcaattagtaatccgaagttgttggatgtcaccactacgtaaccacctttatactcaaccttgtcttttagcttctctttgtctcttgtcatatgatttgagtagccaaagtcgaatatccaatcatgattgtagtcgatcgtgcaggaatagtagttgctagatctaattcttctttctccactgtgaatgatgcatttgcgtcccattcttcattacttggatttccttcatttgatgtggttgcattgatttctccagttttctcattgaaccagcaaattttaaccaagtgtccatacttttcactattataacattttttatcaaatttgttgttattctttgactagctatgctagttgtttatcttttgagctctcctatttgggagcttccataatgactatcattgccattatttttcttaaaaatattctaatatttggtcgagatcaacctttcttatcaccattaaagagtgcttcttcgtcactctttaatgagactctagatgtttgcttagctaacgcttcttggtcagcaagcaagttttctaattcaataagagaagattggcttggccaaccttgaattgtagtactaacattctaaattctggcattaatccatgaataataattattctaattctagcatctgacatgctagcacaagaatcaaatgcaaagattttgagacaaagagagatattaccttggtgaagtattggttgatcatcatgtcgcgctgcgtgattgagagaagctcattttctagaagttgcaatctcgtgtcatttttcttggtgaatagtgatgcaaaagtgtcccgtgcttccttttgtgtctttgtgggtctgatgtgctccaacatttcgtcttcaactgtggtctgaatcgcaaacatgaccttgtcagctttaatcttccatttcttcaaagttgttgtgtcctccagttgtgtcacttcattgccaccaataatttctcacaagtcttggccttggagatatgcttccatgtgcatcgaccacatgctataattttggttgttaagtttcttaatgcccctgaccacttgaaggtcacctatcatgcaagctatgtagtactaaaccacacacaatcactctaagaaactcaacaaaagactcttttagaatgaatccaattcggctctgataccacttgtaggataatacaatacatgaaaacgtaattactttattattgtaacagtaattacaccaagacttgaatacttttaactaaaacataatacatcaagcccatatttttattttaccactagacacatttattatacacttatatataactcacttttttgaaacactatatttatgttggtatactttataacacactcttactcttttgaacacactttgaaacactcttgtttgatgcacaacttgaggatccaaggtacgtatttatactactcaaaagaattcagctataatagtcaagacaattctagctaattgtgttactaaaatattcttgaagctttcacaaaattcatttatttttaattacttttattgtaatgtcttgacctaaaatgatagatttatctagttaatgtctaaaaaaaactctagagaattaatgatgattcttcataactgacttttttttctctagagtttgtgggaaggagacaagggtttaattcttagtcacggcgaggattgagcactgccttgtcaagaaggcatgggacatttccccttcgatacatcacgtcttgatggtggttg

SEQ ID NO: 309877 - DNA, 3579 bp, Cannabis indica
atttaagaaaatactaccattaaaagtattaggtcggatgactatcgtaagtacgaaacaaaagaacatttaatcttaagtgaatggccttctgggcagtccacgcccaaaggttcagaagaaatgaaaaagtactcaggtcggatgaccacttatgaaagtaaaatttctgttttatgcaatttgttttgtttatatgaagctaaagattaaattagattaatataataacttctatgtaagttactctggtaccaagtgtgttccgaccaataaatgaataaagatgcttatttaaattcaaattgtgtcaaatctattagcaagttataaatttaccattaagtgcgtacaatggtctgctcgtactcttagactcgaacagacaaaaaagaatacttgtgaaaagcaagtgaccaagagtcaaacgtctgctcggtcacttaaggggcatctacatccatacaaagcatttggtaaaaacaaataacaagcacaaaaaaacgaacaaagttacacaatgctcataacaaggaacgaaattcattaaggataagaaagcatgcaaacctgggattaaaagctgcccggttagccagttgtccgaaaaatgtaaaatatattccaagtttaaagacagcttggccggtcactttgtctcaaaagaaggcctactagctgagcagacatatacaaaaagaaaaataaagagaaggcaatcaaacagcaggagtctcaggctcttagtaaggatcgactgggtccaaaggagctggaggatcattggtctggacggtcatcaatgttctagtcggtaggagcagtggaagtggtcgcctcacaattctcattggccacctgggccatgcagtaattgagatacatgtcgttggaggtgtcgaggttctcaatgtctcctttgggattggccttccagaagttgtaaaaaatctcaagacccattgtctttaaggcatccacatccccctcaaacttctccaccttggatttttgattctcaatctccttcttgagtcctccgacctttgctttaagttcctcctccctggtcttcttagtcttagcctcctcctccaacttgtgaagaagagtccggagagcttccctctcatttttgagactagtaacttcttgggacaaagaataattgtctgcctcaagctgcgtggtcgagggtatatcttgtagctccttggtcagtttggtagccttggcctcagcagcaaagagtttcttgtttgcctctcccaattcctttctcacggtcttgagctcggcccgcgcatctgcagcatccttcttggccaggtccacttctctctgcatcgtgctagaagtagcatgattcttgacagcggccgacttggctagagagtaggcataggccatcttcacgccgacctgcacagaaaacgtgttaaattttgagccatttaaagaagaatgaaagaaaaaggataggggcgcttacccaagaaatctccttcagaactcctcctaagacaagctccaaagacagttcactgtccgccccggtcaattgttcgctcacttcaggaagcgaccgagccacgtagtggtgaagcatgtctttccctctcctggcctccgtgcacagcgccagagttggggcaggggccctaacctatttggatccgctcttaacctgctcagatccagttttggcttgctcggaccagtttgaactccctccctgggaacttttagacttcgagaccttctaggtcgaaggattctcagctggtcgctcttcagagagatcgatgacctcctcaactggaattttttccttggatggggtctcaccacctctagactttttggttggaggagacaggcccgagctatctcctatcctcttcttcagaacctcaatcatcttctgagacatttctgcacagataaagcaatacagtcagaagagggcacaaaatatgtggagacataaaaattagaaaaaataaatgcaagttgaagtactctgcacgctgccagagcgttctctcgaacaattacggacggagtggcatcgtccgaggagccttcctgctcctccaggacggcttttccctttccctccataggggtcgacggccgagcaggaataccaggctccctaatccgaatagcatgttctattggcgcctgctcggtcaggagagtcttcttcttcttgcgcggcctctcctgctctaaatattcttgagcctccttctcctgctcagaatattcttgagcatactgtttggctttggcactacccttcaacttagcctcacgcttcagttgaataagatctttctcctactcgacatcctcagcttggctcgacctagatttcttcctcttctccttaacgggctggggtacaaagtctgtcaagtaaagctcgtacttcacaaagttggcatcagtggtcaacaaagtgatatttcgaggagtctcagacagttggagaattttttgagccctttccctaagccctagtgtgaagggaggatgacaatatgcgggtatttgttgaaactgagtatgagaaatctccatgccactcacgaagtagtatttgttaacaaaatgcccaattttgctaacctctaaatccacagtgcccttcagccacttgtcatccagctgagagaagtagaagtaccccgacctactctgcttcagagtaggcttcaaatcaaagagccaattggtgtcgtgcggagacggctcaccccaaccttgaatatcgtagaggatgaacatggtggataaatatttagtgcccttgggtgtgaactgtgtcggacaaaggtggtagtagtctgaaatcctttcaaagtacgggtgcgaaggtaacatcgccccttattttgtaagagcacccaacgaggcattgtatccttccttctgactagttgcccggtgatttggagtagggagaaagcactcaactctgcctaggtacccagccttctccaaactttttaaatggtcctcagttacgacggacggaggacacacccatctagccctcatggcaccttgcctcctatgagggaccgcctcagcatattcttgggtgacgtagtcttccccctcgaccaagacgtcaccaagttcggacaccagctatccagcctcattatagcccccaaagtgcagaggccgagtaactcgctcttcctcagcctcggaagggctatcaggacggtcgtcatcctaatcttccacttcttggacttcaatgtccccctcgtagtcctcttcctcagcagcggacaggtccagttcggcacttggcaacgtggcatgctgggccacgtaagggtctgttgcattaatcttccgcattgtttgttttgtgcaagccatcatcctccttctagacaggtattggtgtgtgtgctgtgcaacagtcatggcaggagcagaaattagaatgccgaaggcaccagaacttggacggcctacaggaatagtgtcagtgacaccaagtcggagtaatgactgctctagtaatttggattagtaagggcaattagcact

SEQ ID NO: 309878 - DNA, 3409 bp, Cannabis indica
ataaaaagaaagaatatcattcccacaagcttagacctatatatatctagcatattcattaattatatatagtcatgaccaacaaataattttatttagtggatgataacaccttaaggatcaaataattatcaccctaaccaagatcacagactagttggtctgcaaggaatttggcactatgtctgactctgatgatgaggacctagagccatgcatcaaaaggattttagaagcatcactgcctgcacgtttctgcatgccctaaatatatggacttatacaatggcaggaaaaaccccaaagatcacttgtctcgatgttgagaatcatggggttccaactcaaaaccaattggcaatgagtggagtagcccatgttcttatatatggctcaatactttcacatttaatccatgtgggacaatattctccaatactcgataaaatagattgatgattgtaatgatcacatacttagaataaggattaataaggtaactaacactaaatagctatattatatgactaaatgtgacaattttatatattatatatggtgggtcctatttttaagaaataggcattagggttataatttctcaattttaaagattttattaaactctaggtatattatatttgatatatgtaagtatttttataatttttgctcggtaacgatagaaatgcgacggtttagttattagagttacacaggtatggtttagaacctttcttttagctgggtatatttatttaatattagaaaaattaggattaagtggggttatgataatggaccattttacccctaggccttaagattatttcagtgagaagcaaggggtaaattggtcattttgcctacaaggttggctttaattttagttgatgtggtagaactttctaataatttaatttagtttattacctaaggtttaataaaagaaattaatggtatttcattagataaacataagtgaaagatcaagtctatccttatctctctctctccttagtttggccctaagagaaccaacaagaattagtgttttattcatcaaacttttatagatttcagctagaattcaagtgtgttagaagagcaaacaaaatgtaaaaccctagactctttgcttctcgagtttgaaagctttcgtttagttagaacgtgcaaattttaagaataggttatgtccaaacctagggttgtcttgggttgatttctgggataaaaagaagttttttaaagcttttttgaggttaatttgatggctagttgtggtgttgagcaagtttgagttcattaactcaaacttcgctcaacaatagtagtttttataattttgtgttataactgatgttatcacttggaatatgtttgttggaccttaattacgtgttccagatcttggattgagatttagaatagatttgacatgttttggaaaacttcagaagaaaacggcagactctgtcgttttctcagaaacggtctatcatttttgttggcagtaacccagaaaaacagtctgtcgtttttacagaaatggcctgctgtttgtcaggcaattttttttaaagtctttttttgtattttcttgatatttaaggtattaccacgctatttatcgatagagaacttctagttttgagtttaagtccccgataaggttttagcaagttatttacccgttttacgtaaatgtgacatatgatctctctttagtgagcgatattttcattcagtatgaccggaacacttgaacctaaaaacgagataacaatagaataagatgtatgtatatgtatatgtgtgcacgtgatatacatgtttatgttggtaaatatatgaattggtatcatagcaggtgcaaactatagtgtcaggtcaatagtgctagtatattgctggttttgactgatatattttaatttcataaagtattaattgacactgtcatagcggtgcaaacaatagtaccgggtcaatagtacaagtatagtacttgtgaagagtgataatatggtcaatggttcttttgggtatagactgatgctatcatagcagtataactatcgtgttgggtccgcagcgcgaccatagtactggtagtggctgatattatgatcaatcataccaaaggcaagaacgttcttgatttatctgtcaagccttgtagataggtgtatagacgcctagatgcatggtcgataatatgtttatatgttttatgcttttcttactgagtctatcaactcatagatttgcttacatgtgtaggtaaggtaaaggtgaaggctgagtagtagtgagtccagagcttgcaggtgattgtacatatcaggatggttaggctttggggtgttcggtttcgggacaacatgagtttttattttatttttacttggcgatactttcatgaaaaatgtattatgtataaacttttaaatgagatctcaaaaattatgtaaatttatgtatttattaaagttaaagcttaactttaaagttttaattgatcacgtttttcaagaaatttgattagtaaaggcatgcacaataattaaaaaatcattgtagagtgcctaagcaagtaggacgttacaatttagtattagagccgccaggttatttaccaaagaccgtcaagatatatacaatcatcattaaagacaaactcgactcacaatttagtaagtctttacttgtttaatttgtaatttaattgattagaaaaagcaagataggaagcatgttagtaaatgttagatgaatagtgcattgcctaaaattccatgtatgcagtagttggattgtatttgatcgctgtctgacctacctgacttatgggttcgcatgctagtcctatatataatatggatgcctaaagaaacaagagaaatcatggtaatatggttgagataggaggcattcggggaggtcaaaatcatcctcatcactgtggatgcggcagaagccgtggtagattacacagagggtgttatgaaaatccgctacaggctcctcaggactgggagcaaaggtttgcggagatgcaagcctgaattatccaacaagatggagagatccaaaggttaaggcaacagagtcctcttgttgtgcctcctcagcaagtgccccagaactaggagcaaagttttgtgactaaactataagtaattttttttaagtaaacattactctattcatttttgtcatttaataaaataaaaaaattaactcttaaaatttttatgtcgtgcctaattacttcaataagttaaggtgccaattgttactaatattcttacaacaatgtatttgttcaaatttcaaaaataaaaaaaaaataagaaaaaatgattttttttttctatttctacactttaaaacaatttttttt

SEQ ID NO: 309879 - DNA, 4087 bp, Cannabis indica
aagtaataaaatagaacaaaaaaatatgaggtaaatatagaaaatcactaagtgttacaaattcaactccaaaaaataaatagccactaaatatacatacatttaattttaatttttttattatatataaataaattaaaaataatatttttaatatatataaatataattagattagattagttttgaattcaattttgagatttacatccaatagctaatcaaattcaattggaattcaacttttaacatctaatcctaattagatatctgattttttataataggattaaattggatgagtttgattcaattgaattggattagatgttgcccctagctgaaaatattattttgctactaaattcaattggtagaggaattcggtagctaaaaataaaatgtattttgctactaaggaaaaattgtttaattggcatctaaagaaaaatatttcactacctgttataccgaaaattcggctaccatctcagtggaggacacgtgtcaagatatggaatacggatcgataaaataacttttaattgaataacccattaattgcataagtagtagagtatacttacaactcgctaactgtaaggtcttatgcgaggaagagatatacaaactgttatttagtgtattggagaaaccatatgtcattgaatgcataaagcgaggcattaacctcgttacatctgggaaggaaaaaacaacgcatatcgattgtgaaaacccttagtataaaatgcacaaactaagtctaacagtcaaagtggattcaataagcgaggcgttgatcccgttataggaaggctcattcctgtagcttccaccagttaactttagacatcttttcagtgagattcacaatcttgacgagtcagaagctaaacattcaaatgagcttcgagaaattctctgttaataagatctgcgactgttacaatgaagcgttaagatctcaagaaacaacgaggcgtatatcatcgacttcaggaagataggggagaaaagctccagctcgctatcaaggtcattggaaccaagtttctgtcaagacatcccagaacgctacaattgaagacgtgtttaaatacacgattattttgacccagtaaaagcgggaaaatcaaagctgtgtgatttttaaataattaccgcaattatactacgtgatatgttatcaatccccatgatttcaggggtaaatgttgtaaagattacaatcaactttgtaattaactacctactatatgattataaatagtggcatgtaaaatgaaaaaaagggacaaaaaaatcattcaagaaaagctctgaaaaactatcagaaatccaagaagattgactcgtgaactattctgaattttaaccgcaaaaccacgtaaaaaatcccttgtgttcatgtctcttacttcattgctttcatcttttctgtgtgaaattatcactattaggctcaaattttggttaacgaaaatatgcgttaacagtttggtgctttcattgagagcctttgttaaaaagctctgaaaaacccctcctttcttttaaagaaaaaccatctccttaaatgttaatacaccacacaagaagagctcagcgtgggatggccaaaaccctggaatgaaggatcaagagcccgatcgtggaggcactcagcttatgggacaagatacttatgaaacaaaaaattgccgccttagacgttgtctggaagaggcacagcggtagaacgctgaactagagcgtgatgcagccgcgactagggtagcacagaggaccaacactcaaaatcaacgtgaacctagagtgagaagatcactaggcaagccttgtggctcacgaactaggagacacgaaaatgcccgagaagaacaagctagggaaaatgagatacaacgtgaaaatcagaatgatcagccagaaccctctcacagaaatgagagtgggaggcaaccgaaaattgatgaacgagaaattcctcatgaaaatgaggaggatcttgggactcagcctagagagtgtaggtcacttgtgagaaattgcttgcgttcttcctgaacccattgagagatgacttgtacagaccttaatgagggaaatacgacaaaccacactcaggggaaaaacggtccgtgaagaagcaagtgtgacctcagggcggtcaaggacccacactcaagagaaaatacttgacgacctaatgatcgagaaagcatgggaaccagtaattccgcgagtcactcaaagacgaagtccatgggtaaaatgaggtttgtcaacaattactcccaaccggattcgcgagagcacttgaatcgaaagaaacctgaccttcgccaacaacttggtccaaaacaagaggaccctatccaatagtgaatagatgagttggaggacaagttcaggagatattaagtgggggaattagggagacaatctggatacgactcagacgaagagcttgagctgtatcacccagatatcatgaatacccttttcccttcaggatttaaaaacctgcatgtcacattgtatgacggaactaccgatctggtctcacatttgaacaactttaacacaataatgcgagaaagtaatgtgacaaacaatttatgttgtatcgtgttccccacctcgcttgttggagcagaaagcagctagtttaacaagtttactcaccattcaataatatcttgggaacagctgtccagggatttcaagaaacagttccaggctataagggatagatgacctgaagcggccttgctaacaaatataaagcaacaggctggccagacacttaaggcatacttaagtcattttagcatggctactgctagggttagaaatttggatggaatctttactcacccttcaaccgctaggggagagttgtgggacaacttacaaggtcgtccataagagagttcaatgaaagggctcaggtattcgctgaaaagaagaagcctgaaaagaaatgaatttgttgaaaataggctcaggaggcaaacctggaaatgttttgacaagtactgtctcaacgagaattgatatctaatgggcctctgctcgaagagaaaggacggttccaaggaaccatcaaaggataaaaagaaatagaaaaagtatgataagtatgtgccagtgtatactatttataccgagcttaatgaatgtcgggacaatatttaccttgcacatgagtaaagggttgcctttggtaagctcgacccatgaggaatgcgaggaacaaaagagatcctaacaggtattgtaatttccataaggatattaggcacacgatcgacgaatgtcaccaattgaaagataatatagaaagtctcatggctcgcggtcacttcaaagagtgcatgaagagacagggccatggacacaaccagcccagtctgcccaacaaccaggggttacatcctctccctgttgaaggtgaggacatccgggttatttcgggagggccacatatcgccatggagagcaaaaatgcccaaaaaagatatgtgaaagacataaagaacgagcagtcgacatttttcccaaaaccttctaagaagctgaaaactgacgaacccccaatcatattcatagaggaagatgagaagaatgtgagatatcctcacgttgatttgttggtgattactattcaactcaccaataaaagaataaagttttggaatatagtttaccaggatctagatttactaccatgtatgttatttagcatgaatttctaaaacaatgtaatttaaacacataaaagttatgagaaaccttacagtgggtgcagggaaattaaatgactccttccgctgagatctctaacccttgtatcatttctgtagcagagtatcaccaagatctaagcctgaaactccttccttgtgtttggattcttcacagtcttacacaatatgattgaggaccaacttgatgtgtgtgggcacttactcaatcactaatggctgaataatattttgtgaagaaaggcttagtgttttgaaaattcaagaggaagaagaagaagaaggaagaggtctcatcagaaagctaggttttt

SEQ ID NO: 309880 - DNA, 864 bp, Cannabis indica
ttatggcttatactaaacaattatgtttgtatttttttgtttacttttctaaatgaatttgtttgtatcttagtgaggaataatataagttaacagacaaggccgggggttacagggaagcaaaattttaccgatattaatataacgtaaagtaatttgtggtataaataattaagtttaattttctgttaaagatatatatttatatttaattttttaacgataataatacttatatttgtaaaacttatgtagggtaagtggtcgttaagtgtaaagtagtacctacgaaagttctaaaaatataacttaagtattaatattgttaataattaaacttaggtatttatttgcaaccgatagttaaaattagttatttatgccttaaattactctattttgtaaaatttttgtttgagaaaaatatttcatttttccacaaaaaaaaaattattttttttatttttttaggctaattagcagtttttctcctgaactttgacatgtcctaaatcaggtctacttaacttttttggccgttaaaaattctccttgaactattaagattgttaaaattaaggacttttgtctaattttagtaaaaaaaattctaacatgaatgaaagttcaggggtatgatttagtacatatcaaagtttgataggtatgatttggtagatatcaaagtctagggagcatggtttagtacataaacaatcactgaaacagtaaaattgaatgaaattagacaaaagtccttaaatctaaaaatctcaatagtttagggggaatttttaacggcaaaaaaaaattcaggggcatgatttggtatatgttaaagtttagggggaaaaattactaatt

SEQ ID NO: 309881 - DNA, 3544 bp, Cannabis indica
cacttcttgggattgagtttcattccctagaactgggtttgccaaccattccgagtaatacccatcgcgaataaagatgtttgacagcatttaatccacctctttttctagggcgttagactttactggatctagcagatgccttttttgttgcactgggggcatgtccaagttaacattcaagatgtgagtgattacatagggacttatcctggccatgaccccatgacaccatgcaaacacgtctgcagatgccttgatggtgtcaataatcttgctttgttcttctagattgagactctcgtctaggcaaataactttagttgggtcctgatcgcatatcctcacctctttaatatcttccatcgactctaaagccgtttcaaaaccaatgcaaagatccaactcgtcttgccccaccgatgatcagatgtattgcaacattataacactatctcgcctctccttggttattccaaactgttcctattctagcctcctgtgtgggaaacttaaggcacgtgattgctttgaagtcgattagggctagttggcccaggatggcattgtaagcggtggggaaatctaccaccataaaggtgcaatacttgaacgtgctttgtggggtgtccggacatagggtgacagggagtctaaccttttccatagggatgagtgtagtcccgttaaatctcgtgagttgtgagccactaggggaaaggtctctgtcagtgagtttgatggctgtgtaagcctctttgaacaacaagttcactaaacttttattgtctaccagtattcttgccacaactttgtttgcgatgggggtctcaatgactaaggggtcgtgatgcgggaaatgtactggcttagcatcctcctgggtgaaggtgatgggttgatccataagtcttggtcattgagcggggagtttagtaatttcccatacctcaccctcatgctccaaagccctagcataacactttagctcattcctcatggttccctctatgtgaggacaccctgagatcgtgcgaccgttccatttgtctagggaggttgttaaggtacctactggatggggcgtacccccaggaggtatctatccgttccactgttattgtcggtcccccttgaggtgcttggatcccagtttgtcttgggttcagatgtggcaatctatttttgatccactcatacatgtggcccaattgaattaaactttcaatttcatccttcaaattttgcacttgttagtggtgtgactgttatcgttgtgatagtcgcaccttttactaggatctctccaggaactgtctctgtacaaaggaagaggtttctagtaatgagtattttgtcaggttgtgaagcatacttgttcctgagtatctacaagctccgtgtattgcttatactgaggcatatatcatctccttttcctcttgtcctcaggtcgtgtgctaccctaggaggatctgttgctctgagaactttggggtgctcttgccatactcgtggctggtgcggactgagctgggatttgcgcgttcatctcagagagattatttgcaggcattcccaagttcgactgagctagagcaagagtgaggttttgagtatatctttgagttactgtactttgcttgtctggggtatgatgaggaggacaagtccatgaagctgtgtccctagcatgtatcttggccctccagttaaataatacctgccataggccactatttgtgcttcttccaagttgatgtatttttggaccctcttttgaaagtcttggagactggccgccccttcttgctacaactcgttccaaaaaggagtttcggtctagatcctagcttggagtagtgctagctgctgtccatcgtcaacttttttggtttttgaagcctcttctttgaatctcattatgaagttctttagggtttttgttggtaattgcttgatgttagtgagggcactcacctcaaggttaattttccttgttgccacgaactgtcgtctaaagctgacttgcaacttgttccaacaatctacggatcccgtttctaacttcttgaaccattcctcggcagatcctcccaatgttaacaacataaatacttcacgtcattattgaccctcatgaccgtcattacttagttgaatcaggacagatggtcaatggggtctatgtctcctgcgtatattgttatctcgggcattttgaaatttttaggcagttttgcctccaggatgttcctagcgcagggttcccgatcttcacagtcagactctgagtcatcccctttttgccttcgtgaaaccttagcaatatcttttcagaggattactaattcaggcaaaatcccttcgtttttaaggctccctccaacactggtattgcttgcttctttttctctaagtgattcatgaggtcaccgtgtttattattaagcttctatcttaggtctacaggggatgctgcgactctttctacctctttccccaggtttatgatgcacatagatgcttttttggtcctctcgatcctgagggccagtgctcactctagggagcctgcccctttgcggacctttccctttcaaaaaatcagagcggactttttgcgaaccctgagcctttttcttcttttcagggaaagatgtaggatttttctttgggcacccctctgagggatatcggatagggcttggttccctattcttatgtatttgggtacttggcggggactcttcgtgtgcttctcctggtcctagaggcatggcctttggatgtacgtggattccggccatttccatagctttcttcatggcggccattatctcttgcatccttctattttgttcaatctgtgcggccagttcgtcctcatgatcagccgccttttgcctcagagccagtagttcagtataactgccatcatcataagcatcatacccttcttgattttcttcatattcattgtcatttgtttcatcttgctcttctgtgtctacatttactcgtgaagttgcttcttcgtcacttggattctagggatcttaaggggacgaggttggcgtgtatggttcctagttttcaccattgtaccttgaatcccctattgtcgttttttgagtaaagcttcctatagctctcaatgaaagcaaaatattgaccgagattttcagtaactagatctttaatgtaatactaatagcttaggaagagttaatgcaaacatttttatgtgcttagggtattaatgagccttagtccacgagtctttgttattgaataggtgggtatttattacagagaatatttttttgttctttatttcgatcccctcatttaatttcgttgagggtatttatagcaattgtaaggaagaagaaaggtcccaattgtactaagtgccaactttggcatgcacaagttcccaaatctacgaaatagggcatgcataccctatgtagtaggctgcctagggtttaggtgggattagccctcatcctttctgttggatattattttaccaggatct

SEQ ID NO: 309882 - DNA, 684 bp, Cannabis indica
aaaaattaaaaacaaccatagttgaagtgagatatttaatggcaaaaatttttcattactccaagagattcgatgaacgaaggctcaaagctgaataaagcaaacaagggtgttgcagacactagcgcctgcagacccgatcgtacacccgggcgtgtagagccctacggacacttgagcatgctaacccctatgggtgcccaacccaactcatatccaaaccatcaatacgttgcttacaaaggtaccaaatattagattgttctctttgcgatcactttgtacacgaagcctttagagttcacgtataagtaattcttcacccgtctttcaaagaagttggaaagttatgtactcaagcttattcaaggaaatatacatcttcttagtcattatttttctccataagtttccaagtttacaaatctaaagcttgatcattttcctttgatttcatagttatactttaatttctcaatgtagctttgttgatgagttctccgtcaacaaatttatttatttatatatatattataataataatttttaataaaattgaaatgccttaatcaattttaaagtgcaaatataatactcattttgatatactttttatttaggaaaattatctcatataatatttttttaatttttttttaaatttacggtttgagtttctaaagt

SEQ ID NO: 309883 - DNA, 642 bp, Cannabis indica
aattatttttattttgagatttttgtatttcacaaattgtcagagatctcagggttatggtttcaacaaaatcgtggcccaaatctcgactcttcggcgctcccatcttggttttgtggaggatgaagacaatgattctttattttgggagaattctctatagcgacggtttaaaaccgtgagctatactataggtcacagtttaaaatcgtctgctatattacagtcgacagttttaaactatggcctatagtattgactatagacgatagttttcacaactcttgagaatttttttccttaaaatttctccatcgtcgcctattctattgagtatttgcaacactcatataggtgacgattttatagatcgtcaagaattctttaccagattgtataaaaccgtcaagaatttcgggttttttagttgtgcatgcttctagatgagactaagagtatactacgttacgaaaatctccctcataccataaatctaaaactttaaaatttctatatttaggaaaagctagaagattatgttggattaaaatcctatgtgggcacatatgtataatgtatatcctattataaagtgtgatacaaaattaagtgaccaattatgttatgggtatcaaaagggta

SEQ ID NO: 309884 - DNA, 628 bp, Cannabis indica
taaaataatttccaacagtatttactccaagatcttcatattgatcaacctacaccagcattcatctactacgacaaccaatcgacaatacacattgcacataatcccacatttcacgaacgcacaaagcacatcgaattagactgccacttcattcctgaaaaaattgccaaatcagccatacacctcattcccgttagcagtaaccttcagctcgcaaatgcatttaccaagcctctcccctccaccatcctcacttcacacttatccaagatggccattcatgacatctatggtccatcttgagggggtaacaagattataccggttagtgtatacaccagctagtgtgttctattagtgttctgttatggttgttgagttgttgtctttaattagttatttccgtttctgttgttcctggttttatggtgttccttgttttgtggaatcctgttttcattctctactactagtctataggcttaattcctcttgtacaattaatgcaatttcattcaataaagacactttattgttttccatttcttccgcaatattaagaacttagcatctacatttaagaacctagcatctacatgttggaagttattttaccaggatctta

SEQ ID NO: 309885 - DNA, 937 bp, Cannabis indica
tggcttgatcttcttcttctatcttgaaacctatatgttattcaagtcaagaacaattttgttaaattcatccaagtgacttctcaattccttgctctcatccatcttcatggcataaagtttctttttcaagtacagcttacaagccaaggatttctttaagtaaatggaggcaagtttgatccacaatcttgaagtcgttgctttatctaagacctctctcaaaactttatccccaagactcaaaaggatggcactatgagccttcgactcaatatctctcttaatcttttcatctataatttttgcaagttgagtaggatcaattgctttagatatacccttatgaaaaagtaatgctttcatcttgattcgccataaactgaagtcatttgtccctgtgaacttatccacttcgaaccttgctgatgacattttcaagttaagttctttgaatcttacaacagtttttgaatgttaagcttcttcttcaccaagctctgatacaatttgtggtgatctcgattcacatcatccaagaacacacaacaaagaacatcaaacaattaccagaattaaaaatataatctaaaaccaacaatgtaaaataaagcaatcacatgaactacatatgaaactaaatggcaagaatgttaaaaactttaatgaacacctttatttaacgaggttcgaacaccaaaccaataagacttgtgcctacatccccgggaaacaatagctcatgaatatttattgataaatcaaaaacagtgattatagattgatcactcaagaaggagacttgctcctgaactctctcactcaatctaatctcaccccctctctctcaaatctgttctggtagttatcttcaaacaaggacttaatcaattgtatatatagagctagaattgacataagtgttgggttttatgcc

SEQ ID NO: 309886 - DNA, 1044 bp, Cannabis indica
ttgaagcggggacgttacaggttttatattctgttttttgggggtttcgtggcttaagtagtggtgctttgttattagttgttgggatttttgggttgtattgtgatgtttattttgtttgggtctgagtgctaggggttgctctacttctggttctcgtttgttggaagcctcgagccatgattggagttgcctagaactgtagaggttcgagaaattcctctgcagttctttaaataaaagccctagttcggtcgtggtttctagatttccagtttcttagggaacttgaatttgatactaccttgctggtacgtatcctaaacaatttacattttcatttcaatatagttgttccttctgtcggtactgctgggggaattcttatggcctggaagtctggttttatctttgaagtgtgagggttactttgaaccagatgtctgacactgattactctaacccgaatcacaactcgtgtcttctttcatgcgtgtatggacttctatattttcataagaagaaagagttctggtctgatatgatgaacttgggtgatttttttggaggtccgtggttgatacttgaggacgccaattttgttatgacggacttggatcaggttggtagtaggggtaaggatcaatttgcccggtttatctctaatttggttaatgcctacgatttaattgaactttttgttaaaggagatcttttcacttgggataatcatagagatggtagttaccatatcaaggccctaaattaagggttggctaatgtcaccctggtaaagccaacgtggttgccgatgcctttgactagaaaggggcagagtcagatgaatactgtgaaacaaatctcccaacagttagcaaatgagatgacccaagctaatatcgaactggttgtagggcaattggctaatatcaccttgcaatctactcttttagagcgaaccagagaagcacaattgcaagatccagagttagtgaaatctcgagatagggtttcggctgggaagactggtgactttatagtgga

SEQ ID NO: 309887 - DNA, 1026 bp, Cannabis indica
ttttctgcataactaaccaagttttgtaattttcaggatcatcaagaaactcctcttgtgcttcatcaatcaattccataggatatcatcaacatcattaaacttgaaatcatctaaccctcgcttccctaaccgatttgggtcactagttgatcgctctccgtgacaataccatgtagtgtagcttctattgaaaccacgacaaattacgtgatcctttatcatcgtaatattcccttttatactgttacaacaatctacacacagataagaaattcgttcgtgattactagaattttttagggcaaatgctagaaatttgttgaaccgatctataaattgcggtgtttctctcctcttaagcatccacgatttatccataccgcaaatttaaaacaaaatcctaacaagtagatttaaaataacttaaattaaaatatttatccaaattctaccaaaaatttggcaacataacaactaaaaatcgaacgttccaaaaaaaaaggaacaatccacccatccgaccgcagttcatgtactcgcagaacctacttcactacagatgaatatttaagatattcaaactcctctaacatgtttattaattaataattaattaaaagatagaaaaattatacctttagctcaacatttggaaaaaatcgtgttctcccgtcaatttagatccttgattcttaacgacaaaacctacaaacaaatacaattattaaaaaaattcatagaaaagaaattgttactagttagaaaattcatgtatatctactatacattttgtatttaaaattagtccaacataataatttaattataaatttatgtatattacatatagtacagactattacggtactacctaacaaatttaaacatagaaactaattttaatttacagactggttgtgctttttgacataatagttttcaatagttttggtattcatcccaagctgtgcaatcccacattgcctgggaaggtcaagtgggatgattctgagactgtgtagg

SEQ ID NO: 309888 - DNA, 798 bp, Cannabis indica
aaaataatttccaacagaaccatgctgagttaaatcagtaatggtataattttgccttaggtgtgaacaaataggtatgacagccgagagagggggtaggatatctggtgtaacatggttgacaatagtgtcatgcaacttctcatagggaaaagaaaattcatcaaacacaacatccctagaaatgtacaatcgacccttggaatctaagcatttgtatcctttatgattgagactataccctaaaaaggtgcatggggcagacctgaactcaagtttgtgtttgttgtaaggtctaatatttggatagcatttgcaaccaaatgttctaaaagttgagtaatcgggtttagtgttaaacaaggtttccaaaggtgatttgttttgtaataagggtgtagggagtttgttatggatgtaaacagctgcccgaaatgcctcatcccaaaacttgagaggcaatgaggcttgagcaagaagagcaagaccattttcaacaatatgtctatgctttctctcagccaagccattttgttggtgagtggtaggacaaggatgtctatggtgaaattccattagcagctaaaaaacttgtgaatgaccattactcacctccccaatcagtttgtaaagttttaatggactttcctaactgtaattcagcttcagatttgaagtgttgaaaggttttaagagcatcagatttgtttttcaacaagtataaccaggtaaacctagaatatgcatccacaaagtgaatgtaatacttgtatccattgaaagatggggtgtgagaag

SEQ ID NO: 309889 - DNA, 1069 bp, Cannabis indica
agaattggtcaagtgtttgccagtctaaggataaggccatgctttctaaacaagcatggagaatttttcaataccctaactctttgttaagtagagttgttaaagccagatatttccctacttcttctattcttgaggcagttctcggtcataggccttccttttcttggagaagcattctatggggatgtgcattgtttaagcagggccttatttggaaggtgggtaatgggttgagtattcgtacacttgaggatcattggcttcctggcagccggtttaaaacctatttcacttctaaccctccctctcagtttctttctttctttatttccccttctgggaattgggatagaagaaagttgaacaatttttttgatagtactttggtggaggatatattgtaggttcctatttctggtcacaattgtaatgatactatgatttggggcccagatgtgaccgggctctttacagtcaagactgcttaccacctagctctccagtctcgtgatatgcccacctcctcctcctttgtttcaaataaatccttttggtccaaaatctggaccttagcagcgccacctaaaattaagcatctcatttggcgtactatctctcattctctccctatcgcatcttctctattttttagacatattattcctactcccctttgcccagtttgccagttgcaatcggagactgttgaacatggtatccttgggtgtaatcatgctagaaaagcttggaaatagtcaaagttctttaatttttacaataataataaggatagatcattttgcttgtttgtggccactgctttagatgtttacgctaaatctgatttggctttgttgttctgttttatttggtccatttggaattagaaaaacaacttatttcaccaaaaaataggactctcttcgtaccagctttttgattatgctgttaactatttgcatgaatatttagatgccaatgctaaatagatggttttgactcctcctgtcccgcgtctgaatcggcgagaagtccagctccctgctggtcagtggatagtctatac

SEQ ID NO: 309890 - DNA, 1005 bp, Cannabis indica
aaatataaagtaccaaataggaatattctctaaaacgtaaaacataaattaataaaataagaaaactatggcattgcatgtcattcatatatattccatgcataatatttttttaaaaaaaagacgagttccttccttgaccaagaagattcttcctccaaacaagaaaaatggtttccttgactaaaatttataaatattatgtgtacgatatcatattagatatttgtgtgcccttttcgcttttttattaacttttctcactcgtaacatgagactcgggagaaacccggtcttagtctaaaacccttcatttcttcttactacctatgaaaaaagtgcactgcaagtggtggccaaaaagaaagtcaaagaaatggatatcatgggaggcattacatgataatcaaccaccccaatactgtgtttcagctatctatattattatataagcagctaccataatctctttcataaaaagtctcaaatcctagctaagtacggtttacaaaacatgcaagacgccatagctaactatatcttagtttttcttctctttacactttccactgccattaatcaaacaccaaacactcctacagattatcttttccttgattgtggctcatcatcatcatcttcttctaataatcaccaaactgatactcaaggccgtctctgggcaagcgacccagactcaaaacactattattactcttcatcatcaccaaacatagaagacgtatcatcaaaatccattgccaaagaacaagacttttctgttccccaagtcccttacaagacagctcgaatctttctctccaaattcacctactcatttctcttaaccccaggaccaaagtttctccgtctttacttctattcagccacctactccaataacctcaataaatccgattcattcttctctgtcactgccaataatttcattcttctaaacatttcagcgtttacctcactgcttattcagctatcaaaatccac

SEQ ID NO: 309891 - DNA, 631 bp, Cannabis indica
aaaatataaaatataaaatttagacaaaaaaattatttttgaaaatagaaaataacacattttgatttgaaaaatttggccaaatgacccctatcagtttttaaatattattttatatttttaaaaattgaaaataattttaaagttatgaagccaaatagtctctttatatgtaagaaagagtaacatgatcactaagctgcttgaaatgggctgagaggcgagggtgcgccattaaggctcgacgagaagcgcttgggtcattggcacaacatttgtgctcgatcgatgacttttggaatgcatcatcattcaccatgcctagctaggcttttggattttccttttatttaaggtgtttatcaagattttttggttttagttttggattgttttttttagaggttttagaatggagtgagtttagggttcttgagttgacgatggtcatggattatgaacaagcataaaccagatttgaaatgattatttttttagttgctatttaattttcgattatatgtattaatggttggtttggtaataaaaatgtgtaataaaattttttgttattaagattaaatttttgttcagtgtttaattataaatttaaaaccttattattctttaa

SEQ ID NO: 309892 - DNA, 1109 bp, Cannabis indica
agttgcggtaaattcaaagaaggagtctttatttgtgtaagtcaatttggttttgtaaacacttaagattcatttaataaatttcattcttttggcgtggccccgtggattaggagcaacttgaaagagttgctgataccacgcataaaatgtcgtgtgccattttaattttcctgcatttttacgtgctacagtatatttctgttctgtcagattttgtgtttgattgaacatagataaattctgttcaaacaattttattacagttccgtgttatttaaattgttcgataatttcacttggtaattataaaaaatgaaatttcaattatttctaaaaaaaataaaaaatatatatatattgatcatagataaatgtacttatgtacttctttaatgtgttcgatatttaaatagttataatcttatatatatattatatgatgtagttatttaaaatatcctgtaaaattttaaaaaatttgaaatagtttgcaatacagattgtagggtttaaataattttttttcacatacatataaaataaaagaaacacatgtacaacatactatttgaactttattttgacaagttcaatattatgttttttaaaaaatttacaagatgctttaaataattataatgtataatgtcatataaaaaataagattaaaattatcttaattaaaataaaaaatattaaaagatacacctatttatgaggggtgcaccataaattttttatattttgtaggaaattctatagtgcactctccgaaaagaatattttggtactccacttgtctgtttcaacatttacgagagctttttagtctaatttttttttttgtcataatcgtatatgtcctagcaggcccggctctaatggtgtgcaggcagacctactgcacaggcccacgcaagaaaagggcccaattttgttaattttttttttctaaaaaaaaaaaaaactgacttggtcagaattccaatttccaattccttggtcttatctctctccatcttctccctcccaacaaaacctcattaatttttaacctttcaaatatttttttattttttttataaaccaagtattagtcaattaat

SEQ ID NO: 309893 - DNA, 987 bp, Cannabis indica
tctctttctctctttttctctctcttcaaaacacaaaaagaaaacccacaaaccaccatcaccaccactctccgatgacccctctccggccacaatctagccgcacaagctggaccacttgaacctccaggtggtggtgacctgaacccccaagcgggaccgcttctttcaccgtcgttagctcgggaacgcaagccaaagtttggcggttcaaactttgaaccgattctccggtcacctccagtgtccgtttgactagccgttttcaccactagactcagctcgacgaggagaacaacctacactaagctatttttcccagctcactactttttccggtgatactttggtagctctacccctttttggcaactttctggcgatatcgtgtaccgttttgacaaatggttggcatgggtgtgatctactcgtcgaggtggttattttgatatatactacccctatttttggcgacgtttctggtacaacaatttttaccgctactgatagttgatgtgcacagcttaggtgaggcttcggacccccaaattttaaatatagtcatattatatgtcgttggactcgactttaaatgtagaatgcgatgatgataattatttaaccatttgatggtataggtgagagtaatatttaagattggactaaataattggagctcgggacttgagagcttaagatcgtgttttggacaaagtttaacaacttaggagaggtagggactcaacttgattattggactcaatttttatatgtgttgtataacattagacatattctaaatttttatgatttgcaaattgtacgaaaaattaaaacttaatcaacatatttttgtacaaatatttatgcaggttatgatttttgggtttatccaaaatacagtcgttatgttgctgaattttctaaaaaaataaaaggaatatgtcttttgttatgcttattaattgtctgctttggttatactga

SEQ ID NO: 309894 - DNA, 1893 bp, Cannabis indica
tcataagttgatcctagatcacatgatcgaaatcctgatacggttaggctcaatttcaagagtattattcgtgttctttgatttgttagttaagccaaatttttggtcagggcaatacatccatttttgtcatgccaacgtgcaaagtacttcaacttgcatttatttttcttgattcttatgccttcgtatactttatgtttccttttgacagtcttgttttttttcgtggcaaaatgtctcagaagatgattgaggctatgaagaagagagtagggggagttcgagcgtgtcccctccggccaagaagtctaaaggtggcgagactccatccaaggagaaggcacaagttgaagaggtcattgatctctctgaggagcaactcgctatggatccttctaccttgaaggtcgccaaatccaaaggttcccgaggagggagttcggatggtcttgagaagactagatcaaaggtagtgaggggcggatttaaacaagttagggtccctggcccacctctggtattgtgcacggagaacaagagaggcgaagacatgcttaaccactatgtgactcggtcgctccaggaggtgaaagaacagttgactggggcggacaatgatttgtccttggagcttgtcttaggaggagttttgaaggaactttaatgagtaagtctgctttaacacttccctttcgttctcctttggataatttagatttaattgtattttcggcatagactggtgtgaagatggcctatgcctattcccaagctaagtcggctggtgtgaagaaccttgccacttccaacacaatgcgaagggaagtggacttggccaaaaaggatgttgaagatgcgctgacccaactcgagactgtgcggacagaacttggagaggtcaataaaaaagtcctcactgctgagactaaagttaccgagctgaccaaggagctgcaggacatgccgtcaacctagcagcttgaggcagataatgcttctttgtctcaggatattgctcctctccaagacttaagagagggtctctggactcttcttcgcaggttggaagatgagcttatggacaaaaagaccagggaggaggaacttgaggctgaggttaagagccagaaatccgaggtagagaagctcgggaagaaagtggatgccttggaaagagatggtcttgagattttttatgacttttggaaggccaatcccaaagcaaattttgaatatcttggcacgtctaaagacatgtttctcgactactgcatggctaaggcggccaatgagaatcctgaggcgaccacttccacttctcctaccgatgacagtgttgaggccccttccgcccagaccgatgatcctccggcccccttggacccagctaacccgtacaaagagcctgggactcctgctgtttaattgccttctttttactatctttttttattatatatatatgtctgttcaaccaataggccttcttttgagacaaagtgaacggccaagcggtctttaaacttggaatatttttcattttttagaacaactagctgactgggcagccgttaatcccaggtttgaatgctttattattcttaatgaatttcattccttgtttataatcattgtgcaattgtgctggttttgttcttttttatgtttgttattttgtttttacaaaatgctttgtacaggtataggtgccccccaagtgaccaagcagacttttgactcttggttacttgttcttcacaagtatgctttttgtctattcaaagctttgggtatgagcagaccttttgtacgcatttaatggtaaatttataacatgctaatgaacttgactcaatttgaattgaaataaacatctttattcatttattg

SEQ ID NO: 309895 - DNA, 3369 bp, Cannabis indica
aaaaaaaaaaaaaaatcactcctactcttgcaataaactatttgagctatattttaaaaaaatttcaaaatttctataaatttaactataagagtggtcttgcatatatgatgatattgagcattgtctgcccgtgtgctctgtggcagttagtagttgttttttcattttaaccatctcttgccagtttccaacttctttctttgcatttaactgttcctcccctgttttatttcaaatttcctggttttgttcaagttttttctggtttgtttctgtcttccaacttccttaacctctaattttcactatggaatccttcctctatgatgtttctactgctcttactgaaagggaaagggctgtggtaccaattaataacatttctgccccaccaattggcattactaaggctcgtgttctctgtcgagtttactctaaaaggggtttcaatcctaatcaactcaaaaacttcctacttaagcattggttgggtcggtttgctgttacaatttcagattatgactctgaatcttacatggttacttttggttgtgagggagatatgagaagggttttatccaaagaaccttggcactttcataatcaacatttaatcttatgtcctccgagtgttcttctatctgactctgtaacttcatacaccaccactcccttttgggttcaagtttttagattgccttttcttagcaaatctgaggctcttgcaaaaataattggcaatctcattggagaatatcttgaggttcataatgattctcttaatgaggggtggggtccttttttaaggattcgggtaggtttggatgtatcaaagccgcttttaaggggtcaaatggtttcacttccatggatgcgtgatgaactttggattgaatatcgttatgagaggttgccgaatttttgttatgaatgtggtattattggccatgtttatgataactgtacactttatatggagaagttggatgagggtattgaacctggacttgaatatggtccctggatggtagggtctgcattaccaagatcaagctatgatcgttatcgacaagatttttccaaatcaggatcgtggccttttatcactagacttgctaggaacaccatcaacccaattatttctcatccttctcaacaccagcgatccctcctactgtgacaagccgtgagaagtgttctatccttgaggtttctgcaccagtaacaaatggaagttctcaccaacagacagtacttcacaccaccagtgcaggtagtctgaaatcccctcaaatgaattcactttcttcatcaactatcaatggtgaggaaggaattgcacctgtaatttctacacctgttaagtcgggtgctctgcaacatcaatctcccataactatcacgagtaccaatcccacacaattcactccaaattccaagcaacctccactcacttccagtgcaatatgcaaatcaagcacagttgttaagcagcaatttttacaaaatgatcatggggtgctggacaatatcaaaggcaaaggaattgttgatgatgttcctcaacagttacatagcacttttcagcaatctccatatgggggccaagctagttcttcttctaagacaatttttatgaaagaaaccaatgaatatcctcctggttatctacccaagaggacagtagctttacctgtggcaacccctccggcgtatttacatcatcttacctctgctagtaccactattccaccatcaaaagctgtcaaggtaactccttctatggcttcctctgtcactccaaatttggctacacttggtgctgaaattgctactgagaactctcccttaactgccaagaacccttgtacgtttaccaaacatcaaatgatcaaccaaggaggtaatgttaggcaagtgttgaagagatgtcgcacaagagataccacattgaccgatattactaatacaccccagcgtcaactacctgaacccatttctgaattggctgccatttcactagtggaggaggatggtgatgtttctttggcgaaggctgtgtcccagcctcgccaatcaccatgaatttaattagctggaatgctcggggtttgggcagcccccgtgcatttcgaaaactttgtttgctcatttctaagcatttacctgatgtactttttattatggaatcaaagcttagtataggtgctatttctaaatttcgtactgcttttaattttcctaatgggatagaagttcctagggtgggactttaatgttgctttggaaagcaaatgtaaatgtaaatgttcttaactttggtataaactttgttgattgctacattacgactactgatggtcttttatttcatttcttgggtttttatggagctcgtgcaacttcccaaagacatttcacttggcaagttttgaaaaggctaaaagatactgctccattgatgccttggattgcaatgggtgattttaatgaagttcttactcatgttattaagcttggaggacctgctctatgtgatacacaaattgatcagtttcgaaatacagtggactattgtggtctccatgatctccccttttctggtgcaagatatacatggcataacaattgtgtgaatggtacaaatgtaaaagagagacttgattatgctttcattaataatgcatggcctcatttatttggagctacagaggtttcacacttggatttcttcaaatctgaccaccgtgccctacttctttccttaaatcatgttgcaccagcagtaagtcaaaggttcaaatcaaggtttcattttgaagctttatggctaaaggaagaagaagcttcagatattattctaaaaaactgggttacttcaatagctgaccccatccttcagattgctaataatctctcagcttgctccttccatctacagacttggcatagaaggaagtatggagaattacctcgacagattaatagcacataagataaggtttctgctcttcagaactcatatgcaacaacttttgaacactttgaagagctcaaacattgtgaaaatatccttgatgagttgctagcacaagaataagactattggaagcaacgatctcgtatgaattggttgaaatcgggtgactcaaatacaaagttttttcatcaaaaagctaataaccgtaaaaagaacaacaccattaagaagcttattgatgaacatggtgtggaacacactataagaatatttttatttaaggaaatatatttctatttaaagaaataaatttctatttcaggaaataaataaataattgattttctaataaatgaatataaaaatattcattgaatctggacaaa

SEQ ID NO: 309896 - DNA, 1490 bp, Cannabis indica
ttaagtcctatttttgctattattttatcattttggtattccatataattcaatcctaaccataagtgtattagtataaaaagagaagaatagtctcgtaatctaactaatgcttctaaatctagttttcattttgtcagacagtttgagacttcttcttcttcttttctctctactattttgaaatcctatagtctacttcaccattaaaattggagccttagtgattgagtgcatgcctacccatagcaagttagtcctcaatcatagtgcgtaagactgtgaagaatccaaacaattaaaggggtgtcgggctcagatcttgattatactctacgatagaaaggaacaagggttgaagatctgagcggaaggagtcatttaattctgctgcaaccaatgtaaggtttctcatactttatatgtttttaatttttatcattttagagattcatatataggatgttaaaaacatactagttagtaactctaggtcctggtaaaatatattccgaccgtaagtttatcctagcatcaacgccaccaacaaagaaagaattgtgcacgaacctccaaggtcctggccggacctatagctggctcgccaggggagataagcctctatagcgggcaacccatcaacatggctggccggccaagcttacaaatacacttcaacacttgtgtttttccataagccatccaaatcatcttcatcattcctacgacttcgaaacagttcaaactgcccacaattctagggattcaacgccaggatgtaacaaccctattccttagagattattaattatttattttgtgtttcaaatatgcatgtaactttcctattttaaagagatagttttatattcgttatacgcaacacttgtaagccctaacactatataaagggaaagatatgcacgttcaagactggaagcctcaagtacgctcaagacttggacctaaatcctaagtctcaatcatgctcagaagcactaaatcctagagtcatctctcttttttcatacttttcacctacaaaacacattctcattgtaatactgaagagagctcacagttagaaattacaaggtttcagcctgtaatttgcttagtataatctcaagagtgaatacaactaaaaagggcgtaggtcattacctgaacaaaggggctaaacctttataaatctttgtctctatattaattattattccgtacgtgacaatcataagcgaaatttgatcctagtcaaactccgcgtcggttggctaaatccacagtcaacagttagctaaatgtattttaaattataagttacataatataacttaaaaataactgattaattattaagacgtatacaaacaagtttgggaggtaacaaaaatatattttaaattatatgatacaaaaataattttttttatgtaaaggtaactaattagttgcttatcaacactgttagtaaccaaaaagttactttt

SEQ ID NO: 309897 - DNA, 509 bp, Cannabis indica
atttaattcttgcgcaattacatcaaagatgttattcagatagaagtaattgaataattacgatcagcatttaaccatgaaactcgagttaagtcatgagcaacgcgattggcagtggtgttatctttttatgaatagatgtttgttgtataaatcataaatatattgtcaatatgcatatatggtttcatgtatgtatcaataattgaaatgttttttagtggaaacatatattggtttattttaatgtatcaactttaattcttgatttgctttgttaacttatttcgttttaagtgatattaacacctttcatacatgttaactcctcacccattaagtgtatgacaccttgtccatcctttctagttcatattaagagcatgggggattgtgtttttgatagtctgaaatgttggtcaatggggctgcaaactggtttcgctttactaaaatcaaacatgtccagaataatcttagagatgtatccttcttgagatatagttttt

SEQ ID NO: 309898 - DNA, 740 bp, Cannabis indica
atacgagtttttaagttttttttatgacattcattcttatgtatattgatttatcctatatttttaagtttatttttttttctaaaaaaaaaatatgtcatatttagcactattaagtttgcatgtcatatatatcaaaaaaaattttcccatattttttaaaataatcctttattaatttaatagatctataattaaattttttaccaaaacttttaatttagttgagagttgagactacctgaagcctatcaatatgcgacggagtttgatgaaaagaaaatatcatctgtttgcaaataataaaaaaaattaggtggcgtttggtaacacttttagttttaaattttttaatcaaaaaacaaaataaattttttctttttaaaatattttatttttgaaaaacaaaaagggatattagcgggaatactacctaaactacacatttagttacacttagcccacggacccaatttttggtagtaaaatcttctgaaccttaattctgttttgctatttactttttcatctaaaaaattatgttaagtgccaaggtggactttacaagtatcacagtgtacacgtgacagaattctaatggtccacataatattaattatttaaatattataaaattatttcaaaaaatatataaaaaaaacatgtaaaaataaaagcatgaataaaaattaaaaatagacaatttatttttttctctcttatttttttctttatttttt

SEQ ID NO: 309899 - DNA, 545 bp, Cannabis indica
gatttctgggaaatgactttggctaagactatcacatgttgtatatgtcctctcttatttgtgttttgttacctctttttcttctattttacaatcgacctcatggttgagagatttcttagaatatgagacggcttttgttcccacgttctgtttcttttatttttcctctgccttcgctgcttttgagatacttgcacccgatgtttgcctaggagaatccttggaattttcatctttggcaaacatcaggaaatgtctacctctacgtccggagccaaatcttcccgaaaaggggcgattacgttggccaccctgaaagaagtgatgacgggccttgtcgtccaagagaaatacacgtgtcgatccaacagttgggaggcagatgagcttcgctcaaccttaacctgcgctcatcagtcggagaagatcgtgactgtggctggtatcaagccgtccgcttctcgagtttttcaccgcttggctcgagatgaagagacgcccaatcacaactatggtggttttggagtttggagccagaccca

SEQ ID NO: 309900 - DNA, 1389 bp, Cannabis indica
gcataaaacccaacaaatgcatgatcataatattatttgaaattagtcttccaagtaaaaaagcactttgcatattggatatgacattcagcaaagccatctttaatttattcgccaaaacttttgaaattatcttataaagaacattgcaaagcaaaatagggcaaagatcactcatatactctggtaattttttcttaggaatcaacacaatgtttgtttgatttaaagaactaggaaaaaagccagtagcaaaaaaagagcataccaactcaacaatgtcatcaccaactatattccaacacttttggtaaaacccagagtcattccatcgggacctgacgctttatcgggatgtaccttgataacggaggcccaaaatacaatgttgatcgaggaggttactagggaggatattgaatattcatattattttaatttaataactctaattgctggcctcaagttagcacataaagtacaggcagattacttgatatatacaacgactcctaattggtcattattcatgtcctagttgaatttatacagcccgaggaaaaaaatgataacatatttgagcaagattcaagacttattaagtcagctcaaaggttatactacaaggcaagttctcaaagaagagaatgcaatagccgacgcacttgctcggtagccagcaacaccttgacagacaaggataacttggtgcccatttagttcttaaaagaaccgagcatcactattcagaagaaatagacatgttggatgatagcccaacgtggatgaaacccataacaacatacctccagacaagaatcttgctaggaaacaaaaatgaagcaagaaaaatgaggaggaaagttgctcggtatctaatcctgaatggggtcatgtacatacatggtttctcaatgccacttcaaagatgtgtcaccatgaaagaagctgaaaggctattaatagaagtgcatgaaggcttctgcgacaatcatgtcaggaggcaaagcctatccaaaaagatacttggccaagggtatttttgacctaccataattgaggattcaatggactacgtcaaaaaatgtgacaagttccaaagattctcaaagatctcgagagctccaccaaacgagctcacactaatgcagtgttggaatatgttttgccaaaatctagatttactaccatgtatgttgtttaacaacttaaatatgaatttctataataatgtaaataaacacatataaagtttaagaaatcttacagtgggtgcagcggaataataatggctccttccactcagatctctaacccttgtatcctatctgtagcagagtattaccaagatctgagttcaaatctccttctcttgaaactggattcttc

SEQ ID NO: 309901 - DNA, 2548 bp, Cannabis indica
agatcctggtaaaataatatccaacacgttttacatgtgaaacatttacattagggaaaagtataaaagactaacaacatcaattattaaatctaaaaaggaggagtttggattgaagggagcttgcaatgcattcaccaccataagtgcatcggtgtcaatttgcgtgattggcaattgttgttgaatagcccaattgaggctgtgaaaaagtacttttgcgtccatttcatgagatttgaagttaccgataattggcattgaaagcgcagccaccacatgtccattcgcatctcttagaacagcctcaacatcagtatttttagtggaggagttgactgttgcatcaatgttgagtttgaggacgcctgaagcaggaggggaccacggaatgggggctgttgcagcatgccgttgctggtgaggtaacagcaacagtaggatttttgtgttgagcagttcgaaagttttgcaagaagacagcatcataaatggaaaggtcctttgcagctcttgatttgctaccatgtaccaccttgtttcgttaattccaaatagcccaaagtgtacaaaaaagtcgttccatctctggtttgttatagattgatgagaggtgtaacaagtagtctccatttcacattgatgtacacgcgtgccaatcgaacctctgattttgagctctccaaactgccttagcatatttatagctaaagagagcatgtcccattgtttcccaagcttgtttacaaatagagcatgtcgaatcagtaattactttccttcaaaccagagaagtagccataggaagagcatcatgaatgacacgctaggcaaagatcttaactttttgagggatttgtagggaccaaaaaaatttccaccatcacaaagaagagctagagttagagcaaaggtcttcttcttcgagcttagttgcaaaatgatacccgctttgaaccgtatatatccccgagttatgatgatgccaaatacgtttatcattagtgctgaagtaactcaaggggatagtgaggattttctcaacatcaagtggacaaaagtcttgctccagcatgagatattccactctctttcttccgtaatgtagtttgcgacaacaccatgtgaagatccatagtagcaagttggaagaaaggtagaatgacctgggatccaatggtacaaaccgcatctaaccgagcgtccttctcctattttccatctcaaccctttgatcaaaagtttacgatcccaccgaataccttgccaagttaacgatggagagtggcccatactagcatctaggaaggagttgtgagggtagtatctgctcttgagtagttgcccgatgagtgagtttaggttctcaacaagccgccacgcttgtttagcgagcaaaccatataattttaaattatatttgataaaactaaattataggatttttaaattatatttttatcaacaagttaatgtggaatgttaatattaaaaatataaaatatttttaagaaaaaaaaaagatatttaaatattatttattttaaatattttttttaagatataataaataagtaaatatatttttagtacaaataaatttattacagttttttaatcaaaacagttttttctaaaagttaagttgcaccaattttactctttgtgtagtaatgcttgggaatccattggtcatgccatgtttaattgcacaaaggcaaagaaagtttggagagaaactaagttcaaaatagaccatactcatgctcataatatgcacaatggtgattatctcattcactttcttcaattcactcaaaacatgattttgagttgattatatgtaccatgtgggctatttggcatgagcgcaacaaggtaactcatgggggtgttccacgatcaagtctcactattgccacttttgcaagcacgcacctggagagatatgcacgaagtagaacaaaaaaacggcctgaatctcactgcaccagtacagctactgtaacagcaccaaaccagcaacaaaatggacttgttcatccaagtacgtatcctacagatcacagagctgaatcgtctactgctgtacaacattctgaccgaagcttcaaggcgtttccctggacaccaccaccagtttttggtctcaaattaaatgttgatgttgctgtaaacacagacttaaaaattctgggatgtggagcaattgtacgtgaccatcacggtactgtcatagcagctctatccaagccagtccaaggatgctttcgatctgatgaaatggaagctaagtcactttttcatagtctcaattgggtgttacaacaacaacttccaattacacatattgagacggatgcattgcgtgtttcttcggctatcaatttagtttcccgggatctttctagttttactgacttaatagttgatattagttgtcttttgtcctttttctcaagagtaactgtctctcatgttaagagacaagctaaccaggctgcacatggtttagctaagtatgctctcgaggtggatgaagatgtct

SEQ ID NO: 309902 - DNA, 2833 bp, Cannabis indica
actgacagaattctccaaactgaaatcagtgggactgttatgttgaaatatagctttgtttctgctattccaaatggcccatatcaaacccaaaaaagtagacaattcagctttgttaaaacaatcaaaacctctaagcaaaacttctttaatatcacaatttttattattaagataaaactgatgaaaagaagaatttttccaaaatttacctgccctggaacattggacgagagagtgagtattggagtcaatatgagagtgacagatggagcagtgaggggagggagcagaattacggcgaaaaagattaagattggtagggaggatgtggttgaacgctttccaaacgaaatgtttaattttaggagggatattggaggaccaaactgaagtccaccatcgtttaagagtggaaggattagaggggccaggggagggtaaattggagtttgccaagtgataagcagagttaacagtgaaacaaccagagggatgatgattccagatgagagtatcattattataaggatcaataggcacagaaagaatggcagaacacatctcctcatcaaaataagatctgagtttagtaaggtcccaatgtcgatcttcagtaaggaaaaaagaaacagtttgggaaggaggtaagagaccaggtttgaataagaccctgccatggaaagggagccaattggattcagaaatatttaccgaggtaccgtccccaattttccaaatgaggccttttatcaagaggtcacggccccaaagaatactacgccaacagaacgatggcgagtgaccaatagcagcgtgcaagaaatcgtttcgcttgaaatatttggctttgagaagttgagcgactgaggagtcaggggaggtgaaaatacgccatgcttgtttagcaagcatagcttggttatggtggaaaatgttacgaaagcccaaacctccaaaaaacttggaagtgcaaaggttgtcccattttttccagtgaatcttgttactgtggccgagggatccccaccagaatttagacatgagtctgctgaaatgcatgtaaagagaaacagggagacggaagcaggacatagcgtaagaaggaatagcttgaataaccgattttaagagaatctctttgccagctctagagaaaagattttggttccaaacagacggtttggagctagctttttgaaggagaaactggaaagatgaagtttttgatctagaaaaacactgagggacacccaggtatttgtcaatgaaaggcttgttgtccaagttgagagtgtttctgaaaatgcggcaatcggaggatgtggtattaggggagaaaaggatggaggatttattgaaattgactgattgtccggtggcgtagtgataaatggaaagaatatccttgatttcagtggaggaagagggagaaacctgtgtgaaaagcagactgtcatcagcaaaaaggagatgagaaatagaaggagcagagcgagaaatggatattcctttgaaagagtgagaattagccttagcattaataatcctagaaaggccttcagcaacgaggagaaaaagataaggggagagagggtcaccttgacggataccgcgagtagggaaaaactgatgagagagagtattattaatgcgaagtcgaaaagaaacagaggagggacaatttagaatgagggaaatgaagggatatggaaagccaaaatgctgaaggatatgctggaatataagcccattcaacttttatcgaaggccttttccatgtccagctttaaagctgcccaacccacttcgccatgtttacgattgttgatcgcatgaataacctcgttggcaataataatattgtcaaaaatgatgcggtcactgagaaaagcgccctgattgtgagaaataagatccgaaagaatagatcggaaacggttagcaatggttttggagacgaccttgtaaaaagtggaacagagactgattggtcgaaaatccttaactcgagaagcatttttaactttaggaatgagaaccaaaatggtttcattgataggggcaaggtcagcattggttataagagccaataaggccgcatggcagagatcggtgccagcggaatcccaatttttttgaaaaaaactcggattgaaaccgtcagggccaggggctttatctccagcaagctggaaaagagtggctttgacttcgtcaaaagtgaaaggagaggtaaggaacgcagtctgattgggattgagatgcttaggaagaccttgtgtagcaaaagacatagcctccgaattagtaccttgggaagcaaaaagttcagtatagaactgaacgaaagaggtagtgatgtccttgaggttggtaatttgagaattatcttctaaggtgatggacttaataaagtttttacgtttcttaggggtggcatggttgtggaaatatcgagtgttcttgtcaccagctttaagccaattgaatctaggtccacctaccggctgctgcttacaaataaaaacaatgtaatatcaaattgtaataattggctcactctcgagctcgaccgatatggaataggaaaggaaaagaattgaaaaaaaaaattgttattaaacattaatagtacttaacatcacccttataaaacaatgcaagtgattaattattaagagttcgtttggaacgctgtattacatcgtattgtattgtattgtattatattgaattgtattttatgtaatatttttatgtaaaactatatatgtgtattaacttttatggatacctaaatatatataatattttagtataaattaaagtt

SEQ ID NO: 309903 - DNA, 540 bp, Cannabis indica
ccattgaaacctcttccaatataatataatataatataatatagagacagcaaaatatagaaacaaattgagaatgttcacaggctctatttctacataactaaatagagactaaaattaaaggttaatatatataatataatataatatagatacacaacaatatatagaaacaaattttactaacattggtactaaggtggtgtgaatttgtacagtttgttaaatgcacatgtgtcattttaattgagctatgtcaaaatataaatggttgagacagtagttgggatagggatatgagacagaattttcatccgttagtaacttgcaccacagttatctaacagtatctaacaatactttccttatttatcgatcttattatatattatataatgatatttaatcttctatatgttcatcgtgtacatgttttgtaaatataaaagcttttattatacaactgattaaatatataaagggaaatttgaatatctatgcattaattggaggataattttttccctaattgaatacata

SEQ ID NO: 309904 - DNA, 556 bp, Cannabis indica
atatatatatatataaaaagtagactaaagagctctcataaatgttaaaacaaataagaaatgtaccagaataacctctgtaaaataaatttaccctaaataatatatgcatgagcccaaacaaaattattacttggccccccctattattgtatgctggttccgccactggtgatatccaaggtattgaggaagatcatgtaatattctagtcacttattcagtaatcagatatattttggttaaacacttgataataccttgctacagaaaagatttaaaggttgagaatgttgaacagaatgagtcatttattttactgtcatctctgtaagtatacttaatgtgtttaatttttattttaaaatgcatgttctaagtagctcaataattaggttaactgaaatacgtgatagtaaataagattttggtaaaaaaaattcctacaatgacaaccttttagtcaacccctatgcccgaaatctaggacaccatctatttctttattggaatgatattgtccgctttgggccaagccctcacagatttatttttg

SEQ ID NO: 309905 - DNA, 1471 bp, Cannabis indica
aaatgataatgaaaatttataactatacgtatgttccaagtaataaagtgtctaagtacaaatatcgtactacaaaaattattaccaaatactaatattatttttcaatttctatttggcaagtaaaatttaaggttgattgacattgaagaagcttcattgaagagttggtagcccttggactgaaaaagttgaagacaaccatgttgttggacttggcaatgacattgaagagttggtagcctttttgactgaaaaagagaactctcgtaaatataaggttatttcgttacgaggaacgggaggtttggggaaggctactcttgcaagaaaggtctatcagcatcctcatgttagggaacactttgattgtcatgcttgggtttcacttctcccacataaaaaagttaactgatgctgaattaaccaagaaccttcatgactttctgaaagagttgaaatgtttggtggtccttgatgatatacggaccaccacaacctgggatcttctaaaacatgcattccctacttaaggagacacatctagcaagatcttactcactactcggaaaaataatgtagctttgcatgtggatcaacatggtttcatccatgaatctcatttgctcaataacaaggagagttgggagctgtttcagaacaagtactcctatgttgcaacagatccatcatcaagtaattatacaaatcactctttctaatgcaatgatcataatattcctttttattttgctaccatttgtatctatacatatcatgtttatgttcctagtttgttaaacacagatatgtttagctttgccagagtttgctaactattctaatgcatattagttcttccattcatctatagaaaaatgcatgtagcattagtgagataggatctaagtgtcagagctcaatttaattatactttatgcatattgcatatgcttttacatgatgacaatccaatagtattactatgtaagcctccacaactaaagttccactagatgatgaagaaaggaagaaagaactagcggtagagatgcttagaaagtgctctgttctaaaagtactaatgcggatgattttattcatatggttcgaaaaatagatgaatctctcaggagctactacacaagatggaagagttgtctgccaagaaagagtattgagtcacgtatgtaatcagcttagagttttgattgttggtcatgaattcgtggattgccctttttttttctgaagtttcctaaacaatttgggaatctaatccatctaaggttattaagtattccttattggccaactagaaagattccatcttttggcaatttaagatgactgcagactttgagaaagagcaagaaaacatatttttagtagggggcatagaattgtggaaacttaggtcacgtttggttgggaggaataaaaatatagaaatgggaatgagaatgggaat

SEQ ID NO: 309906 - DNA, 566 bp, Cannabis indica
ttgaagtgtaaaaataaaataaaaaaaaacattttttttactgtctataaatgtgttcgttcctgattgtatgctctaatagataattgctaaacttgatgaacgatttaatgtttaattaatttttttttattaaatacataaataataataattttatcattaattttattatataaaataataaaattaaataaatataaaatttataatttaatacaataattaataatttaataaaaaaaatatataaaagcaatacatttattataatgtaaattttattgtatcatatgtcattttatgatttaaatttggattaatttctttttatgtacgataaatttagatcaacttttaacacgccaaaataagctatattttggccatagatcatcacaatgctcttatatatagtgatgttaattaagcactaattatgtctattagaaatatttattatataacaagtattattatactattaggtaataagtgttagaaatactgtaaatctgtatatagccctaattaattcatgagaatcaaacaatagaatatagatt

SEQ ID NO: 309907 - DNA, 1416 bp, Cannabis indica
gaacttttgttttccagcatcttcagcagtgtactttgcaatcatagagttccatatctctttggcttccttataagagcagtagacatcaaacaaatcattagaaagagtactcaaaatcgtgtgtctacataccttatcggcctgagtccaagcattagcattggtgtttattttctctttagaaatcacccaagcaacgacatgtatatcacatagtaataagactcttttttcccatcttttgaaaaactgaccatcaaacatttcatttttacagatgtcagagaatggcttggagaatggaacagcagcagcaaatgaagaaggaacagaaagattgatttctctaatatcagaagatatatctcacttaatggccgcggtgacagagagagtaccaccaacgggaagagaaccaaaggtattttcaacaacagcagtagtagcattgggatccataaatacttaagattgttagaaaaatatcaattgcaataataaaatgataacaccagatgcgtgcaaacaagacactatttttaaggatttactaagtaatcctccaggatttaacaggtcttctgattacaatgagagaaccaggaaaacaaaaataacaaaaatataataacccaaccaagaacaattatatgtataaataatatgtaatatacatgttgtatatgttgtgtgtgatatatgttgtatatattgcaatgtttccttaagtactatatatatacactgagtactaacgttcacaatgaacgttgctcttaattttttagaagaaagtggatctagatgctaataaataggaatacaacacactttaaatatattactaagtccaaaactgtaaaagccacgttagccacgtttcttcctttgaaatatattatattcatatagttataacttacaacacttcaaaaggtggctttcctatcagaataggttttggtaaatgattaattagataaacggctatttgaaaagcatcagactaatatttaaatggcatagtggcttgagcaaggagagtgattccagtctccactacatgcctgagttacgctcttccctacaattttgttcagaggtatgaaggcaagagtgctgaaagaagatgccatgttcattgactaattgagtaaatgattaaaactcaccaccccaatcagttgttaactgcttaattttcctctcaaattaattttcaacatcgttttgctgtgttcattgactaattgagtgaatgattgaaactcatcaccccaatcagttcttaactgtttaattttcctctcaaattgattttcaacaagatttttaaactgtataaaagcaaccaaggaatcagacttttgtttaagtacatcatttagatccaaagtcttgccaaatgtgagt

SEQ ID NO: 309908 - DNA, 1409 bp, Cannabis indica
gccacacaacctcgtgattatgttgatctagaggtcagccatgaaaagatgcatgaggttgaccaggggttaagaattctgacactgagtctgaggtggaggaggctgcgccaattaggaggaggacttacaaaacttgtgttctccttcccaactgctcactaggttgatatgatgtcgatgggcagcccttgaacagactaggccaaccttgactgataggtctgaatcatgtcttgatacagtcttcagagcctcaggttcttgatgttggatcatagggagacaggtgggtctctcctacatctgttattcctgctgagatttttgacaagatactagccagtggtctagtgaggggtgtccagtctgagatacccactaaagatcaaagagcacaccggcttgccgttggttggatggcatggtcagagcatcatattcagcagggggtagtgtttccattacacccatacttctgagacattactgcttacttcaggatgtgtccaacacaaatcacactgaaaagtataaaatacctcttagcgattgttttatattcagagttaggctagctcagcctattccatacgagattggatactattttaatctgaaatctactccgaagcagaactagacagggtatttctacttcagttaggttggtcatcagtggttgggcgacaccaacagcacacctatgtcaaaagttggtggatatgccccaaactactacattgcttgggacatccatgagattctacaccgtcgcttccagtgcccccgtggcaaagaggaacataatcaagttggccagtgtggccaactttcagaagtacggcctgtatcctcctacttctagagttgtgggggccgagggccgatcagttggtgttgatggagccctaactgttgaggaggtctgtcctcgtgatggacaagttcttgacatggatactgtgcctctgtcgtggatagcccaaaggctggagaggagaaagagggccctctgctagcgcttgactcacgggggcacagttggggacgatactcttcagattaggcttagaggccagagatctatagggcctactcaccccttgcctgcatttagaggcaagagcaaagcaatcgttgaagattcagatgattcctcttcttaggatgatggtccttgataattgattacaccatcttttatattcttgttttgcattgaatgtttgtaacttgtattctaacattgttactttctccttgcaaatatgtcttccaggttgagaggtctagttggtggaccttcaaaggagccttcgagtcgtccaagggccaaggtggttcagaccacccgtgttagagatgccatggggtcatctctgttgggttttgtggcctaaataaaa

SEQ ID NO: 309909 - DNA, 2286 bp, Cannabis indica
atatccacacattctaaataaatttttgtaatgaataaattacagttatatattcacttatagtaaactttataatttatgctaaataaggttagtaggatcataatcctactcactactacctaattaaacattaatatatattaaatcctaattattcataattaggtttccaggatattacagaaaagctcctccttctctctagaggtcgaagcccacattgctccatctcttgggatttttttgtcgtttcaacgatccaagtttttcattctcttcgtcaaagatttctcgtagtgggtaagctttctattcctgctatttactttctttagtagattttgccatggtttcatgaatattttctttgctttgaattttttttgattcccacgttagattgtaatatattcggtatttttatcttcatggtagtcttaggatgtatcatgtgtgatttctaaatgaaaaagatctaattctgacctttgttatggttcttggctctttgagtcacgaagaacacaaagagcgtattcgagttcttgtaaagcacatgtttggatccttagtatacccttcccagccatggatgtcttattcaagacttacccgaccatgggtgctcaccatggggtctggccagccttagggggcaccctatgagctggccagcctattcttggaagtgaaattcctggccaaccttacgctaggtcatgacacctggccgtccctctaaggcttaggaaccctaaccgaccaaggccaaggttccaagtgagcagctagtcttttgtccttttttgttcccagctagggtctcttgacgaccttgtagggatatacaaatgtaatcatatcatggtttccttaggaactctgtataagacttgttagtgagtccattatagtcaattgcacaacttatgactcactaattgtctaagtagatgtacttgagacggtacttcactaatacccagccttgtataatatgagttacctagaacgtacccttacgtacaattgactagaactttgtttatagctttgtcaggttactcacttccccttgtctcttttatgcaggtgatttagagtgttgatctggggaggttacaacagctatgtaataagtcctatcaactttgcttttgagagatagccttcagtttgttcccttgctccctttgagtgattgtagactgatagtcatatactatgtccagaacaaaacaatcgtatcgtagtgcaccaccatatgaacctcatattgaaaggatggcaagaatgggcagagttagagctgtagaggaggccacacagccccgtgaagatgtagatctataggtcagctaggtggaggtgcctaatgttgaccaacaagctgagagttttgacactgagtctcaggtggaggaggtcgtgcttgttaggaggaggacatacaaaacttgtgttgtccttccccattggcctctaggttgacatgatgtcgatgggtagccattgaacagactaggccagctttcagtgatgggtatggaccatgtcttgattcaatcttcaaagccttaagttcttgatgttggatcatagggagacaagtgggtctctcctgtatttactattcttgcatagacttttgactggatattggccaatggattagtgagaggtgtccagtgtgagatacccacgagggattagagagcacactggcttgccctcagttggatcgcatggttggagcgccatatttagtaggggcagtgttatcgctacacccatacttctaagagattgcggctcactttgagatgtgtccaacacaaatcaccctaaaaaatgtaaaatacctttcagcaatgttcattctatatgtggagctagattggcctcaacctactccgtatgagattagatactattttgatttatgatctgctccaaaccaactaaatggggtatttccacttcacttaggttggccatcagtggttgggtgacaccaatagcacatctctgttgaaagttcatggatatgcccaaaactacttcattgcctgggatatccatgagattcgacatcaccgcttccaacaagtaccaacatataactgctctcactactaaaaaatcccaaattcccgtcggttttacactgtcggccaaagaattcccgacagttcataaaaccgtcgcctatacgagcgtcgcgaaaactgggtaaaattaacgacggttgaaaactgtcgggaaaatagtatgggccacggt

SEQ ID NO: 309910 - DNA, 926 bp, Cannabis indica
tttttgtgtatttgtgtaggtttgctggtcaaacagagcggcttttgagactttatgcattagtttgcaaaaatatcatttttttaaataaattttacttttgtcctttttaagcaaagaataaacataactattgcaaaaagaaaaggagtcaaagatgtattgcacaaaaatgaattcaacttaaaagaaaaggcaaaactgcctcaaacacgaaatagggaaaaactccaaactaaaacagaaaatagttacaaattagtaactagaaaaagataaattgtaactaataatctattaataaccaaactttcttttataacaaactaaaacccatattcagatatcatctcaactcagttagaatataaatcaaagaatggtccatgattgtaatttttcaggaaaattgtggctaaagaaccaaaatttaaactttgctagtgaataagtaccaaaatatttttttatggcaaaaatactaaaaggttagtttttgacttcagaccaatcaatagcaacatgttagcatattacccaaaaaagtaaagttttgatatttaccacaaacattgtcattgagcattaatggtacccagcaccttttatagatagcgctctacgattaattagtgatattcttaaaaattaatttcttaaattatatgagacccaatacttaattacactaatagcagtatgacaccgagaagggtgctaggcaccaataatatgttttagcaattctctttcacaccaaaacatataaaataagagtaactccaagataatgtaacactatccaaccaccatatttgagatatatgttatagtggggtgcatatatgcagtactacagtagcaacgacatattcatttttttttaagggaaatttgaaattctatgcttaaaataccatttaatt

SEQ ID NO: 309911 - DNA, 2420 bp, Cannabis indica
gcataaaacccaacaatttgttaaagaaccaacttctattgcgagatgcggactgcagatccttcaagcagttcattgatcccagagccagccgcttccactaatattccgcggacttggtaaaattcaggtaaaaacataggcatttagcatcattactaacgcgagcaacttgcatcacctgtatttggccaagtgtgtttgcggatcgattcttccctcatataactctatgtgcagcatcttgaagtttttgagaagaggggtttctgcgatccttttgacacaaggatttggctcttcatccttggaatccgataacgctccactttgcttttttacgaactttgttagggcggggatttgctcttccattcttttggcatcaattttcgaaaggtcacacccccttagcttgtctggcagatgattccttaggtcacccacagtaaccttggcttttcactcttgtaccttctgtacttcgcgtctaactgtcatcgcaaatccacagtacaccaactatccctagaatgactaagagcagtccttccatcctgattgacgaaatcactttggggatccacacacctcctgagcctgggaacctccatcgcccatctttttggtgtagccctacttcgagggttagaagggcatccaagcccgaaggcgctggtggccttctgtgtcctcgagggttgttcgactagtagcgcatccctctgacagctttagggagagttatgcatgagggttctcctagtttacccttacccttattcatacgggggttctgggttcctgcgttagcttacgtctgggcttcatcttcagctacttcttctacagacggtaccccgtctgttccaatcagaccattgaacttattttgcagttgctccgtggtcttttcattttataagtgagttgttgttctttcattagggctgtctgtattgcggctagctctttagctacctgtaccatgttagggtcatgctcgtaatacaggctatttttataatatccatctttattgcagtcgtcgtcctcctcctcgtaagtctcggtgtactggtcatctcgatgaccttctctaacatttttgtcatttgtttctggattcccagcagtggtacctttatttgggttcttagttgcagctacgccttccctaccatcttttacatgcacgtcagccgcccgagaggcaccttcctccatcaccgcatccaatggaggtcttttgctagagttttggcacgtctttaccatgataagagggcgacgaatgcaaccaagcttccttcaactctcaattaatgcaccaaaatatttatcgaatttttcaaaaactaaatattttgagagaataaaggaaataataagcgataaatagtatgaacaataggtttttacgtggttcaggggttaatgatccttggtccacgagtcaatataatggcctcttagggcggatttcacaagattaaaatgtgttacagtgtagcaaatttgtattgagagaaatatagctaggtattcccgcaaggtgatggctgataaaagaagtccccctcctcttcaaaagaacaaggatatatataggcacacatgggtgaaagggcttttcttaacctacctacggttttgtcctatacacgttgctaaggctggtactgtagaaaagatgatcagaccatccacttgtaggaatcttcttcatcgtacagtttagagtgactgatgaggacccttgtacaatctaggacacgtgttgtacaaaggtctctcctttacgaaatagtctctacacaggtcgttgggccaaaaccgtgctcgaaggtacatacgcgcactaccatgggatggcacatgggacaagatctgatctcatgttagaaaaaggtgtaaccgtctttggagccccatttcgtaaggagttgacgtttccctgacctccagaacttgtatcgctaaaggagactactcccgaaagctcttacctctaaatgacttctgggtctgggagtaatttctcgtaattctcttaggtgccctgtgcgaaaattgtgttcctaccttgatcgtgccacgagtctggtacaggaaaatttagataacatcaattgaaaagggaatgtagtgtagatagcgtacaaggtcttttactaattaatatataatttctttctattttgttttgcaagctaagagcaacccgtactcaattgacgagataaatcttctgggtgatcagtggattgaatacgtttgagcacaggcgatgcgacaagggctgttacgatgataagtttctattattatttatactttgcactataaccagttactttcatataactaatgagtaagtaagttagagtacgtagtttgtatatatttcagtttttgtt

SEQ ID NO: 309912 - DNA, 2329 bp, Cannabis indica
aaacacgacactttccacagattatggagtttggaggagaagaatcttttatacaaggacctggatttgaagtaatcacctttgcagtaaaatcatcggaacaagaagccaataatgtaccggttggatcccatttaatggcattaacttcaccctgaaaaaaacatagaaagatgataaagaacatgcagtagccctcatctatctcttagctctcctactattttctttatttgccattaataaatgtattttcgttgaaccaaaagatataagagcactgatcttttcattgcaaagacaaacctgatgtcctgagaaagttttcaatggtagtttctctccaaccttgcaaacatgtattgtagtatcagtagagcatgaagcaaatgaaacattgtttcgccagtcaacatctagtgtaggagctgaaaaaataaattggtttaagttccattgagacttgaagggataaaaatgtgtgtgcgcgcacatacaaatatagttagtagtataaggacataatataagtttaacacaattcatatcagccataattttaatagagataaatgtacctgaatgacattcaaattgttgtttacattctccagtctttacgtcccacactattgcagttttatccacactgccactaagaagataatcacccttcttgttccacttcagagaaaagataggacctttatgtttgttcagcgtactcctcaactcccctaaaccaataatcccattaataatagaaggttaatgataggtcctaccctatcgattcaatcagtaacaaacagaaaataaaaggaaaaggagatgaagaaaaaagggtactggtattagaaaatccccaggtactcgagagcctgggctctccttacaattcagtaaaatcctctctaaaaactttcacaaactcttcccactttatttatatcccttaccccatggtaattccgtgaggctaagtcccatactaacaccacttacaaaacaacttgcacagtcacttaaatccctgtggcagcccctatataaagtttcctatcccttttcctagcatagacataagtgacaggtggtttatcaataccgcccgcttgaaatttcaccttgtcctcaaggtggaaatgaggaaattgaggatgactgagaaatcttcccaagtagtttcaaattctaggaggttcttccatttaatcaaagcttgaggacttgtttgtgagtgccaaggcgaatggccaacaaagtttctggtttgagcagccattccagatcagaagtgagaccgaagggagaggaaaggcttgttgctggggacccaaagcagctctaagtaatgacaaatggaaaacaggatgaatcatagactcgaggggtaattgaagccgataggttgttggtccgacacgagctaggaccggagaggggccgaaaaaacgaggagacagcttctcacttggtcgtttggccatagttcgttggcggtacggacgtagcttcacatatacttggtcaccaacctcaaaattgacatcgcgacgtttacgatcagcctgagtcttcattctttgctgtgccctaagaagactttgtctcagcaatgcgagtaagtctttgcagtccgagaggacttggtccacaataaaaactcgagtacttgaggcccggaacggaatagaggaggatcacggtggtataaaacccggaagggagtcataccgatggaggtgtagtgagaagtgttataccaaaactcagcccatggtaaccattcgaccaattggttgggtttgaagcttatgaagccccacctataggtttccaagcatcgattgaccacctttgtttgcccataggtttgagggtgatacgcggtgctatactttagggaagtgccttgcaagcagaataattccttccaaaacaaactcaaaaaaatcttgtctcgatccgacacaatggagcgagggatcccgtgaagcttcaccacttctttcacaaaggctgctgccacattaagggcgatgaagggatgacgggaaggaataaagtgaccatatttggtgagatggtccaccaccacatagatggaatcaaacccatcggagagaggtaagctttcaatgaaatccatagaaatgtcatcccatacttgctcgggaatggggagagattgcagcaaccccaccggagattgagccatgtatttgttttgttgacagaacattctgccacaaatttctagacatccttgcgcattccgaaccaataaaactcaacggctagcctttgaaaagtcttaaagacactc

SEQ ID NO: 309913 - DNA, 1385 bp, Cannabis indica
aagtacagttttggtcataaatgcaaaaaccgtgttcttattctctgcactccaggcgatgaagactcagagacagcaatgtttcctcaggatcttcatgatcttgaagaagtagatgacgaacccaccgaggaagtgagtctaaattcattggccaattcgtccaatccaggcatctttcgtattacggcgcaacagggcactgagactttggaagtgttaattgacacgggcagcaacaataatttcattcaagaggcattggcggttcggttgggattagcttgcgaagatacgaagaaatttaaggtgtatatgggaaacgggaactcgctgtggtgttctcaactgtgtaagggtgtggagttgattctccaaggacacaagattttggtcgatctatatgtgctgcctatttgggggttagacgtagttttggggatgcaatggctccaaacattgggtccatgtatccatgatcaccgagccttgacaatggaatttcagtggaagggtaatgtaattaaattggctggtacgattcctgcagcagatcaacaactatcatccgcacaactgcgtgttatgtgtagagaaggggatataaaggatgtattcatgttggctaaaatctcccaagaggaaacaatggtagataaagagattgcagagatggaaactcagcttcctatgcacggtcgtggcattctttctgagtttcaagatgtgtttgccaagcctactcagttacaaccacatcgaatgacgaatcaccgcattttcttacaaccgcggtcaaaaccagtgaatgtcaggccttaccgttacccctactttcagaaagacattattgaaaagatggttcgcgagatggagcaatgcggatttgttcagacaagcaacagtccttattcctcaccggtcttgttggtcaagaagaaagatggatcgtggcgtttttgcattgactatcgggcactaaatgatatcactatcaaggatcggtttcctatcccaaccattgacgagttattggacgaattgggtggagcaagcgtattttcgaagttagatttacgagcggggtatcaccaaattcgcatggactcacgggatattcacaaaacggcattccgcactcatgaaggcaattatgagtttcgggttatgccatttggcctcactaacgccccatcgacattccaagccactatgaatcaggtattcaaaccattacttcgtcattgtgttattgttttcttcgatgacattctagtttacagcaagagtggcgaagaacaccgtggtcatttgcgaatagttctacaaaagctacgagaacaccaatttcttgctaaaagcagcaagtgcaagttcttccagtc

SEQ ID NO: 309914 - DNA, 873 bp, Cannabis indica
taataaaaaaaaaaaaaaacaataattgacaactttacaaacaaatttagaaacactgacaacaaatctcaacactcttacttttaaaaatactcgcactcctccagaatgttattataaatatattatttgtttccattttcaagattaaaccaacaaatttaagctgtttctattttttatgatatgttttcattttacactcacatacaatgctatatatatttatatataaatatatatataagattaaattaatttaatttttaataagagttgtttctattttttgaggtaaaattatttttattttcaacttgagttgtttctattatttgaggttaaattgttccaatttttaatgtgaatttttttttaatgatatttatttttatttaacatagatgtatatgaggttaaatgtaaattgtttccatttttaatttacgttgttttattttcaatgtttgttgttccagtataatttgtatggttctatgaaaaatataaataaataaaatactacgtccaatgaaatttgtatttattaattatttttttgatatatattctccacaaacaggcccggccctaggcataggcgggctaggcccgtgcctagggcccactctttctaggggcctatttaaaattttaagatctcatcttttaattactatttatataaaattaacatctaatataactaaaataggctgagcgtagtggaagcgtgaaggatgataaggtttatagtttgttgggtgagggacttgagttcgattccaccatacttcactttttaatgttaatttttaaaaaataaaattatctaaaaaaacaactaaactaaatacataaatattattttag

SEQ ID NO: 309915 - DNA, 1067 bp, Cannabis indica
aaaaaataaataaaaaaaagatatactgatacacattttgcaactctaaaaaatatatttcttgacacttatattggtgccccgctttgaagggttactaaaacactttagacactctcaaaccgggtcactaaaaagtatttttgtagtaatatagtatagtttaaggggtaaaaatgttatttaaaatttttaagaagtaatagaatttgttcctccaactataatttttttagaattttgctcttcaaacttttattattataaacattgaaaatttccatagtaagtattcttatttttgttttgtccttgtaatatagtgatattttcttaattattgataaagatgacttttgaaagtacaagataattattgtttaactcaacacattaaattaaatatcttgatggtaaattttttttacaagtataagaatgtcaccaaacccaataaaatcacaataatgtatctccaaaattttaattactgataacgggaatataaaaagagatttttcttgtattttttatcttaatttatttaattttattggaaggttttatatatagaaattttattagaaagttattacttacatcttttacttatatttttattgatattttgatagaatttatttatttatttattttgaatgaaaataatttttattagacagaaacatccgctaatacagaggcctgaagagcaaggggaataccactctcagtaaagagacgacctgaccaataacaagcaccacgtgccttacagtgcgtgactttgttagcagaccgtttaacatgaccaatagaaacattacttaaagaagataaaataaattgacaatctttaacaaataaaccaaaaatagaaggcatagataccgaactaagaatagcttgaacaactaaattgcagtccgtctctaaaatgacatttgacttattattcctctttatccaactaagtgcttctttgacacttagaatttctacaatttcgggtcagcaactgacagaagaaatagttgaaaacgcctcaattactcgaccatcacagt

SEQ ID NO: 309916 - DNA, 1300 bp, Cannabis indica
aacaggttgtgaaagaatctagaattcgcgtccccttccttgaccatttgcacttgcattttagccaaatgtttctttctttctcaaagactttctgttgccaatccttttttatacctctcctttcatctgccaaggattgattccacattgaagttccttctaatttatcaatctccaatattcttctttccattgcagccttagcaattttgctatttccgaaggttgttttgctccacttcttgatattttcttgcacaattctgagtttggtcatgaatctggttcctggccatcccgaaacatttgccttattccaccagatctcaaaaagttttgagaaggatttattttccagccattgattgtcaaaccgaaatggactaggaccccattttggtggattggagtcaatgacaaccggactatgatctgataccaatctaaccatcatttcttgtctcacaaaaggaaatgacagattccattcctttgtaaatagaaatctatccagtctactacatattggaacgtctctaaaatttgaccatgtgagcctcccattgtttaattcagatcaatgagtcgtagttcccgaattagttcatcaaacatcttcatacttctagtgttcgagacactattgagcttttcccccactctgcgaaccacattaaaatctccccccaagcaccacgacgcaccacaaatttccttcagaccagccagttcatcccaaaaatctggtctgagtttgtatgagcaaggcccatatatcccagaaaaccaccaagggtttttgccttctgcttgaatcaaggcagaaatagaaaattccccaaccaaagaatccaaaactgtaacgcttctagtgtcccacaccaataaagtacctcccaatcttctccatgctggatggtaaatccaagctttaaatctagacctccaaatgttaccaataaagcttctatcaattgttgtttttttgacttcttgtaaagtaaccaaatccagattgattttacaaatagtcgctttgattgctctccttttgaccttgtccccacttcctctgatattccaagtgagtatcttcattgatatcaatcttgtatgtgtttcatgaatttgttctgctttatggatttttctgggttgctgctggattatcttcaatttgtgtagctgctgtatactttgattatcttcaatttgtgtagctgctgtatactttgattttcatgtttgcatttttttagcttaaaaaatttgtcatacgaggggtaattgatatgtt

SEQ ID NO: 309917 - DNA, 2335 bp, Cannabis indica
tattattattattattggtgttacaaaatttgctcgacaacactaattgataatttttttttaattattttattatttttttaagaatttcagttttatatgactaattatgtttatatatggctattgtgttttttagatattcttttatcgtgtaaaagaaattgttttttatggtaagtcttctgcatttcaagtaaaaatttcctttgatgtttttaaaatttaaatatttattaaactaatgggaatcaggaaagtgctataagacttgccaagctacataattgatttctgcatatgagcttaattagcatttatttctaactaataaacattttaggaaacttttgtagcagcaataataatttttaaaagcttgtatgttggattgaatatttggattaaatcatatttatttcggtaaattatttattttattgcatatctattcttaattttcaaaaatattgctatacttattgtaaaatttaataaagtctgattttttctttatttatttccaatatttattcattatatttagtagatttctgtatgattttcgagctagaataaagaaccctgctttgtgtgttcagattgtgagatgaacgtgaaaagcttagtactaaacagtttaacgactttccaagctgcaagtcattgcttgtctcttccttaagctaatattttctatagttttttaaagcattgttgttcaactattttttttgttccctggtttctattcttaaaaagtagtaaaaaggtcattaaatgtgacacgctatcttcgggagaaaatttctacgacacttggttcgggaggtagaaagcactcatcaagatcagaaaaggagttcttgttctttgtgtttcatcaagatttaatcagaaaattaagttaattttactttctgcaatatttttatatctgtacctagttaatttgagtcaccagtttctgttgaatcaagttgttataaaattatttctgttcaagaaatttatttacagttatgtttctttatataattaagggtaattttattcaaaatatattgtgagtgtacatagaatattagaaatccatgtatatactgtagttcttcttaaggatgagacaccagtactagtaattaaacatgtgcattggattccggagaaaatttgtttcaagaaaacaaaaatactggagaaaactctgaatatctgatctataatcaggtacataattaattgtttttcttttttttctttttgaaagttgacagagtgaaaggtacataattaattgaaatcctttcatttttgttttatgccttcatggttatcattttagtgggttataagttgaagaaatatttggtgtggtaggtaggggtatcatatttatatatatgaactatatatacgtacagatcgaaccctggccctccacattcagccatactctctctctctcttggcatgttataatattaatattatagtacaccattaaagaaaaaacactatttaaaggatcaaaattaattagaactgtcctcgtcaattgattgagtttagtacgtacagtttcccatatatatcaatatctacaaacaccatctataatacaagcaatacttgccacaaaatttcatatcactcaaattattataaaataatataaaatatttaagaaaaaaaatgaaaagagaatgagaaattaaatgaaatttctaagttgtttattttcagataactcttatttatataaaattattaatcaaaaaaattagaaattaaattaatgtaataaaaaaaatacagtcaaacattaatgatgatacttgatttggatattgatatataatatttcataatactcttccttgaatgttcataataattgactcattacttcgctgaaaaattttgtcaaaagaaaaaaagtacagtatgaattaactccctcttatttaggcattcgttgagatattttaatcaacgaattttaatcttgtatgtcgtcttctcaaatgttaatgttgttaataactttgtaaataagtctgcaaaattgacacttaattgaatatgttagacacctatatacattcttttgaaatgtataaagaagaatttggtgaaatgtgttctagttctatctctatcaatgtaccctccttttaattaagtggtgcaagtagtattattttcatagagaactacttgtgttgatacttttttgttgagtgtaatatatttatatgtttcttgatatgttatgtcaataatctcactcctacattctttacttgcttcataaagtgcaagtatgttaaca

SEQ ID NO: 309918 - DNA, 695 bp, Cannabis indica
tccaatatatgatgtataatttatactaaatttagcttaaaatacaaacgaatgctatattttctaaatatttattattgtgctccaacttaaactaggacaaaaattaaaatagcattaatggtcattaaattaaatattaaaaagataattaatgacaatattataattagaagagtactaaaggaactctattttacatgataaatatattgtgtcttgtctcttgacatgtctactatgtgatgtttaagtgttttgtgtatgtggtgagattagtgacgtgagtttgtttgatctattatggcttccaacagtcgtgtgatggaggacttggaaaacaggtgggtaaacttaagtgtggaagagaaagaggatgaagggttcatgtatgatcaggtggaggattgactgatgactttgatgtccgttggtgcttggtggggaggctattgtcagataaacctattgattttgattcagttcgaaatgtgatggcgtccaggaaaaagaatgtacgttaaggagttcgagactaatgagtatttgttctagtttttcatgaggttgacatcaatagagctcttgagcgtacgtcgtggacgttcaacaagatgcctctgttggattaaaaatcctaagtgggcacatatgtataatgtatatggtattataaagtgtgatacaaaattaag

SEQ ID NO: 309919 - DNA, 1857 bp, Cannabis indica
cacacacgcgagagagagagagagctttgaattttcttaaactttccaattttttccaactttgaataaaatgaaataaatgactaaattctttcttatttcacccaacaaataacaattcaaaacacataatcacattacacttagtccactaaagcacaaaatataaatggggtaaaaagaccaattttcccctccacactaaaataacataaagggtactaaaagggtattttgggaaattctgaattcccgaccaatctcgacattcccaatgtctaataaactgtcccaatatactaacatgctaagttgttattctacaaagccaaacaccgagttccatgttgctaggcaccgaaaatgcaaaaatatgaaatttcactaaatgacataaaaatgcattcaggagtcgaaaataacagcataaataattatttaaatatctataaataattttccataatttatcataattaactgctaatttccaaattaaactaagcggtctttacactagggtggactattttgtagtcggatggataatgaagtgttcgtttccacaaacgccattttccttgaagatgactatattaagaatttcaagccgcaaagcgaattagtatcggtggaaatgcttttagatataactccttcttgttagacacttgtaatgtgggtcattcaaaatctgaagtgtcactaaagagtaatacccataagtttctaatttttttttaatttttaaaactgctgacttatagagtcatgccaagaacgtttgggaaagtatatctcgacttacctagcacgtagctatatcataattatttatttaattatttgaaataattttaaaaatattgtatagtgatgcgccaaacacgttgggaaatgcgtacccaatcgtattatgcgcgtcactatatgttaatgaaaaaaaagcaaatatcatggtaaaaaataaagtcgtgcgtgggccaataggtaaagacattaataaataaataataaatacacatacctttaaaaaaataagcagaacaaaaaataaattaaaaataaaaaaagattattgataaccacacaaccccacacacacacacagtacaataaattataactctaaaaaattttcagacaagctttcttttctctcattctctctcttcaaccgcatttattttttttcttgttatcttctctcatcgagaagctttttttagatcgaatgaccaatctccgacgaatgatgttcaaaatgcacctcagattcgtgatctacacctcccaaaatgcacaggtggtctcatatctctctttctcccttctcctttttcagacgagagacttttgaggaaagtgtcccaacctccgatgaacatagatccatgatccacgacccccaaaatccccaaatccgagatccccaatgcaccagtagtctcaaattttgctcacctttgtgtttttttttttttgcttttccctctcgctcattactttgtaggtggatggcttggtgttctcgtcatgactctcagtgttttgcattcctgctgtggatctcgacttttgaatcccctttcgccggcgaggcagtgaaggtctcgattatgatatttgaagctctgtagttattcattgtcgacgaaggaatagggttcgttgctattcgtggttgacaaaaactgaatgtggaaatttttttgttatgtaattttttaagttcaaatatataatttgtaggattttttgacaattaaacattatttacaatatataaaatttgaattaataaatatattaataattaaaaaaaagatatagtgacacttcatgtgtgtggttgtt

SEQ ID NO: 309920 - DNA, 954 bp, Cannabis indica
actatatatatagtctaacagagagatgtaaagggagtatcatcttcttgaagtgatttccctcaatgtgaggcatttctttgtaatactttactgtgttgagttaaaattttgggttcattctgttgtgtactactgactattcctattaaataaacatccatcattcatctatttttgagctaagttttctttgtctattttcaattaagtttaagttttaattttgtgattgattttagttttgaattatgtgtttttggacattgttactgctgtaacaacctgttataagagtgagaattcaccacaccatatgaaaaggtattggcagaaccaacacaaattttaaggtgataatatttaaatcccaaaaaattattattgggattagaatcatctagcaactatgtgtaagatgaaaatgtaaaaataattttataaagtttttttgacataattatgcattattttacattttattgtatctaattgggtgtctattcatttggtgcgctatgttttatctaaatataaatttggaactatgtgcatttcaataatagtgttgtaaagtcgtgcgtgttgtgctggcctgactcatatttatccacgtttttttttaaaaaaacaagttttgtcgtgtcgtgcacagaaaaatacgagtcgttcagtgtcgtgccaacatttttaaaggataggcccggcacggcccgtaggtcaagtattttcatttcgtgttcaaattcgtaccgtgctgttctcgtgtcggcccgtatttctgaaataggccagcccgttttcatatttgagcttaaattcgtactttactttttcatatttttttacatttactaaattatatgtatattttaaaatattaattatatttatataacttttgaacaatattttataaattatcatataaaaaaattattaacatcattaaaa

SEQ ID NO: 309921 - DNA, 863 bp, Cannabis indica
taaccctatcgataaataggatggtaacacccttaataacccaaaaatgggaaaaactaaggttcgagaaaaggccccaaccggcagaccggttcccaacaggaagtcttgttctaggtaccaaccgatcgaccggttgccacaggtcccccagaatcgaaattctggttctgtgctaggaacccgaaaaatgctccccgtaattcaattcaaccccaaattttcccaaagcttacaacatacttataatcactataatacaccaatcccaagaaaaagaatacaataattaacacaaaatctcaagatgccattagaggtcaaggtttgagttcatgaactcaaaccttgctacaacctcatcaccactaccaaaatcaactcaaaacaccacaagtaaccacaacaccaaaattcctaaaatcatgcttcaaaacctaacttaatcttaagaattaccaaagagaagaagctagaacacaataccttaatcacaaggtccaaaacccttgattgttcttgaattcaactatgaaaatcaaagccttggctgagagtgagtgagatttgaaggagagagagagaagtgaaaagagaatgaattctccagatttttccttccttattttacattaaatcatatctaacctaatcaacacataaccagcccccgaaaaaccactaaaagccaaataaataaataaggaaaagacctgtttgccctttaactaaaataaaatgattataaattcccaagggtaaattagtcattttccaaaccacgaaaattccaacacttctaatatctaacaatgataccccgacaatattaatctaaaacatataaaatgcgactctctaaa

SEQ ID NO: 309922 - DNA, 1266 bp, Cannabis indica
ttaaattcgtactttactttttcatatttttttacatttactaaattatatgtatattttaaaatattaattatatttatataacttttgaacaatattttataaattatcatataaaaaaattattaacatcattaaaatttgaatatttacttataaatactcaaatttttatatcacaccctataaataaattaatatacaatctcaattttttatatcttaatacttttaattagaaaattataatattcagtgttattcgtatttcttgcaagagatagtaaactccagacaattatctaaagcccatcagtggacccaaacgacgtgaactgggtcgaacccaacaccaacctggcctttcacgaaagcaattacattgtttgcttaggcaagtttctgccaatgctagtccatatacggaaggatcctagctctgtgtagccggaagaatcctttagcgtgtacctggaagccagttgaattttctcatttattgttttatgcagaataatgaaatcactctcctcaaatctcggacagagaataatatcaagctaaaataagaaacaacataattaaagatcaagtaattaatatttaattaattatccacaactataggatacaataacaacagctgtgaccgtgattaacatgaactgggtcgtgaactgggtcgaacccaacagcaacctggcctttcgagaaagcaattacattattcactcaggcaagtttatgccaatgctagtccatgtacggaaggattttagctccgtgtagtcggaagaatcctttagcatatacctagaagccagttgaattttcttatttattatttcgtgcagaataatgaaatcactctcctcaaatctcggacagagaacaatatcaaactcaaataggaaacaacataattaaagatcaagtaattaatatttaattaattatccacaactataggatatagaaacaacagctgtgaccgtgattaaacacatttgagccccctaaattctcgtatgtattgttttgaaaattatctaaacatttcaattaattaacacacacatatatataacctagttaattaaaaaatttgttaagtaattaaattattaccttttcaacatcgcataaatttgttggagaattttgtgaccatctatagggtctaaatggataattttctctggcgcaatgacctctagcatccaataatggctactaaaaaatatatatacatgtatataagatagt

SEQ ID NO: 309923 - DNA, 1645 bp, Cannabis indica
aagatgtatttgatcagtgggagccattgttttcatgtatgataggcatgttagtaatttcgattggttgttgaatacatgtatattctagataactctttgatgttgtgtgtgcacacttgttgatgcgagctagtgacttagtctcggtgctatgatcgagtggattaagatcagtagttatcgttgtgttatatgaatatcaaatttctcattatgtgttacatttatatcttgtcgatattatatgatgcataattagttttatagacattattgtttcttgagatttctgtgtattgacactattacttagtgagcacatattagtgtaattatgtagtccaagtgaaaaaatgttagaatattttaattggacttacataattaagtgttgctcacacagtgtcgattttaacacatgtggataactatatgcgtgatataatgtcgattatgcaattaggaccataataaaatagtcagttttattaaggagataattacataaagtactatttttgtaaaaattttatatttttacatttaaagatttttttttattattttttttatggtgttctataaaaacaacaagaaaactacataaaagtaacaggaaataacatccaaacaatattaaaacaacaacaaaatataacatacgaataacaaaaaatcaacaacaaattaacaagagtacaatataaaaaatacatcaaaagatcgtattttctgtaaataaaattataaaaattgtaaaaatatttaacattttgcacaaccgtatttttgtaatttttttattgtttttgtgtatttgtaaaataatccctttattaagttcatttgacgcacatagtagcaccctaatgactataggttagtccattaaattatagtctactagaaataaagtagaggcccaatagctcaattctacttcttagagtagaatatatatttatgtatattgaatggtgagtgaaaaataggtgaggatagtagtctgttaagggttattctccataaaattcttttgcgtattttttacttgttttgtggttattgtagagatttgcaattgctaaaagatagtcattggagaaacaatgtcaagtttaagaagtatttttattaccaaagtaatactctaaataaaatatttgatcttgaacaatatgggcatgattttgtattgattcttgttgataattgtatgctcattatgtagtaattataacacagccgacttagttcgagtttgaactccattacacaccatggatgaactgaagtaaagctaaagaagaaaaagacaaaataaatggcgatgagatattcaaggcactaatatcatattagaaaatagagaagagaaaattatggcaaaagaattctcctattgattattgaaataatttatacaagttttctttttatactatgtaaatcaagaatgataacagattaattaccacttgtcgaactactaaataactctatttacaataataacaaaaatataatagtcaaactacctaatctgaaaaaatgagttagaacttataaggtctgatcttaagattgtttaatggaagtggccccttttattttggttactagtttttctttttgataaaaa

SEQ ID NO: 309924 - DNA, 3153 bp, Cannabis indica
cagtatgcaggcagaggaaatcaaaacttcaccaatgctaatggtcaatttcagttcagcaacaggaacaatacacgtgcaaacgagtttgttcccaatctgaattatggaggcagaggtggcttctccattagcagaggtggcagatctggaatgagctcaaataataggccacaatgtcaattgtgcctaaggtttggacacactgtgcaagactgtttttatcgctttgacaaagctttctcaggtccatctctcagctcatccagtagcagcactcaacagtctaatcagcctcatacacaagccaatttgacaacatccaacaccagcaatgacaccaactggtatcccgactctggagctactaatcactgcactccacaggctcaaaacttggcaaattgctttgactataatggtcaagatcagatgtatgttggtgatggttcaggtttgtctataaaacacattggtcaatcctttatttttcctaaattgtcatctcaacctcttgcactaaataacttgctgcatgttcctgaaattacaaagaatctaattagtgtctcaaaatttgctcatgacaataatgttttctttgaatttcatgatgatatgtgtcttgttaaggacaaattgactcattctaccttgctgatggggaggcacaagaatggcctgtattcttttgagccatctcagttcacacttgggctttccaattctgaaccaactcagtcacaccagccatccttttccaataacagctgccagtctgcttcaaaaagcacatttgttgtcactttaaataacactaaagcctctgtttctagctgtattaagtgcaatgctgatgttgaaaatgattttaccttgtggcataataggctaggccatccatctgaaaaagttgtacaaaaagtcttgcaaacttgtaatatttctctcagcaataaaatttctcagttttcaatttgctcagcctgttgccttggtaaaatccacaaatttcccttcccaaaggcctccaatactgttgtatccgaaccattacagctagtggtttcagatttgtggggaccctcacatactacttccttcaatggctataagtattacattcattttgttgatgtgtactctaggttcacatggctatacttgctgaaaaacaagtccgatgcctttaaggttttctaaattttaaagctgaggctgaacttcaaataggaaaacctcttaaaaccttacaaaccgattggggggtgagttcagatccttttccacataccttgctgaaaatggaatacatcatagacacccttgtcctactacacatcaacaaaatggccttgctgaacgcaagcataggcacattgttgaaaatggccttgccttgttggctcaagcatccttacctctcaaattttgggatgaagcatttagaaccacagtctacattcataataggttgcccacacctgtgttgaacaataaatgtcctcttgaaaccttgttcaacatcaaacccgattactcatcctttaaaacctttggttgcaaatgcttcccaaatataaggccatataacaaacacaaacttgagtttagatcctcaccttgcacgtttcttggttatagccttaatcataagggttataaatgtcttgataaaaatgggaggctctacatctcaagggatgttgtttttgaggaatttgtcttcccttatgaagagtcatctgtccaaaccagtagcacttgtgttccaactgtccaaccttcagttgtgtctgccattataccaagttgtcctcatcctaagacacattataccatgacagatttgctgtcaaataatgcagcaggaattgaccaacatgttttatttgacaatcctcaattatctgatatctctcaacctattacatctgcttttgtacctaacagttggcccacaagccaacaagctgtgtttgatgtaggtcaatcctcaaggcaaagtgctgaaacacaagatgaaacaccagaacatgaggcatctgctgaaacagtgcagcacacagcagtagcacagcaacagcagtcgacacctgctcctgttgctaattccattcctgtagcagcagttgatttacagcagcaacaccaaactatccaagctatcttaccagatattgctagttgtgcacccaatcctgaacaacaaaataaacacagcatgaagaccagatccaaatctggaattcacaagccaaaaacctttatggttactaaagttcctaccacactgcaagaggcattgcaaaatattcaatggaacaatgccatggctgatgaagttctggccctaacccgaaataagacatatactctagtcaagttgcctgctggaagaaaggccattggttgtaaatgggtctacagaatcaaggagaatccagatggtacagttgaaaaactcaaagctaggttggttgctaaaggtttccatcaacaacctgggtttgacttcacagaaacattcagtccagtggtgaaaccagtgacaattagagttgtcttgactcttgctttgtccaaaggttggactataagacaacttgatgtcaacaatgcttttctcaatggagaattgcaagaggaggtatacatgatgcagccacctggttttgaagttcctggccaaactgatctagtttgcaagcttgataaggccctttatggactcaaacaagctcctagagcttggtttgacaagctgcaacacagtttagtatcacttggatttgtatcctccaattcagatcactccctgtttacactacacactcctacattcaccaccttggtgcttgtatatgttgatgatatcattgttacaggaagtgacccgattgcaatcactaatctcattgccactctcaattctcagtttgctcttaaagacatgggtcctttgcattactttctgggaatcgaggttcaacatactgatcagggtctgcatctgtgtcaggctaagtacgctcgggatcttctggcaaaggctcaaatggctgatgccaagtcttctccaacacctatgatcagtaccattcgtttatcagctcaccagggggaaccattggcagatgttcaacactatcg

SEQ ID NO: 309925 - DNA, 1391 bp, Cannabis indica
aaatatacatattgaagctcaaggtggcaaaaataactagacataaaaatgtaaagtcataataatgctcaccaactggacatacgtgttctaaatagaccaccaattatggtcctctaattagcaaaagaaagataatattctagctagtcgaacagtcataattcaaatcacacttactacacaaagacaaacagtaaaaatatagttttttcctacccacaaagattaaatacaaaaacaaacatacaacaaataaaatgtatttacacatctacataactaaaacaagtatgagcatgtacaagatcatgaagaacaaactcaaaaacattcaagggagaggatttagaaacttacctcttgaaagcctccctccaagacttcaagtctcacttcaccaagagctccaacaaatgtgagcaaaaatgatagtaagtctccatatttatagccaaaaaaatagtggatgactgacaaatgtcactcatctagaaagtgatagtaatagtaatatacgagagggtaaatttaaatattgggtacaaggtactatctttaattatcaaatagtatattcatctatacttaatgtatgttcactagacatacaattcgtggatggtggtgctcccttggttataataatatatatatatatcaattgatatatgtgtaggaattagagagcaaactattgggacccatttattggccacacatccaatatattatctttttgacatttatgtgactaataggtatgggtgaatctcactttctttgactttcgtttggctttgatgtgaataagtatggaagagtacataacactctataatatttatctatgacaaaacatatccaagcatgtcaaatctcgtatatgtacagatatactatactatgtagcaccatagaattttgacatgacctttcaaacaaccctttatggcatctcgcacaccacctatcacacaataagtgtgttcacctactcatcttaataaataaagataaagaaaccattttatatatatatggtttcttcaaacgtccattagtcataaggaacaagaaacacatatcatttcgactttagagcaacctacaagttatatgatgtcagctacaaaaaaaaaaaaggaagaagttgaactagacaaacggacacaagcctcatttataacatatatatggtatgttctattcatgttatttctgtatgtctacctacttattacattcataaaaatattatgtatgtctatctcctctcattatttacatacatatttatctccactaattacagatatattatatctgtctatctcctctcattactcacatacatgtctatctcaaacatattatgtctgtctatctcc

SEQ ID NO: 309926 - DNA, 1005 bp, Cannabis indica
tgatgttccccttgctcttcagtttattgttttagcggatatttctgtttaataaagcttattttcgttacaaaaaaaaaaaatcttaacatcttaaagataaacattgattaagtttatcaccgcactagatttttatatacatgatatgtttacgttataatattctctttgcaacatatccaaattgacataatttaagtattttaattttgattattttatggtgtttattgcagttattcaaagctcgtgtacatttttaaaaatatatattttttatagtgccaaaaataaaatttaagtaatttgttgcactagtattttttttacccgagtgaaagaacttgttttaaaatctaattttggtaatacaaactattcgtaattgtttagagtgacgaaaataaagaaaatattgtaaaatataaatctaacattgtaaactatttgtagttttttgaaaactttaaaaattaaacaggattagaatgcttaaattatgttaatttagatgtctatcgtactctccgtacaaaaatgagatactataaacatgcagttaatggggcctattgctccaccttgccccttcataggttagcctatgattttttttatttgaaaagagtttaaatatattaaacaccaacaacaacagtggtgatcacactggggatcacctcccacgagttcaaaataccagaattattctcacaaacaacccatcccgcaagttgatgagcccccatattcatgttcatactaattgagaaaatatgaatacgtaattgttatactcaaaattcggctatgtaccagaagttgacacgtgtccttgtttggttatttttagtattatttttaggttaatttttagtgtgtttttaattaagttatactcttatttggagcaattttacgttttttatcttttatttttgtagatttaaaatagaagaatattaaaaaatatcaaaggaataagatggagaaaagataaaa

SEQ ID NO: 309927 - DNA, 2826 bp, Cannabis indica
gattactatatatatatatatataaatttttcttattattatcattaaaaaaaaggtacactttaaagtttatatatatgttatatatatatatatatatagttagatagatcactacaaatctatattttatgtatatgaatattggagtgatcaattagtatatactcatgcgtgagtgcgtatacatacgtacgtttggaatgtttgatcagatttttcatcttattatatatatgatttgaatgtatcaatatatattaattaataatatgttacctactcttgtaattataattaaacgtgatccttttttatatttatttatttctttttcgcatgcaaatgataaactatagaatttacgtacaaaaagaaaatagttcacttttactactttaattactcctattagaatagtactatttatacttttgtcactataaaaaagattttaattatatcccaaaattttccaattttttccaataaaatatttggataaacatttttttattattgtgagtgttatttttactgtcatataaatatatatatatatatatatattgaattatataatgatactaaaattgtcaatatattattatgtatgtactactactttcagaggggccaaagggataggtttatgattacacgatttaattatataaatatatatatagtactttgatgaaaaataaaacaaatacatttatatttctttatatatctttatgaagctttttctagaagctaattaattagtaactggtaattatgactttgatcatcatatatatcctaattattataaatatttatataatttatacatatatatatatatatgtgttgtgtaatctctagtggcttgaggtactaataataaagctagcatggtctgctttttataaaatcatcttgacttatataataattattaattgatcatatatataatctctcaatatatataggtaattaattatataggcagataggtttatgattatctttgttcgaaaccatgcatcttgcttgccaatatggttttttttgtctgccattgcaaacgataatgcatgtgcatgtgtgacttaattataattataatagaggattttattaaatatatacaccggccaaatatttattataatatgtatataaaaaaagtcaccattacatttataaaatatataaaacaattttgaattattgctattaattaggtatctattagtgtctagcactttctcgacgtgttacattgcgattggttaacgatattctctaaaagctattatattaaattatatggaacctgatatttagttagactaatagcgatattgacacataagagggtactagttagggaccactagtgccctttagcatttctctattcaaaaatatgataacgtcatgtggcgtttggttagaggtaatgaaatggaatggaaaataaacaatttttattccattcctttgtttgattgcattttaaagtattatattttggtagaatgactattctattttaaaaaggaatgaaagacaattccaatgtaataagagaaaaattttaataatttttttatcaattttttttatacattttaaattttattccattctattcttatttctattcacattctcatttctattcctatatgttcattctcatttctattttatgtaagtaatgcttagttttgttttaaatgtacttaatcaatttttaacttaattaattattataatttccaacttcgctttcgatttatcaatataaatatagcatttttatttataaatatcttcaaattccaacatagtcaataacacaatataaatataaatgtaaatgtaaatttggatttggatttggattttccaatttataattaattagagagctaactttaccaactcttgaagagaaaataagatgttattaatgcttattagctggtgagacaaggactaaaggtgaagtagtatgccatggaccaagaactaccctataaacacatgtatttatatatatatatatatatatttattagttttttttgttttttgagataatgtatttatatatttatgtatataggtttaagtgatgtgtttttctagcaatatacatttattaattagcatagcaagtactttaaaatttctcttctttgtcaaattatcttacccatataattggtgcatgctttcaaaattattatttgtattttttttggtaaaattattttctatttctatttcattaattgttaataattggtaaaaagttttttacccttttcatcatgtatacatcacatgaccattttcaagattttctctctaataattaatttttgtgtcataaataattcatttcctacaaattaatgcatgcatgccatattatatgaacctttattaattatatattatatatatatataaataggactctagctaatttatactatatataatgcttagggttggatattaatggtttaggtaatacattttgttttctaaaaaaaaagtagcttgtatatgtttgttgactttattttaatataaaagcgctatatatcacataaagattattattatatattaatttattattatttgtaaagttttaaataaacaaaaaaaaaaaattatgtatatataccactcaagaaattaatattaagtgtgtgactaatcataatatttttagttattttgaaacacaataaaaaattattagcttatcaaattatttatcgtttacatagtgcaattgttgacttttta

SEQ ID NO: 309928 - DNA, 685 bp, Cannabis indica
aaattaaaaaaaaaaaaaaatagatgattggaaagagagtatgccattaaaaagctcacataagattaaatttattttgcatccaaaatatattattctttataagaaatttataattacaacaataaaaaaattctaatggagtataaaaaaaatgacaaacgattgcaagtgtaaacactaatcaaaaaatgataataaatgatatataataatgtctttgttttaaaaagattcatgaagattagtgaaggcttttaagatttttttgtgagtgaacttcagattcttgaaaatataaaaataccgtgtcaaataatatgtattacgtgaatatatgacataaactttaaagaagtattggaacaatataacttttggtaaatactataatataacttttatgaattttggtaatactaatcaaaatactttataaaattaagaaagaaaaatgatatatttcttaacatctcttacaccagtaatggtctctttgcacatcaactcaagaagcctccaccttcactttagtccttcttcatatgtctattttgcttcttcaaagcacttaagtaattattttttgctcacattagttttatggacaacatttcttctttgtctaacaattatttatagtaaaaaccaatgagattaaagaaattcataaaattaaaactga

SEQ ID NO: 309929 - DNA, 1188 bp, Cannabis indica
agagagaagaagagagagggggtgatgtaaatatggagtattttaggaatattataaaatgtgtcatatcctacaaatattaaatattatgagtttaggggaaattttttaagtatatgtaagcataaaaaaatcaaatttctcattgtttttcctctttgtttgtgtcatcacaactttcattttttttttctttctaaaatccatttctatcattcttaaaaaaaaatctagctacattgttaattatttaaattttaaaaaagtactattttgacctagctatattttaatattagggaagcatatatatttttttatcgttattagataagttatccataatcaaaagcaatcttttagtttattttatatttagttaacaaaaattatgcatttttattacctattcgggttggctaacttttcatttttaagttatataatattattgattatattaccaatggaggcttgaagcgaggacgttacactttttctttgtatatccccctaaaggagggattcaggtgataacttggctcgtagggtcactaattttcggtctttgtatacctttgtccttattgcggcctctattcgccgaatgtaggctttaaggctatcatttggtggttgcttgacattggccaaggagctaacttccatattaaaatcttgagcagccacaaacttcttcttgaacatagagtgtaggtcacgctagttcctaactgatatggagggtaacctcttcaacaaatcctcaacggataaaatgagggagaaacataagcatttctcgtcgtcactaacgtgcaccacttgcataagcctgctataccaaggcaggtgagccctggggtccgtcttgcccttttacaagtccatttgaagcatccagaagtgctcgaggagaggtgcttttagaatcttcctaacacatgactatgggtcttcgtcttcccagtcagatgcaactccattttgtttgcggaccagacggtccgtggtcttggttaaggcttctatctggtcttccagtcttctgatgttatcatcatggagctcacacccatggattagatcattagtgttattttagagatctcctctacgaagccttgctctttcacatcttactttctcctgcttagctgttaatgcaaatttcattaaccaaatttg

SEQ ID NO: 309930 - DNA, 1828 bp, Cannabis indica
tctccgcctcccacagctcaaaaacgccacttttctcctctatttcttcactcacaaccctgaaatcaccatcctcaacccctaaaatattatttcctcacattttgaaactaaaaggaaaaaccctaattagttttctctcatctctctcggagccgccgaactccgatctctctctaggttcaacctcaaggtatgcatacatatttgtgtgttattttttttttttaatttcttttgaaaatttgtttgtattttaatatgtatatatatgtatgtttttatatttgtttgaactgtgttcaatccaagtgtacattgttgaacctagaaagatagaacctcaggcgtatgcaacccaaaattaaatctatgtgtgtcattattcttttgctgtagacatggcttcaggtagtcttggcttctaaagcctaagcaattgaatcagttatggttggtagatatcatatgataaaaccagtgttagtactgcttcaaaattactcagaaaaaaaaaaaaaatcaaagaaacgaacaaaatttgtttaaagcaacaagtctgaagtgatactccttgcacattttactgttgaataaaatttgttcaaaactgtgaataaaatttactgttgaatagtgttgaaatatttgaactaatcgccactaactgcagaccttcatttgttaattagaataattcatttgatatctacacactgattgctgtgattatatgtcaattattactttatgttgttttcgtctatagtttgatcatatgaaatattatgtgatgtcctttattgattattttgtttgagaaggagctaagctgcattccactgtcgactattttgtttcagatgaagtcttaaaaaaaagctatgaaaatgtatctaattaatgatgatataaaaacttaaacaaacactacttagtgaggttcacattgcattagtattggtagttaatacaatactttgatattgacttgtactaataatttgtgtaaaattatcaattttttacaataaactcgacctgaatcccgactatggcctagactcgactccggactagacctcagactcggaacatgctttggacccaaacctggacctggattcagatccagacatcgaactcggaacatgccccagatgccgaactctaatctgaaccccaaacttgaatctcggactcgaacccgagtcccaaacccgaacccgaggtctagggtctcggttcgagtccggtttgcagttcgggtctaggtccgggttaggatcaaggtccgggtccagtgttcgggtctggggtgcaggtccaggttggggatctaggtttgggtccgtgtctggtccgagtccggatcggaggtctgggtttggtgttcgtgttcggttccaaggttcgggtgttggtctggcttcgggtctggggccgggttcggtattcagggttgggggtcggggttctggtccggggtcagtgttccagtctgggctccggacctgtgtctgggtacgagtccgggtctggttccatattgttagggtatgggtccgatgtccgggattggggttgaccctagaccctttgtaagcattataaatatacaatttaatacgggtcatttgttatatattaaataatacgactcacattgtattaaaatttatgattgtaataattaaaacaatacaatattttatttaaacataatattatttgttatttaatacaatacaactcgtatatggtttaccaatcaagccctgaactaaaatagttagattttgataagataagtcgagtgatgttttgg

SEQ ID NO: 309931 - DNA, 736 bp, Cannabis indica
ttataatactaaccccataaaaactctaataggaattaaactaataatagaaaattaataaaggaaacaaaaaaactaaaacagaagagccactcttagccgtacggctgaaaccgaaccgaatacatctgctccggagccactctcagacggtggccaccgaccgactaaaccgaacagagatgactcgctaaacggagacgccgaccgattgaactgaacggagacgactcgcatatgggttatcgcagaagcttctggacgttcctctccaacgcaatatgttcctctctcctggcctctctaaataagatatttatttatttaaaatattaataataataataatattcaagcctttaaatatttagtttaaatatctaataacaaattaaggaaatatctcaatcacttgaaaaaatatttaaattatctgaacagaatctcttaaccactttgagagaatatctcaactataaataaagatctataactaacttttaaatttaaatttttgataaatatttatcttttgaattaattaattaaaaaacaaatccaatggcacccatcataagtttttggcgcatatcattattattacatagttgattctcaccatcttgcaataacaatgatgtttgtcctaacaacttttttgtctctccaatttatttaaagaataaatttaaaattaaattatttattataaaaataaataattactattttgcta

SEQ ID NO: 309932 - DNA, 3149 bp, Cannabis indica
gatgttaatgaaacatacttggtagaaaatctagatcctggtaaaatatttccaacatcgtctccgcatgatgtcaattggctctttaatttgaagtctacccctaagaagatcaggttggggtacttctatttctctcagtcggacggcaagtggctgacaggcaccgtggacacgaaggttagcaaaattgggcattttgttgacgagtattacttcgtggagggcatggagactgtgcacactcggtttcagcaaatcctcgtatactgtcgtcctcccttaacactgaggcttagggaaagggctcatagaattctccaactttcggatgctgctcggaatatcactttgttggcctcagaggccaactttgtggagtacaaactttacccgacagattttgtacttaagtcggtgaaggggaggaagaagaaatccaggtcgggccaggccgagggagttgagcaagagaaggagctcattcaactcaagcgtgaggctaagttgaagggtgatgctggagccaaacggtatgctcaagaatattctgagcaggagaaggagactcaagaatattcagagcaggagaggccgcataagaagaagaaaactctctcgaccgatcagaggctaatagaacatgcaatccggattagggaacctggcgtgtctaatcagtcgtcacttcatgtcgatggaaagagaaagaccatgatggaggagcaggaagattcttcggatgatgacattccatccgtacttattcaagaaaatgctcctgccagcgtgcagagtacttccacttgcatatattttctctgattttatgccttcatatattttatatcttcctttgactgtattgttttgcccgtgcagaaatgtctcagaagaagattgaggctctgaagaagagagtaggagggagctcgggcttgtctactccgactaagaagtctaagggtggttagactctgtccaaggagaagatgccagttgaggaggtcattgatctctttgaggagcaacccgttgtggattcttctaccttgaaggtcgttaagtccaaaagttcctggggggagttcggacggacctgagcaggctaagactggatccgagcaagccaaaggtggatctgaacaagttagggtccctgctccaactctggtgttgtgcaccgagaccaagagaggcaaagatatgcttaaccactatgtgtctcggtcgctcccgaaagtaaatgaacagctgaccggggcaaacaatgagttgtctttggagctggtcttgggaggagttttgaaggaaatttctcgagtaagttccctctatcacttttctttcatctttatttggatagtttggattttaatgcattccccgtacaaactggtctgaagatggcttatgcatactctcgagccaagtcaatcgctatcaagaaccttgccacttccaacacaatgtgaagagaagctgacttggccaagaaagatgctgaagatgcacggacctagctcgaggtcgtgaggacggagcttggagaagcaaataagaaactctttgctgctgagaccagggttaccgagctgaccaaggagctgcaggacatgccatcaactgcctagcttgaggcagacaatgtttctttgtctcaggaaattaccagtctccaagatgagagagagggtctctagactcttcttcgcagggtggaagaggaggtcaagttcaagaagaccagggaggaggagctcaaagctgaggttaagagccaaaaatttaaggtggaggagctcgggaagagggcggataccttagagacagctgatctcgagatttttttatgacttctggaaggccaatcccaaagaaattttgaataccttggcacttccaaagacatgtttctcgactactgaacggctcaggcagccaacgagaaccccgaggcgacccatctgctgctcaatctaaaaactttgccatagatcctacagggccacttttcttaatgtctttccacagttctccaagtacttcaattcccccagtatggcggccaacctcccctcttcagttaaccttactacttttgtagcttctgtcatgaacctacttatgtaggctctaagaggctctcctggtatttgtttcaattcaaccaagacttctaaatataatgggagttggagagaagaagagaaatgcgcatggaactttgaggaaaaagcttttcatgaattaaaccttcctggtggtaacttaaaataccactgttgtgcggcttttgaaagtgtggcaaggaataccctacaccacacatcacctcgtatcccttgtaaatccattcgcatctccaaatatttaagacgtgacaaggatcctccttccctgtgtacatctttcttaaggggtagttctaggacattgatcttaggagtaaagggtgacatgcgtgctcggtctagctcgagatcagtgagtttttggccggctaggccttggaacatattttttagttcatccaattgtgcttgcacagatggatgaaccggttcaatctcttcgccgatctgtgtcacgtcaggatctcttagagttggatcttggatgtggacacctggctgaacggccggttgaacgtattgtttgtccagacctcttcttctgttcaaatcattcctgagatcatgggctgtacccaatttattgaaaactgaagcaccaagttgcctcagtgattgatttggtttggccagtttgttggccataactgtcaggatggagttattaggtataactccacctaaagaatggttagatttggtttggccatctaccgcttggcccacaagtgggacctgtgactagggattggacggttcaccattatgagtctgggcagtatgcccagcaggaatttcttctatgtcgcacagtgggatactggacgtagcagctagttgttgattagcaacttgatatgtaatgaccactttagtaatttagattagtaaaggtaattagcactaatttctattaattttatgattatttatgaaattaattatttgtggaccccaatattagaaatgaatattagagttataattgctcaatttcggagattttattaaact

SEQ ID NO: 309933 - DNA, 978 bp, Cannabis indica
aggaaaatgatgtgtaaaaatcctttctttttttgtaacaaatgacagaatcttgtaaagattgctctctcttatcttctaatagtggtggtggtattggtggtgttcctatgatttgattgatgataataatagcttaaattttactgtgattgatcaacaaagagtataccaaaacttcccaattccctgcatattacagaaccataaattgttagtacatacaaaacacagaagaagagtttaaagataacaatttgatcatgaagttgaagctactcctacttgattttgtcgaagcacacaaactaatggcctatttttcgataattccgtgcagaaagatcttttctaaacacactcgacatcttgtctaagagggcttttcggaagtgacataagctgaactactctattctcaccaattactttttctttttttcgaaactaggattctcgcctaaccctacaatatatgaggaccgggaaggacttggaggagcaaaccacatgcctgaccatttactcttaaataaaatcctacaatgatgaaataaacttaaggatgagattcaccatctgagcatcataagcggggccttccatttcgaagtggcttacaccttctagtagttgagtttcgactcgtcctgcagcagaagacaacttgttattcagttgctttacacttgtgaatccatccttagtccccattacaaagagttttggctttggtgatgatagaatagctttgtggtgtcttccaaataagactgaggccatcattccaaaagggtatcccaaacttacataccctacaacatgttcaatttgatcaactgcagaccctgcaattggtgcacctgcacaaatcattgtaaccccttttcaataatccaatgattctaagaccaaaaaaagattatgcaattacagccttcccataatcaaaacagacaaaaacataaactgtatcag

SEQ ID NO: 309934 - DNA, 1393 bp, Cannabis indica
ttccttgggggtatactcagcattcagaatgcctctatgaatctcattgatcttaggaccaagatcaacaacacactgattgactttcctcctttgtgccatggaattccccaacaatccagtataataatcaagaaaggcttcctgcaccccatccaaactatcacaccagatgccattcccatcttcaatggaaagaattctattatgaactcttctaacttttagagatgcatgaaacaaagctaaattttcatccccatatttcatccatgccatcttagctttttgcgaaagaaaaagaacataggccttgtgaacctcagaatacctcctgcaagcttcctgttctgctagcattttttcctcattaaggggatctgtactcaactgtttctaagcttcttctaatgcctccttcgaaattttttcagctttatgaatctctgaaaatctttccctatttatgtctttgaacacctgttttagccttcttaacttggtgactattcgaaacattttggatccctctgccatctgattccaactcccagccactttatcttcatatccaggtgtcgttttccacatgttaaagtatctaaagggtttttttccaaggtggctttccatgtaaatggatacaaggatcggactgttgtcaaaaacaccttcaagcaaaaacactgcttcagattcctcaaaggattctatccaatctgagttcaccaatgccctgtcaattttagaaaatacactgtcatctggtttttgtttattattgcaggtataaaaattacctgagaatttcaaatcactcaagccacaaaaatcgatgcagtccctaaatctctgcgacagattactccctactctttttccaaccctctcattggcattaagtattgtaaattatttttgggattttcctaaattgttaagattgtgtttttgtggatatgagtggtgagcgggttttgatcggtattggtgactgaattttggtaataagataaaaatttaaattctaatagtatatatatttgtattttgtgttgtattggatatgtattatatgtttatgtattttgtaaatgcactgtatgtataaaaatattttaattatattatatgttttgatgtattgtatatgtatatataatattttaaactaatagtcactacaacaaattactattttttgtgacagtttttagtcacaacataaatttgttgtgactaaatgtgacttttagtcacaacaaaaatttacttgtgactgaaacatagtctttagatataagttgtcactaatttaattttagtcacaacaaatattgtaactaaaaatacatttagtgaacaaattgtaatttttgtaactaatattgtt

SEQ ID NO: 309935 - DNA, 1651 bp, Cannabis indica
cacattcttgtttggactcatgtggtaagtattgtcaaggatccattcatcttgatccgtatgatctggtgcaggcatgtccaatccttgaagtttcatctttaaccttgattaatctccattagaattgtagttgtcatccactacaacattggaatcactgccattatcttcttcttccttgttcttctttttactgtctcttaattctcaataatttctaattaagtgacccacattgccacaatggtaacacttcctggtttccctgttcttgatttggatctagaatttcctctagatctagaattatctctcaatcttgaactgcattgtctatgttgtcttccttgagacattaaagcttcattagacatggattcttgctttgctacctttttccaattcaattagcattccttgatcttagagtgctcgttacatcttctaaagtgagagtgccactgctatacattataacaattctcatttctttaaattgattaggcaaataattaagaataattacaactttaatggcttccgcatgttgataagagccaaaatagttatattcaaatcatctaaattttgttctaaggaaacagtagcattcatcttaaaaccataaaacttctctttcaagaagatctttatagcaatggacttagccatgtagatttgatcgagcttgctccaaatttccatagaagtcttctctccaataacttatcccaacatattgtctgcaaggttcattattagtgtagattgagcctacttcatcacagtatcgatttccttcttcttggctgaaacaacttccttctctgatttctcaacactttctttaagcgccgaatcaagtttctggtaatatcaatatggccacaatcttctccttccataggctaaagtatcatgatccatcaaacctttcaagatcaaatcttacacaagatgaagccatgtttgagtggttcttaaatcttaacagcttgttaagattgagttttcctcctcaaagttcctagctctgataccactgttgtaatcatacaacacagaactccaaccaaagaacattcaaacaagttgaaaccaatcacaacaagattaacaaatatgcaatcaaaactagaaatcaaaacaaagattaaaatgcagaaaatgaaataatgagacacaagaattttatacaggtttagctaaacaaatgaccaactttctattactcttctgagttatcttctcaattaatgtgatgaattataagtttaagttgttaagtgcatccagaaataacatctgcaaaagggagaatcataagtgaaatttttgtgttccgagatttcttttgtttggaaataataaatccagttcctttgagatagtaggacttgttgatgaaaataacttttggaaattattattaaaataccgatatccaatcttttattcggccagctaccatcagagttttttatgcctctcatatttgattttccctccttcgtataatagtaggagcatgattctcaagttgaagttaagattctctaaatttttgatgccataatttttcttgattttcccaaaggatctatagtgtaaagcccgcttagttaatttggaaattagcagttgttta

SEQ ID NO: 309936 - DNA, 1784 bp, Cannabis indica
atttggtagttgttataggttggttgttggatgttgtagcagactcagaggttgttgcaataggttcagatagagttgttgcttcagtaatgtttggaacactaggaagctgttctttggcaattgactgaaatagagcagatgaagctgaagtattatgagaggcatcggattggtgatgccgatttgaggttgaggaaaaagtgtcaatttgagtagtgtttttgttggatgtattgagtaagggataaattgactcataaaaaattacatccctggaatggaagatgtaattagtttgaagatcaagaagtgtacaagccttcatgttgtcggggtatcctataaaaatacatgctcgagctcttggagagaatttggtggggtggttaacatgagaagcataagctagacagccaaaatttcttaaacgattataagttggagctttgtggtggagaagctcgaaggatgttttatcatttatgaaaacagaaggtgttcgattgatgagataggaagctgttttaatcatgtaactccagtagagaagaggtaagtgtgattgaaatgctaaggctcgagcaactgacaaaatgtggtgatgtttgcgttctacaacagcattttgttggggacaaccaacacaagagtgatgattaagtatccctttgcttgcataaaattgtgtaagtgtgagttcctttgcattgtcagttctaacagattttatatccgttttgtaatgaactttgacatatgtgaagaaattttgaatgataagtggggcatccgatttcgctcgtaagatgtatgccatgtatatctagaatgatcattaacgatggtaaaaaaatatttgtatccttcaatggaaggtaaggggtaaggtccccaaatatcaaggtgaattagatcaaagattgcttttgcaaaattattgtttgaaatgaaaggtaatttcttttgcttggataaatgacaagtaggacaatgatatgtagaggcaagattcttattaaaatgtaattgtttattgattttgttagtaatgagtagatggatgaccaacgcgtgtatgccattggttttgagatagtacattacaagaaaggaaattacaatttggaattttaaagagatcttgctgaaggtaataaagttgtccttgtttcctagctgtccaaatcttcaatgtcattgaagggtcctgtatatgacagacattaggagtgaagatgagagtgttaagtgtgttatgcaatagagcactaacagaaagtagattaaacttaatgatgggacaaagaggacattgtgtaatgtgatatgagagttaataatcacactgccaatatcttttatttggacagaggtgccatctggtaatgtaacatgtttgttgtgtaatgtcttagtaaaatgggaaaaacattgtacatgacagcaaacatggtgaatggcaccactatctaattgttggaattattttaccaggatcttagatctactcacaagtatgttgattaacatcctaagtatgaacttctaaaacgattataagtaaacacatataaagtatgaaaaaccttacattgggtgcaacggaataatatgtctccttccactcagatctctaacccttgtatcatttctgtcgcagagtattatcaagatctgagcccgaatgtccttcttgttgaatctggattcttcacgatcttccacactatgattgagataccacttgctgtgttgggcgactactctatcactaaggggtt

SEQ ID NO: 309937 - DNA, 1691 bp, Cannabis indica
tagtccacgagtcatttctatttaatatagtactttttttcttacagaggatgttttacactattttttctgaccctttcatcagaatatagttagggtatatatagcctcataaataaggcaaaaaaattactattgtcgcaagtgttgaagtatgacttgcacaagttcccagattcaaataataaggtatgcatgtctgtatggtaggttgcacaagttccctggaaatgggcaagctcctggattagatgatgatgaagtacctttgtctcgtatttcacggtatttggagaagagagagaaggctctccaccagtgcctcgccggcgagggtccggtaggtgatgcttctcttcatatcgggcctagaggctaggtttctgggagacccactcgtcccgtgcccgcatctaagggcaggggtaaagttgtagctgaggactctaatagtccctcttctgatgatgatggtatttgatagttgataacatcgtgcctttgttattttattgagtgtttatgattgctttctaactttgctactttcgttttgcacatatgtgctccaggttgagaggactcactgacgatccttcggatgagcctacaagacgaaagagggccaaggtggccaggacttcccgtggtgaggatgttgccggtccattactgcctcgccctaccaagacattcatcagccgaacagcctgtgatacggcctactgaccaaggtactaggaggcccagcaatgcagcggggatagtttctagatagagggctgctaaggcagccaactgttgcatagagagggctcttcctttcttggatgaggatctgaaagagttgggtgacggtggacctgacaggcttttcttggcactgtgtaggctggtcgttcatgtggcttcttgcatgtggctggctagccatggaagcttatgtggggggctggcagagcatggcagtcccaaggggggactagtcggccagcgttgtggtctttgacactaatgttattttgctttattttcaggccctgataatactgagctcacctcgtgatggctctaggggatcttcaaatgctttttaggaacgtgtgaagacattggacgcttcccttgtagcaaaggacaaagccaattttgagctagaggtcattctggcaaagaggtagagaatagtttctggcttggagaccatgcttaacgccaggaatgcaaagaacactgcccagactgccctcatctctgggttgcatattgaccttgttgatcacaagaagaagttgcaagaggttcctgatggccaacaggccattagagaggagtatgttgacatgcctctgaacttacttatgagttcaagttgcataaccctcgtgctatactgtcatacatgggcagccaagcttttgtggagagaatgttggcccaaggaaaggcattactggagagccaaatggagacagaccaggttcttacctatcgagaagggtcatcatcggggatacacgatgaggagttggccgacccacctatggaggaggtggccagccatgacactaaccaccaggtccgcccgcatggtgatgatggggctgaactagactctgtggatcttaatctcacgactccagactcagctcctgcacacatttagacagtatttttattagtagcattca

SEQ ID NO: 309938 - DNA, 1933 bp, Cannabis indica
ctctctctctctctcttgcactcgccatttcctcctccacctttttagggacgcacccaccactgcctccacaacgctggaccaccatggagccaccgcctcctcctcctttttcttatgttatatatattatttatacattttgtttcaatataaaaatttaaatatttattcattaatatattttaatttataattttgtatatttattttttagatttaattttatatatttgtgaatatgtttgtgaaaatatcatgcatgtatatttttgttttttagtggaagtttagtaatgtgtaattagttaagaaaaaaaatttgtaatgtgtaattagtagtttaggaaaaaaattagtaatgtgtaagttttttttaaaaaagttagtatagtttattataagcttagtaaagtttaggtaatatcaaaattttgatctatctaagttaattttaatttcaattcttaatgtttacctgatatgtgtattttataattagtttttggtatgtgtatttttttaggtttaggtaaaaagtttatttatttaatttgttattgtaaaaattaattaattgtgtaaatttagtttaggtaaattatattatgtgatttaatttaatttaatgtattactgttatatgtaaaaaaatagtttagtatatgtgttataatttataattttttttgtatatgtttatttattataaatatgtaatgtgttagaaaagttctattattattgtttattttaaattgttaatgtttaatattttaggagttaattgatttttttagtggtccaataaagtccttttattttactggtggttctccgggcgatctcttcattcttggtatattattatttgattggataaatttatgtaatatgttatagaatttgtggaaatcgattagtctcaattaacaattgatgcataatttaaatttattttttaattatcgggttttgggtgttgattgtagagcaaaaaagaagctaacttttttggagaaagttataatcactaaaactttaaaattctttatttagtggagtttgaatattttagatattcatccatagtgaagtaggttctgcgattaattgtattgcggccggatgggtggaatatgcatgttagatgagattgaatatctttggggctaaaaatgactcagtttggcttccaaggactggcatcaaggaattgtgcagcctagaatttataggagcccaacctataacaatttagtgcaaggatgatattcaactcttaataaacttgataatttgttttgagagcttgttatttattatgtgtttttatcagatacttgaaggaacagttgcaagactaatggattaaacagaaaatatgtatttctaaatcttggtgtcattgccactgaggctgagaatgaaagtacccgttgtaaagcactggttgaacatatggcgaagaccgatccaactaaatgggttgttgcctcctacaacaatcagtaagtaaatttaaaattaataatttataactctacataatatatattaatatgtattaataattttaccatgtttgtttgtgtagaaaaatacttcattgatgcttgtactcatccaatcaagtacacaaacagtggcgtacttggatattccaacaatgatgaagtaccaaaagatttgaaattcatcattaccacacaggttctataactaacatcataatatataagtgtgtttgatatttatatgctaactttacattttgagtaggttgatcaacatgtataataaaatgacaaattgatgcaatatttgtctcatagagtggataactctgatatgtccataacaaccagatgagaaacaatgtggatactgttggaagttattttaccaggaacttagatctactcacaagtat

SEQ ID NO: 309939 - DNA, 881 bp, Cannabis indica
aatactgtttgaatcctattttcatgtaaacatagaaaaattctacaatacttctccttaggtttatggatgtaccctttatttattctgatatttgcatgaattttttagtctaatttttttttatggttgtttttatgttgttatttagaacatcctgtaaaattttaaaaaattcaaaaaaacttaatacgcttgaaataggattcaaattgtctattttacacacgtataaaataaaaaagtagtgtgtaacagactatttgaaccctatttttgttttcgatgtgttaaaatttttgaatctctctaaattttacaggatgttttcaataactacaacgtagacgataatgaaaaaaataaactaaaaaattttctcctatggagaaatagatacggaatgtattggtggacctcttttaaaggtaaaaaagaaaatcccttttatggtgacttttttttctcctttcttctttttcattacaccgacacgtattagatttaaatgttgatggagtagtagatattttggttaatgcaatgctccatttactcaaatattttattaccgataatcacttttcatgttatagagcaataattgcatttcacactgatctcctaaccttaattatcttcaaaattatatattttttgttatttgttatcatacctttggttacccttacaaaaattaaaaaaaaataaaacaacataaaattaccttagatatgatcacagtatgaacatcatatagtgatgtactcctagatacaaagaacaaacgacatgaacttcatttctaattacttaaaagacatctatatttgttttcaagtcttctttctttctcccagcaaaaaaaaaaaacgaaaaaa

SEQ ID NO: 309940 - DNA, 863 bp, Cannabis indica
ccaagaatttcacaatataatcagccacgacaagtaactcccaacatcacaccaaatacccttacaatatcaatagtactcaaattagatccatcactacttggcagccatgataaatttgtcactgatagtttcagaaccaattcaaaactccacttagcaaagttatcaaatttaacacacccacacacctccacttactactcggcagccaagaacaaatcgaaataaacaaaaaaattagcagtttattcttgacaaaccagtgggaatttgttgtgatggatcagctatcaagaatgaatggaaatgatgatgacgaaggctacttctggtggttgaacggagctggtagttttgtgcattgaatggaagttcgggtgggttgttgctaaaagatgaacgtgatggtgaaggtgatttcaggtggacggcgaacgttgggactcgtggttgctgaagcttagttgaaggggagttcggttgatgcagggaatcgtatggatgatggatttgggtgaagtggtgatagtgagtggctgagttgatgaatcggaggttgagtcgacaagaagattgctgggttgacgaggtgaacggagtcaagtgcgggttgagttggatgatgagggcttcaggtggagttgctggttcggttggtgaagggaagtgaagaagatgatgatgaatgtgttagggttgtaaacattgggctgaactaagtgggctgggtgaatagtgagggggcccagtttgacttaattcatagacccattagactatagggtcaacatttgattaaaatcactctccacaatcaaccaaaaaaaagaaaaaaatcacccagtacaatggctcaatga

SEQ ID NO: 309941 - DNA, 603 bp, Cannabis indica
aatgaaaaaatccttatttttttatcaataactatgattaattagttaggtactttaattagtggcagtggcagccgatcgaactactgattataatataaatataaatatagtaaaataatcaatttattattgacacgtcagtccaaaaggttatccaagacgtacattagaagggggaaatgaataagaacttttttttgaacattaaaatatgtttttggataatacatgagtagttgtattaaaaacgaatttatgtaaagttattttttttaatatgtattattattttattttatgtttattaaatgttatttttttaattatttttttccatatataattatttattaaaaacactatcattctcttaaaataaaaatgatcatttacttcttttttcttctttttccttttgttaaaaaaaaaaaattaaaaattgcttatcaaataacctaaaatataactaaaactaagatcattgatatttttttttaaagtaaaaataaaagttgagactcagaaagtttttaatggcaaattaagtcaaagaacaatgaaaaaaaaaattatacatatatctcttctctcagatcatat

SEQ ID NO: 309942 - DNA, 2645 bp, Cannabis indica
tttcccagcacgtaaatgcactggtaaagttaaacttttgccactacaaaatgtgtgatggtaaaactttaacctttttgctagcgcaatttgtgagatgcgctggtaaaagttatttttaccagcacagtaacaaattgtgctggcaaaagtgacattttttgtaatgttaattcaaccatttttaagtttaatttaaaaatatactaatgtcagtacatttttgcattggcaaaacggaatctacttttgatgtgttggcaaaaggagttggcaaatcaacattggtattagaacttttgtcggcgcaaaataaaaagcgctggcaaaaatgacttttctcaacacgtaaatacgctggtaaaagttaaacttttgccactacaattgtgaactggcaaaactttaacccttttgcagagcatcttggcatgaacttgacgtggcttggccaagaagttgtcgaggtggagcaacttattcagtcttgaaggctgacgtgatttgggtgtgtcgaaccgactagctaattccaggccgaggtgaagaggtatggccatgagggcctctatctctcgttttgccttgatgctggcttgagtaaaatgtttggtcatgtgagttaaaattgcttgagcatcatgcttggacacaacttcctttcatcttgaactatgtacctccaagatggagtttaacacgtagagtggagactcccttgctatatgagtttgagttacatgtctcatcccattagatattcgagttgagttgtttctcctactcgaatttgacacttgaataaagtctcttactcgagtttgatacttaaatatagttaaagccttttgctctatatttcgatgtgctagcagagttataatctttgctcgaggttgtgttttaatttccttagttatattattccaagtactttatacactttatttttctaaattttcttagttaactagttgttatggtaagtttgctctttgagctcccttgattaacatgctccacacactagttatcttttggagttaatactcactttctagattaagtgtttatcatgtgactataattaaatccattacgacttgtagtttaagagtttgtgaattcttaaaaaaatcaccacttttctaaaaatctttgttaatgatagttataggatttttcatttgagtatagttatgtatacccttatgccccctaaataataaggtttaattagtgtcttttattacttattttttgagtttagaaaagtgactataattatttttttaatggtaactatcttcgaaagagcttactgttctttgttgttgggggttacgaggtgcaacaccctgttgagcagtatgctcgggtgctggtagtctaggaccttgataaataactatcctcctgaggtagaggttgggtgcgtccatgtttgcttggtatcagtcttgggcgaacatagttatctcgggagacatcatgttaactttcccatccatgtcccctaggttgaggttttgggggaatgtagctatcccatgaattctcctgcctatcccaaggaggtcgaggtaagtcttgacatggggggtgtactggtgtggtgctcctttaggttgtgacctacgtctctgacttggttgttgtggtggtggagcacgagcaaaaagtggctcgggatgacatattggtgattgagggaatctaattggtgatgacgggttttgtccatgaccccttcctccttcatctacaccaatgtccttaagagcaaaagatggttgaaaaggtggattggtgttgttgtgtgtcgtgcctcactcctcgcgagaattttgttgtggaggaggggacgttgttttgcgtgtttctaggttcgtgagtgtccctctcaatctgatgttgcccaggaggaggtgcatcatttcttttgttctcacgacttggggtagctacccgagggggttgttattactgaggatgctcattcctccggccatgggtatcattttcatgggaaggttgttgtggtacggtattacgggtggtatcctaacttcgggtcgccatcgttcctgacctagacctctcttgaattttggcatgatggctgttgagaggtccccacgaggtcatcccattctcgccgtaccaagacgcccaagggctccacgtcgtcgtggtattgcgacctcttgggcatcatatctctcttgccactctctattgagtctgaaagtctcatctagacattggaacaacacctcattttccatgaacacctcatgaacattagtggtttgtcgtacaccatgagatggtgacgatgaacttccagcatcacggacttgaccttcgtcgtcaggcatgagtttttttcttagtagtcgtgaggtcccttcacccgtgggctcaacaggttgaaattcctttgggtgatccatggtgttttttctcgttcatggggatttcaatgtcttccttctcatagctcattcacctcatactcatctaagagagttctacatgaaaacctatataaaggtgatatcaattgcaaaggactccaactcattctcacaaactcccactctcattttaaaaactcacttgaggattgaactcttagagaa

SEQ ID NO: 309943 - DNA, 838 bp, Cannabis indica
ttttttacctcttggtgaattatgtcacagccattagcatttctctaatattacacatgataatactatttttcaaactataatctttgtgattgagatgacctcaactattcgaggttggacgtagttcatttatacaaatttcatcttttttttttcctatttttctttgcatatttttcacttcttggtgaattatgctacactcattagcatttctcaaatattacacatgataatacgattttttaatgtaacagtagctaatttaaaaaaaaaatgtgactagttaaaaaactattatggtacacttgtgtaagggtcaagaataaaatgataacaaaaagtacttatgaattaataatcacacatgcatactgaaattaaattagttattacatatgttatgattggccactaatggaggattacacatcaactaactaagctcatctaatcctaacggtattacctaactgtcagttatgacagttaggatcgagtcttgaaggaaaaggctataaatagccatctgctacagcattgaggacatgatggttttttttgggaaaatcagagagagctagttcagtgtatcatagagagaatttttgtgtgagatgagttgttattgaagcatggcttcatgagtgtatgtgttagttaaacaccttgtaaaacaacttgtaatttctctcatctagcatcaataaagataaaggccttaggggctgttctggccgaggagtaggcaagtgatcaacaatcacttgttcgaacctcgtaaatctattgtgtttgatctcttttctctaattcttttactgttaaattgatt

SEQ ID NO: 309944 - DNA, 1792 bp, Cannabis indica
aactttaataagtcaattattagcaagttatttgacacaatctaagtgaaagaatcacttttattcactcattggtcttacaaatgtgttgttgctaggcaacgaacatacaataaaataaaagcttaaattctttaaggctacttttaaaatcaaaattattcacacatttttgcacgacatactgtgcagaagccgtctcttaagaatgacattttatgtacaaattcctgtgtgccataccacccaagaaccactatttaagagtagtatttttttttacgaattggcttattggtagtactttctaagatgttctccattccaatatctaggtaataggaccaattccatcttctcgttgtaccggccaagtttgtatgcacttaaacatgtgatgtcagtaacttagtatggcccttcccagtttgggccaagtacccctgctatgggctcttttgtgtttaaaaaagatcttcgaagtaccatgcctcctacaaagaattttttgttcttgatgtgcttgttaaattatctagccactttttgttgataagcttgtaactttaagttggcctgatctcttttttcttcgattttgtcaagtgattttgttaggagagtgtggtttacttcttggtcgtaggataccctcctatgagacgatggttccaattcgacgggtagcattgctttatagtcataaactaatacaaaaggtgcttgcctagtggtcatcctctcagtggtcttgtaagactaaagtacttctagaagttgttcaaggcagtttccctttgcctcttccagatgctttttaaatgtgtctttaagggttttgtttacaacttctacttgcctgtttgcttgtgggtgagcaactgtaggaagcttttgataatgttgtgtcgattgtagaagtcgataaacatatcactgtcaaactgattatcattgtctgatacaatcttgtgtgggagaccataccggcagatgatgtttttaacaataaaatctaaggttctggctgagtttctcagccaaccctagttcgtgtgcagcagccatgaacactaaacttcgaaacaccatatctcactcaattttaatctaaattgagattcgtaaaattctaattttcttatttttcaaccaactatcaatataaaataatttcaaaagcaaaataaaattattatcaatagaaaatttttcaatatcgcattcaatcatcaaggcacataaacaaaccatgaatcatccaaatcaaccatgaaaacatacaaaattattttaaatttatatttcatgaataataaatcaataccatagctctagtactagttgttggaaaatctttaatccagatcttaatttactattcaagtatgccgattatcactaatctagcatcctaaatataaaatttctaaaacaataatgtaaacacatatcggatatagaaatccttacattggttccagtggaatattatgactcattccgttcaaacctctaactcttgattcatgtttgtagcagagtttaattaaagatctgaacctggattctcctttggacaacaaatatactacatagtttttctcactatttggagtattgccttaaattatgtgtgcaatctctcaacaaaaaggagcacgaatttctatgaagaaaagcaagcgttaccaatgtaaggatgctctcatccatggaatactcttattccactaaaaatttggatgctctcatccatggaatactcttattctactaaaattaaatttat

SEQ ID NO: 309945 - DNA, 1388 bp, Cannabis indica
catgtgagtctaaatctaatgactgacaaataatggggcttaaacattgaaatatataatcatgattatatttcactgtgttgacaacactataatcatgaatgaatatatgttctggatttaatagaatttatacattaaacatataatcatgaaataaaatcatgtgaaccatagcaacataaaataatttatgatcttttattaaatattaaatctgattatatcaaaataggtttcatttaaggcacaaaattcaacaccactctccccatacttatttctcttgtgctcagaaggccactcctttctcattactcataaagctcaatagtctaaccctcgtaaacattcccttggtattgaaattgcatgcactaccccaataatttcacacctattcttcgctgacgacaacctactcttcaatgcagctccccaatcgctacgactacaatcaaggatgtcctacatgattacagcctagcttctgtccaaatggtcaattaaagaaagtcttctctctgtttctcacccaacaccaacgatcgaggacatacaaaaccacatcacctctctccttggcattccaattcaggactcaattgagaaatatctaggcttgccctaaacctttggtcgatcaaaaaaagaggccttcaattacattaaggatcgggtctagtctcatttgaacaaatggaattcaaaacacttctccaaagggggaaaagaagttctcttgaaattagtagtcctagccataccctcttatgccatggtttgcttcaaactcctagctttctttcattccaagcttgagtctatgatggctcgcttttagtggggaggaactggacatcatcgtaaaacctattggaaaaaatggtcctcccttagctattccaagttccatggcggtcttagtttatgttcaatgaaagttttcaactaggcgatgttggccaaataagcttagcgatcacttcaggctcctcattccctagttgcaaccttattaaaatctcgatattttccccacacaaccttcctagaatctgctaaaggtcataggccttctcttgtttggattaatatctcttcggggaaggaacttctcatgtcaggtctttgaaaatcagtgggtgattgttctacattctcaatctttaattaatgacgcttgaatcccaggatatggcaagttgacctacctaaaacacatctgagatggcagtatggtagtaccagactttataacccgtactaaagaatggaacattccaaaaatccataatatcttccctactgacatcaaccaagccattatctgttagaaatattttaccaggatctagatttactaccatgtatgtttcattaacatc

SEQ ID NO: 309946 - DNA, 3237 bp, Cannabis indica
cttcctcttttactttgcatgtttaatttctgggtttcatacatgtgttcttgactttgctgtagaagataggtagaaaatctaggtctaaaacttcgcggttttctttgtaataatctgtgacacttcacggtttatgacgttggccttccatcgcacattgtctgtctttcacctcgcttattcaaagcttcgtgaaattttgccctaaactcaaaaatttcaaacttctaggctttgactttttttttttaatttttccattcttctaatctgttgagttctcctggtcggaatatttgcctatttattattcagtatcccgaccaaacactgatctcgtgtgttgtcttttgaagatgaaccttgatgagttttggggaagcgaacactgaattgaccaggatctgcttcaacttctgtacgaagatcaccctcgtgttcgcgccagctcgtcctcttcgagtgacggactttccaattcaagctttgaagactgggagatgagtagtgaatgctcttctactccagaacccgaagtgcaacaccaccactactccaagtagatcgctggagaggggtatggctgcttcatttaggaattgaataaagggtggaggcactatttgccgtccaactggacatatgttgtctggccaggtgttactgacactttgcatgttggccatccaagtttgggaaactttggtattccgattactgttcctactatcacggttgctcggcattcaccccagtatccgtctagcaacaggatgacggctcaaacaaagcaaacgatgcgaaaggtcaacaccatccgatcctcacgtggcccagctcgccacactacctagcaccaaataggatccgcccgttcaggaggagagggatcacaaaggggacatcaaggtccaagagattgaaaagtaggatgatgtccatcctggcagcccctccgaggttgaggaggatgaggaggttgaacctccaaactttggaggatacaatgaggtcgggcagctggcatctgcagagggtgaagtcttggttgaaggagtagactacgtcgccgaggagctcactgaagcagttcctcacaagaggcaaggttccttaggtgccagatgggtgagtcctccgtctaagatcattgtggcatgtatgagagatttggagaggtctgtctatctgggcagacttgaatgttacgtccctgcctcaaatcatcgtgccacaaacccacaaaaggggatgtgtgcctggtcgggtgcccacaccaaacaagggggaatgctaccttttcatccgtagttcaggaaggtggcagattacttccgcctttgtccaacccagtttactcccaagggcatgaagtatttatctgccctatgcgtcctctacgccacccagaagaggggtgtgccttctccacacgaggtcaattggttttttgacctgatgtctacccccaagaaaagtaggtcggggtacttctacttctctcagccagacttcaactggttgacaggcatcgcgaataaggtcgtgagcaagattgggaatttttttgatgaatattactttgtggaaggcatgggcaccacttatactcagttttagcagatccctatatattaccgtccacccctcacactggctcttagggacagagctcagaggattgttcaactgccggatgatgctcagaatatcactttgttgacctcagaggccaactttgtggagtacgggctctatccaacagattttgtacctcagcttgtgaaggagaggaagaggaagtccagtgctggccgggtaagggagctgagcaagagaaggagctcattcaacttaagtgtgaggctaagttgaagagaggtgcaagagccaagcagtatgcttaggagtattctgagcaggagaaggagctcattcaactcgagcgagaggctaggttaggttggagggaggagtcggagctgaataacatgctcaagaatactctgagtaggaggatgaggctgagaaagagcaggaaagaccgctcaaaaggaagaagaaactttcgaccaggcacaggcctatcgaacatacgatccagatcagggagtccggtctacctgctcaaccatccactcctgtagaaggaaaggggaaagccatcctggaggaacaagaggacttgtcagatgacgatgtcccatcagtacttgttcgggcaaatgcccctgccaaagtgcagggtacttcatcttgtttttaacttccttaattatcatgccttcatatttcttatgctttttctaaccatgttacttttatttcgtgcagagatgtctcagaaaatgcttgaggccctgaagaagagagtgggaggaagctggggcttatctgttctggccaagaagtcgaagggcgatgagataaccccgtccagagagaaggcaccagctgaattagtcattgatctctccaaggaacaaactgttgtggaccctcccatctcaaaaatgactaagtccaaggattctcgaggaggtagctcgggcaggccagagcagatgaggggtagatctgagctggtcagaagcgggtctgaacagaccaaggcccctgctccacctcccgtactgtacccagagaccgaaagacgcacagaaatgcttactcagtatgtgactcggtcgattcctgaggtgaacgagcatttggcttgggcagacaacgaactttcaaggagctggtgatgggaggagttctgatggagctttcaaggataagtcctttctgatagtttctttttgtccttcttcaattagttcagattttaatattcttctctgtacagaccagtctaaagatggcttatgcttattcctgagctaagtcggctgcctctaagaatgctgccctttccaacactatgcgggcagaagtggacttggctaggaaggacaccgaggaggctcgggttcaccttggggctgtccgaatagagataggagaggtcaataagaagcttcttgctgctgagaaaaaggtggccgaactgagtcaggatctacaagccatgccatccactgaacagctcgaagccgacattgcctccttatctaaggaagtggctagccttcaagaagaaagggagactctgcggactctttttcgcaggttggaagaaaagaaaaaagccaaggaggaggagcttagagccgaggttgagaagtataa

SEQ ID NO: 309947 - DNA, 2883 bp, Cannabis indica
atgattagttagtaatattttttaaaaattattttcttaaattatatgagatctcatactacactaataatagtatgacactgaggagggtgtcaagtactatgtggtacattttagcatttctctgtaatttctttcaattttattaaacgatatgctaataaggctgcacatatattgacgcgatcttctcttagtcatgaatgatttgagctaataaaacttgcattttattcaaaaaaaaaattataaagtgtcacctttaaatggtgcatgcctcttaaaataatttcttttggtttagttcaagaggtatcatatatttcttcaactaaacaaattaaagaactcaattaattctataactaatctttataattaaattttaggtaaataccattttagaccttatattttacaaatcttgtcaattggatcttatgttttgttaaatgacaaaataaactctatattttctaaaatagtaaaaataggaccatgagctcaatttttaacaattttattttttgttataaacaactttaagacaatttctaatacgaacatatatataaaatgtaattagtttcgtcataacatctctagatcagattattattaagttttatattgataaaaaatcaatttatggtcctatttgtataattttatacagggttcattttgtcatttaacaaaacagatgatcaaattagtaacttttgcaaaacacaagatcaaaaatagtatttactcgtaaatttttttcttttcttgtattgaaatggtatttcctttattttaaaatggaatagttattccaccaaaatatgaatggtcattctattgaaatggcattccaatactttaatatgcaaccaaataaaaaaacagaatggaaattattttctttttattttattctattttattacctcaaaccaagactttaaattaattctataactaataaaattaagtttataacaacaaattatataaataactcattttattgttattaagtacaacaattaatataggagttagaataagtccaatgtgactacgatttttttttttttttttaaagtaaaagcattcatatatatatatatataaaagtagttagatttcgtggttgttacaaaagagtttttcggggatagaggacatcggtattaagccaaatctctggtggaaaaatggccacttagccacgttatgagctgcaaaattacaatgtcttcaaaaatacaaccaacaaaaaaaggagaagatctaacacaaaatgagacatagttctcaagctcccagcaggactccttcccattaagagcgttgatcattatcctcgaatcactctcaatgacaataaactttaagcctcatgccttcgttgtctccagggccaaacagcaagcctccgcttccccacaaagagcatcggaaaactccagcttagaagtagtaacccagatcaccttgccaaaatgatcccttacgaccacagctgcacgcatgctgtctaactccactctaacatcacaatttagcttcagccaatcttggggggcggggacgccagacatccttcgagctcgaaatagggcgagggagaaaataagcatggtgatctgtaaaagaaaaacgaacaaagaatacaattgataacatcaacgggacaattattgtgtaccttgtcactgcgagtccattagatggtgtcaataattaatgaagcataaaggaaaacctcatccgtgttaatgcctttgtttttaagatcccacaagaattttacccagtatcacatatagggaaaataccccaaggaaaggaccgccacaagtgaaaagccacgttacaagaaaggaacatgtgttccatagtttcaacctcaattccacaaaggggcaactgtcatccccaattggaaaccctttactaatcactgaacgaacagggagagttttggacaggatacaccaccaaagaatcttgagccgctctgggactttactattccacaactttctccaaatggacggggcgacctcgcattgagtcgctctttcaatagcatgggccctataagctgatttgtaagagaaacgaccattactttgtaaagtctaaacccagctatccttcccttggccagtcggattgcctcctttcaagattgccgaaatagtctcatgatcgaacatactgttgagttttttaatattccatcctccattgtctaacagtagctctgccactttaattgcaccataagtagtgggtcctctagggtgagggatgaaacctttcctgtgctctatccacagatcgtcccatatattggtgtcctgaccatcaaccactagtttgcaggcacccttacgaatgatggctctcgttttaaccacattcttccaaaaccacgagtcagagtctttataattacagtcaagaaatgactttcctttaagatacttggctttggcttccaatattcgatagcataaggattggttacccgtcagaaggttccacctccatttagccaggaaggcctgattcatctctctagtttttcggaagcctaaaccccttaaagacttggggaggcatagtttgtcctaggcttttaggtgcagcccgtgatacccttctccaacccccaccagaagtcgcgcaccaaactatcaatcttagcaactaggcgactaacaatttgagcatgcaataaagtttttttctcaaacgcactcatagtcatagcatgataagaaaagtttttctcaaacttttcggcctaagaaaagtttaatcattttgatgtgatttaaaaaaaaaaattaaaagaaatagattattataaaaagaattttt

SEQ ID NO: 309948 - DNA, 1640 bp, Cannabis indica
aaggataatcgggctcagatcttggtgatactctgctactaaaaggatacaaggatttagagatttgagcggaaggagtcatttaattttgttgcaaacaatgtaaggttttttgaactttatatgtgtttaaatttcattattttagaaattcatatttaggatgttaaataacatacatggcagtaaatctagatcctggtaaaataatccccaacaagtacgtcaaagatgggtactacaaagatggctaccattacaaacaagaccctgtaatggttcgagtgtctaatgagtttcttgaaaccaagcaaaagctatcccaatagaagttttctcagaggatggagaaaatgatggctcgccttcaagccatgttcaaagatctagatgagggggattctgacaatgatccctcagtggaatgcgttagacaaaataccagggaaaacccaaccaacagtggaacctctactcttgtgtaagacaaggggaagacaaaggtaggtgatcctaagaaccttaatgctctcatacatcctcagaaaaacatgaacgaccaacatgccttcttaggtgcaaaatgtgactgacgccttcgggctcgaacgtccttcacctagaatggccatgtagcaacaaaaggaacggtacgaaagtaccaaggcccaagggaaggaaaaactgccctagtgatacagttatgaggaaggtgggacaggggtacagtacttcaacgaaagttggtccacagtggatctcagaaggcatttaaatgccaagtacaagaaagtaaaaaatcaagaaggcgaggtcgtggaagagatctcccagacagtgacacaaaaaagttagaagaccaaattattgcgttgacaaaattggtctggaaacaaagtagggccctcactgactctgagaatgaggacccggagccctgagtaagaaggatcacggaagcttcactctcaaagaacttcaagaagtcgcaaattctattgtacgatgggtgcactgatcctagaactcaattagccaagtacaacacgatgatgcaggtgacaagagtcagtgatgacgccaagtgtttgtgcttctccctggcccttaccaaatttgttaaggactggggaaatagtttatcgttgcctgtgattatgacatggaaataggatccatcactaatgtcaagcaacaggtgggagagagcctaaaaaactttatccagcatatgatcgaggcgggagcaaagactaaggtgatgaatgatataaaacttgtggccttacaatcgggacttggagttggttccatgctatgggaagaaatgcgaagaaagagggtaagacattttctaaatttatggccagggctcaaggctttattagcctagaagatgatgttggattatattttactaggagctagatttactgacaagtatatttttaacatcctaaatatgaacttctaaaacgatgaaaattaaacacatataaagtatgagaaaccttacattggttgcaacggaattaaatgactccttccgctcagatctctaacccttgttcaattctgttgcagatctgagcccgacactccttcaattgttttgattcttcacagtcttacacactatg

SEQ ID NO: 309949 - DNA, 1251 bp, Cannabis indica
aacctaataaaattaattagaaacataattaattttcaaaatatatggcttcccactcttcatgagtcatatggatgccggaagcaatttgggcctcagcctgctcagctttggcacgcaaagcctcattctcagtagtcaaggactggaccttggcgcggagttaatttagctctatgatcacgttccccgcatctttggcgaccctctccgcaaacagcgccatttgaagaaaagaagataagaaaaaattaataaagttgtccaacagcaaagatcatatcacaagtaaaggaataactgggaggttaggacttacccctacagtctgctgtttggcagatgtcgacagagtgtacagatcagcactgctactcactgcccactgctccgaagtaagcttgctcacactatatccaatgttgtctatcattttcacagcatagggagcgatttctctacccaccacaggttccggatgttggctcactacaggaaggtctaacacagggcctagaggtaaaggccgacgagttccctctgccatctcggtcgtcttggaagacatccgagtaagggacctaaactcaaaactagaaatattcctatcgatagatagcatggaaatgtcataaatatcaaggaaacaccaaaactatggttcccaaaaatgctaaaactggcaaaccaaaattccaaaatggtaaaccatttttggggtcctgcctaggaaaatggttaactgtttctcaaaaaaactattaactatttttttgtagaaaacccaaagaactttgaatcttgctcaaaatttccccaaacttagccaaactttctagaatacctatgataacatcaatgaacaatttccaagcagtaacagcagcaaacatacacaaaatgaaaactttcattgttgagacatgtttgagttcttaaactcaaacttgttgaaccacttatgtaccctccaaaaccagctcaattcaacctaaaacaacttaaaataaccacataaaacatcccataacttctagggttctgacagagctaaatcccaactattgcaagcttaaaaccaaagaaaaaatctccataaactgcataaaaagagactagggcttaccttagactttgattcaccaaaaaaccttgaatcccaatagattactcagcaaattgatgaaaagagactggtttttccctggtttcttttaaggcctacacacacacacagagagagagagagag

SEQ ID NO: 309950 - DNA, 2038 bp, Cannabis indica
aagtgttaccaaacgccaccctaattaattggtttatttttgaaagaactgacttttccttttgttagttactattttcggttttactatgaatatatcatatcatatttttatatccatgaattaaagtacaaattatgatattggatttatttagaaagtttcccgattcggcctgatctgtcactgcaacgtgtaattttgtccttgcaaatcaggattattttcgaaaagttttgtacagttgtaaaaacgtgtttgtgactgtctctagggtttcaatattctataaataggatctagagagcatacacatgttcttatctcttctagtcatataattttgtattttcatctttgtgtgaagagagtttgttatgtgaaaacatagagtgttctactaggttttagtctttattttatttaggggtgtacatcggtcggtttggtcggattatagtgtattttatcaacccaatataaatgtcgggttgcaaatatgtaattgtaacccgtccaataaaaaaataaaaaaaatgtaacccacccaatgatttttgtcggtttgctcaggttaacccgtttaaaccgatttttattttttatttttttcattattgtaagtttttgggattcaaataattaattttaaaaaataaatatataacatatacttttcaagagtaaaatgattataatttaaattaatgttaataaaataaattgaataaacattaaagtattaattaatattttacaaataataataaaaaaaatatagtcacatttaaattttaaattttaacttcaatatttaaatataatcaaaattatcagctataaattcaaaattttaaattaaatactataaaatatatacttttaatgtaaaatagttaactattaaacgtaatttttatattatattattgataattttagtaaaaaagtatgtaaattgtttattcggtttattcaggttatttgggcggttagaataatatttaacatgtctaatatattcattgggcggtttgaatttttcataaagttattcgggttgtatttttttatcgttttttcggtttggtttgggcagtttattcgagttaggcggtttgtaaatttttttgaacaaccctagttttattattcttacaccgttcgtaaaataagttgaggagtttcattgaacaagagaaaagttttcgagagaatacttattcaagccttactctaaaggaagtaagcgtatacacatcaaaagttaaagagagttcgctgtttgatggtgctcaaaagtcagattgacaaagtaaattacaaaggattgcatcaaagctttagagggagactaaacttatttaagtcgtgtcccgtaaactaatactaagtttcaatctgttattacagatctttacaatcacatttttctcactgtatttatttggccatgataatcatagaactggacttaggagaagacttggttagtcagtcacccaccatgagaaatgttaaaaggcactagtagtgtctagccctcttttacgtgtcaatatcactatagtccaactaagtattgagtcgcatataattaaatgtaataactttgaaagagtatcgctagctaatcacaaagcgacacgtgtagaaggtgatagacaccgctgatgtccaataataatgcttacccactaggggtgttcgcggtgcgggtggtgcggtttttgactattttttcaaaccaacccgcacatgcggtttttcaaatttcccaaaccgcacccgcaccgcgaaattaaaaacccgcaaaaactgcaccgcaaaaaatagtgcggtgcggtgcgatttttgtagtttatgcggtttggactatcactaaataattaaactatcacaaatacaacaaactttgagcaaaacttgtcaaaatgccataagatttgaaaataaatatgaaaagaaaaattaagtgtcaacaatacaataattagtagactttaagtttttttttttgaaagaatagtagacttta

SEQ ID NO: 309951 - DNA, 1355 bp, Cannabis indica
ggtggagatacagtcagagatactgatgtagactgaaggataaagacgaaattttgcatattcaggaaggaagagtaataggaagaaagaaagggaaggggggaatataaaatactagaagagttttctttgagtcaaagcagcacatcagatcggacatattattacccaaaaataaaataaaaagtagaaaataaaaaagttcaaaaacgaaaaggaacgaacctgaaatgttatcttcagaggctcctcaactgccattgttgttaaaaagaaaaaaaaatgtcagtgaagacgaagaaggaaaaagggaaattgctaattttacagtccagagagaaagagactactgaccttgatccatgagagcttgtaaaagcttgatcgcttcctgaggaacatttgccatttcttcaagtgtttttttttttctccaacaaaatccaaaattatcagaaaagttgcttctacttccaaaaattcctgctttttttttaaccagctaataatctattatgttgtgttctaattgggctcgtttttttctctgtactcctaatatggtagattttagagccaaaaaaagacaaaaaattattagctaaatatttatacacataatatacaagagagggagagaggagaaagactagaaaagaaagaagaaaatgaaaagcgaaagagggtcaagattcaataaaggcggacctacgatacgaaccactactactactgctctcactaaagggctcaccctctctctctctctctcctccaccaacaacgtacaatatttctctcttacacatatttattgtgaagaagaagaaaaaggaaagtgaaaaaagattgaaggatattattattagtgtagaattctgtagcttcctaaatcgtttttcaccgctgcaattagggtcctactgttggaacgtggctataatttgaaggttgactttttaatgttgatttgattctaattgagattgtaatttggaaagcttcgttgtgtaatatctaattcaattagtttcatcaattattggatggtaattttaaaatctatttcaatccaactatatttatatttagtttttattttacaaaattataaaaatataatagtaatattttttaaatattttaataattttataaatttatttataaaaaatacattatttttatgttaagattttattataataatgataatgttataatcaagttcattataatcaaaattacattaaaaaaatatgttatataaaattttatttttatatatttttatttatttttttctacaatataaatttatatgtttttgataaaaataatttattatatattta

SEQ ID NO: 309952 - DNA, 1210 bp, Cannabis indica
ttcgggtcgaactcgctcaaaatttagagttcagtcctaatatgaactaaggttattgagatttgggtggttatgaactcttgtatgaattaatgatttgatttgtaatagttgaagtaatgctatctttcttcaattagatgtgatgaaatgttgaatgaatattatttttttggccagatttaatatttaggaagctaaatcttagaaaagtaagacctaattgaactatacatgatttttacctatttttttaggtattaattagtagtggaatatgtatatatatattaatgttgctgcaataattaagaattaaaaatcttaattttaaatttcattttaaaaattaaaacaaatgtatattatttaattaaaaaaattaaatattgatatattgcatttaaggtaacgtactatgatatgctgttacctggagataaaatatgcactaaattgaatatataaggtacgtagtagttgtgatgaaaagggcaataattctaatctgccaaagccagactatctatatattttcaaaccctatatacatatatagcttactgttgtttacacatcaaaactcatttcacacgtttctggatttcttttacctacatatttacatctgacccaattaattgattaattgttacaacttcttgatgggactacacacatttttgtatcagtaatttgcggtaaaatttcatcaactatcaatttacttgcaaaaaaatcatctaacttcatattttagtgggaaaacccttcaaagtacggttccgtttacatttttaaggtgtcgtctgtccaatctcgttaagtcctaattttgtccacgtggcaataacaggtcactaaaaaattatcctacatgaccatgttttacaaaataaaaattaaaattagtaattaaaataaaaataaaaactttaagagtaatttgtgccaaaaccccctcaactatcaatttacttacaaaaaaactatccaacctttgtaagtaaattgatattggggggttttgtcgcaaattaatctaaaatatatatacacatgatgtcttttaacgtttatagttgaagtttagtgcagtgctgaatatttgattattatttttttttttttttgagaaaattaaaatctaatggaatgcctaaaactcaaatttacaacttaatagtaccattacgacctttataatcta

SEQ ID NO: 309953 - DNA, 2276 bp, Cannabis indica
cctggaaaaatatttccagcaggaccttcattcaatgcgtgattttctattcaggttaaccaacacacttgagtttaaaaataaggtaggattagtatagaacatgtatatgtatatgtgtatgtgtattatatccatgctgatattgtgattcaaatgctactagcactagtacgatagcaatacacagtgcattggtacaatattttatgttcaaggggtacgatttggtgttaccaaaactagtatggttaagtatgtagtgcatgtggtataatgctcaggggtactcagggtacaattcagccctaccaacactagtacactagcagtactcagtgcatgtggtacaaaggtttaagagcattcttgatcatctgtttagccttgtagataggtgtatgggtacctaaagtcaagccggtaatataatatatgttatgtaattttcttattgagttcgttgactcacatattatctttatgtgaaggtaaaagaaaggctaatgctgaacaggagtgagtctagaggccaaggatgattgtacatgtgaagatggtgcgacctagagagtttgatcttgggacgacttgggcttcattatatagtcgctatgcgacatgtttgtaaagtttattttgaaaatgaatataaatttttaaagcgggatcccaactttttgtatggatatgtatacatttataaaagtttaaagttaaatgaaaagcataaatttgtcacgacttttgaaaaaaatcttttgattagcaaaggtatacattgtaattagaaattcactttagtgtgcctaatcattaaagtgttacagtggttaatgacccaactcgggcagagatggcggcgacggcgagcatgtttttttttttttttgctgaatatggttggggtattttgtaaaacatattttaatttgttaattattagtttcttttatttgagtgtcatgaaattattgtatttcaattttaatgtaattaattaattattgaaattaaaaaattattgatttatttttattaattttatttaaatattaaattaagaaattattaatttgttatttgttaaatttatatatatatatataaaataatatacatttaaattatttattatttgttttataaaatatgaaatcaagtccaagaaagttggactagaaattcaatattttgtgagccctatttttacgtctagcaatgttggattaatttttttttctagtccaatattgttggacatgaaaaatattacttttatgtccctcaacattatgttcaacacaaaaatggactagaaaaacttatctagtcaaactttaattgacataaaaagtattttttgtagtagtgtactgatggggtaattacaagaaacatatggacttggacttaattggtgatgcccgacccatgaggtgcttggtgtaagttgatgcggtttccacatcatgttgatatttgccgaaaatcatgtctatcatcgtggataattaaagacacatttaatgcttatttctaattactttctttccatattaagaaagatataatcttcgaatgaggtccttgaaaagtaattattgatatcttcagatctcataattaatgagaatgcttcacaactggattttcggatacttgttgtttgcatctcccagatgcggtgtctaacatcttttagaagtatgctataacggattgctcactcgcctgaacaagtcttttacttattcgaaaggactgactgcttgtaggtccagtctaatattttatttgggcttgctgttggccaggtgtatatttcattctaaataagttttgtcatcaagcgagaaaagtatatttcttacaacattatttttaagtactagtgatacctatcataaacactagatagtgatttattgaatagttaattatatttcataaaaattattacattaaataatataacatcccatacttgtactaagacaacgagtgcattataccatttctaactttcactatggctccttcaaaattcatttatatgtaatatatgaataaatagcacttttctccctgaacatttggcactacctgattttgtcccctaaaatataaggcttgtttataaatttcccctaaaatataacaattacataattatgtcccttctgttaggttttgtttctattaccgttaaaaattaatatttttactcctagaactttgaccaatacaaaattttacccccttttattaaaaaa

SEQ ID NO: 309954 - DNA, 539 bp, Cannabis indica
aaaaataaatattaagtatttaagtgtataaaatcgaaaacattaggtatttataccgcaatttactcaaaaattaaatccaaatacgacccatgtaacttgtttataagtagtggagtgagatacgatgatgatgataataatgactttgaatatataagtgagatacggtgatgaaaacggttataaattaacgtaatctcgactataagacaatgatacaataattttaaaatcatgatcatttttttatagatttattacttatttttttagcctcagagtcttttaaatttttactgcatatatatatataaatcttttaaaatatgtgttattttttctctcaagaaaaactatgtgttctaatcaaataaatattccttttaaaaaaattattataacgtttgactttagaaagagaattaaagttcttgaattaaaaattaagatcacatggaaaaattagtgttattaaactaatttaaatgtgtcaactcaactaactacttttcttaaatattattatttcatatact

SEQ ID NO: 309955 - DNA, 2707 bp, Cannabis indica
aaaataatttccaacatatatatatattactattttgaatcttatattttaccaaaattattgattgaattttctattttattaaataataatttaaatcttattttttcaaaataatataaaatagtatcatgaactcattttttatcaaaataaacttgataataatctgacatgaataaataaactggttatattttgttatctatttatgctataaattagcttcagattagatatacataagaaaataacgaaaacagtgcttaggatataatttgtatcatttaagaaaatacaagattcaatttattatttaacaaaataaataattcagtcggtaatttatgtaaaatatatagaatctaaaatgatattaattctacattattattattatttttgttttgatcaagaagaagaaacttcatttatcgaacaaacaaaatacaccctcaagcacttttcaaaaaaaaaaaaaaaagaaaggctcaaccttaccacacttaattacacatcaatctatgtaaaatcttcatctcctctttggatcctttcctatatttaagcatatacaacctatatttgacatctcttttaactttgttcactatacaagaagctgtgttggaaaaattggaaaacaaacaattattcctattcctccaaatgtgatatattgtgacagccaagcacaacactccaattctctcaatcatgctcggtttgacagagcacaaccaagaaaatcagctgttgaacttcctagaccaaataaccttgaaacccagtcacctgaaaatatcctctaacaccaaggaagacagcctgcaatggaagaacagatgctggtgtgtttcaacttcagcctcgcaaaccacacaatttagattgctcacctgaatattaaacttgccaagcatgtctctagtcaacaaacttgtgtgaaccacttgcaacaaaataaaatcctgctttggaacattaaggctgcaccaaactgctctagcagtaggatcacaagtctggcttaaagaggagttgtacagtttagttgctctgaacactcctcctcggctagcactcacaatatctgttgggctgaaatcacttcttaatctacataactttctccaataccaacttgaatccacttgaaggttataggaccaaaagtccttcccctttaaatagaccgcattgatccatttcacccataacagatcttttttgttcataagatcccatacaagtctagcaagagaaactttgttccattttgtgccatcgttaaaaccaaggccaccataagcttttggaaggcaaaccttatcccaactggacacgtgaattcttgtctgattctcctttaatccccataagaagccacgacaaagcttctcgatttccttaatcacactttgaggcaacaaaaaaactctcatccagtagttccttaggccaatcaaggtagtttgaattagttgaattctaccagcataggatatatgcttgttggtccaagaatgaagcctctgtttcatcttcttcaagattggcccacaatcttcaagcctcttggtcggtctaagaggaatccctagatatttgagagggaactcaccaacagtcagattaattctttgagcaatagatcttgggcaagtaacatcgccaaagtaaatctgagacttctgaaaattgatagctaagcccgaggttttgatattattattattattattattattattattattattattattattattattatttgattgggtagctagtttgaactaaaaaataacaaaaatagtgacaaaaaaaaaacaaactaattaatcgatcacataattaaattatttaattattattttcttaatttgatagattataattagatatttgcaaactaaaatgccttatacacttttaaatggtgtgggctattgtagccctcactaaaaaactatattttaaaaaataaatatttttcttctaatttgataattatactacaaattagtgaaagaaaaatcctcacaaattaaataaatttattaaaaataattattattttcatttttttttttgaaaattagcgtgaaacttcatttaaaacaccaaaagctagacctcacggtcattacaaagtaggttctccggcaaaacggaggccgaaatatatccatacatctagtgggtaaacgcccacttagccacattatgagcagcaaagttacaatatctactaatattcaaaaagttacaactagtaaaagagggagttgatctcaaacaaaaggagacatagttctcaagggcccaatgggactccttcccattgaggacgttgatcactagtctcgaatcactctcaataataataaactttaaacctaaatcaattgccagagaaatggctgaacaacaggccgttgcttctccgcacaaagcatccgagaagtccaactgagctgtatggatccgaatcacctcacccaggtggtttctagctgtgcacatgctctccagtcccactcgaacatcacaattaagtttgatccaatcctcaggggatggattccaattttctgtcaaagtcggagtcggtgacggcactagagaagcatgtaaatctgcaaaagaagtgtaaataaggttgttaggttataattagcctatgttttgggtctttaaa

SEQ ID NO: 309956 - DNA, 1280 bp, Cannabis indica
atcatgttattctaaatccagtgtgttgacaaatcatgggacatcaacatttgaacatataatcatgattatattccactgttctcagaacactataatcatgaacaaatttatatatatatatgttttagacttaatagaaattatacataaatatataatcatgaaataaatcatgtgaaccatgcaacataaaatgacttctgatcttttattaattcgtaaatatgattatattgaaatagattttatttaaggcacaaaacccaacaagttttgcttcaaaggtaaataatttaaagaatcaatttaaaaatattaaactacaaaattgaccatatttataagatatatggactcataagcaggatccaaacactcattctagagttcccgaagccaacctagttgtagggctaggacccctcccaggtcgactgctatgactcaagaatacttactctaggatgttttcattcttatcatttgtcaaatattgatgttcacgttactagaactagtttttctgcgaacatttccaaatccctatatatatgatcattttcgtacgagcattaatgctatgagacaccaatgtgcgtagtcctactattaagtggcgtcctgtaactaggtagcgattttttttaatcatcattaaagtaaaattactgaaactcgatattaaattatatcaattacaatattatacctaataacaaaggcactgtaagtgtccattactatttctctttttttaaccaccacatgcttaaacggaaatctcctaaaattaaaccctgaggctgagggtagtttcgtaaaatgatctggacacgtctgattatccgatttcaattgaggaatagaaatgggacaaacatttgatgagcatgagataggcacgtgccccaatccacgtaactgaagaagaagaagaagaagaaagagtagcggagtaagcataaataaaagttaaaaaaaaaatgacgctagcgtctgttattacaactgctcccactgtggacaaacgcttagcgttactttgtgtcaattgttgaatatgtttttcatttctctccttttgttcttgtttttgtaaagaccgcttagtttaatttggaaattagcagttaattatgattaattatgaaattatttatagatatttaaataattatttatgatgttttattcgattcctcaatgtatttttatgtcatatagtgagatttaatatttttgcattttcggtgcccagcaacatggaactcggtgtt

SEQ ID NO: 309957 - DNA, 1081 bp, Cannabis indica
aagataattaattatactaatatttgttggaaaataataaaaaagataattatggtaattaatgatatgaaagaaagtaagaaagtggctgcacagtaaacacatacacatcaaattaattacctaattaatgagaaaggtaatggtaattaacaataataattatagtactcttgaagttagtgttgttgaatagtcttggtccaacaacaacattaaactcaccaaagacagcaattaaaaagatgattttaccattgtgtcctcacttaatacaaggaacgcacacaaacaaacatgtaatggggtttgactacggtttaatgttaggtctaaaaatgtggttagttaactcaataattgggttaatggcctcggacacatcaacctcactaaccatggttaagtaatcagttaagttaagcattttcctctttttcagcaaagcggtcctccaacttcgctgacaatattttttgcccttttaactaactatatatattttgccgattcatacgctcaaatctcatcaatttcgggattatctctctttttccaatttactattttaacataggattactaaatattttttaaaaatataaaacaaaggattagtcaatgaaatataataagaacattgctataagacaccagtggtgactagtactttctcgacatatccttaaaataggtgctttttcatttttacactttaaaacaatttttttatgcatttttacgaaattttacatagaaacatctattgcaactaccgctgcaatctaaattgcaacaaaaaatcgtatagaaactcttattgcaactagcattgcaactattttagaaactcaaactataaatttaaaaaaagttaaaaaaatggtatatatggtaatttcccaaactattatattaaattatatgggacctcatatttaattagaccaataataatattaacacataaaaaaagtagtacctttaacatttctcaatataacacctactaatgttttcactactgctattacctcttaattactaattagatgcttctgtttttttttttattttgttt

SEQ ID NO: 309958 - DNA, 933 bp, Cannabis indica
attataatgggtaagttgtgttttaacttttttttagatattaagaatattatgtagttcctttccattaaactggtgttattttgttatgttttagcttgaaacactagatttagttttctctcaaaatctgaattttttgtagtttatcgattgattatcgataggatatcgatataatctcaatgatatgcaagaaagggtcatggatgacgtttatcgataggatgttgattacttgttgacatattgtcgacaatccaacaagaattaaatcaattaagcattgtttgttgacagtatatcaatattatgttaataatattcaaaaaaatatttatccgaataaattgacgatgatttgttgattatttgtcgatactttaccaatgatttgacgatggtttgtaaaatttcagtttgtaattatatttgttatttgtcaagatattgttgataggatgtcaatagaatatcaacaagattataaaaattggctaaaacaagtaaattcttttaaacataaataaagataaaataatcaggataacaattatgaactttaaaagtaacccctaaatgttaaacttaaaagtctcgatagtttgggtgatcaatgcaacacatgtacaaccacccaggagtggccagttcacctttaaccaaatatattttgcaacgacgtcaccctttggggaaccctggtggataaaagagaacaccatccatttacatgtgttcgaaccgttccaggagtggccaattcccttgccctcatgcatgtgtcgtaatattaaaaataaatacgagtgtatactgtaacaccccgatttcccgagatgtcacataggatagtccgtataaaacaatttaataagataaagacaatcaaatacttctttattgaaaaatatccaagcatgagatctcatt

SEQ ID NO: 309959 - DNA, 1766 bp, Cannabis indica
tggagaataagttcaggagacattaagtcagggaaccaggaaagcaatcggggtatgattctgttgaagaattcgagtcagaagctccaagatcaaagaggaaagacgattccaaaaggttgtccaaggataagaaatagaagaaacatgacaaatatgtaccctttatgctgactacaccgagcttaacgaaactcgaaaaaatatctacctcgctcatgtacaggaagtcaattttagagagccagacctatgagacatgcgagacgtaaaagggacccaacaaaacggtgtgaatattatagagatattggacataccacaaaagagtgtcgtcagttgaaggatgagatagaaggtctcatagcgcgaggacactttcaacaatatgtaaataggcaggacaatgcccatgatcaacccgatctgcccaaacactcgagagaccaaggatcataaccttcctctcactactacaaaaatgactttttatttcagttgtaaaatgacacaaaaatattttgtgtcggttgtataaaccgacataataagagcagacgcaaatagtcaagttatttgcttcatttctaaattgacgaaaactttttttttttgcttcggttgacaattgaagcaaaaagtatgctctattagcatcaattcttgaatgaagtatgaaacttagcttcaaattgtaaccgaagctaattagattattgtgtcggttacaacttgacacataattttacacagttttttttttttactttttgtgtcggctataaaatgacgcattgctgtaggtaggggaaaattacaaatttctttgtaattttccccacttgcatttttcagacattaaaattggctttcataacaatatttatatgttataaaaaaacaatatttatatgactaacaataacatttataatataataatgataatatatttcatgtaacttagaaaacacaaacatttcaaataaataaagagtttcttagcttaacaacgtagtacaataattaaaagcctaatgtagaaaaaactatacatatttatacaataattattaaacagattagttaagtcaagattgtcaagcttatctcctgaacaattcactgggagaataataaagattctaataaccccaacaaatgaaaaaactttcaaactgtgtgtaaaacaaacaaataccacatcaacattagtaaatatgaaatagtgtaattaattacctgataaaaaaaaacaagggtaaaacacttatgtaatacacacagacacgaaaggaatctgtctaccagtattaagttcatattaccaacatcaactgaataagtaactcttttgcatgttacaaaagactataacattcacttccatatgaaattcagtaactctttttacaatatctactaacactaagataagaagcaaacaattaatatttaactaaatgcccaccactaagaacaacagacacttcaactaaagtacgtgaaggtaataacatgcataaaaaacgacaacatccaagcccgaggatgacaacaattcctcttcagagagcatataagcacttttcaacaaaccagtagaaggtataagcctttccaagttgaaattacctctccttttagaatttcccttaggccatcaaacgaggcacataaactttataattgctgggttgtttgctcaatatagagtacaaagtgaaaaatatgatacacagaccagagtttattcccactgaggt

SEQ ID NO: 309960 - DNA, 1200 bp, Cannabis indica
tttagtgttttattttagttaagttttcaatattatcacagtttttaatgattaattattctattagtattaaactagtttataaaatcacacacgtgacgtcccaatagattagagcgttatagtattactaacatatttgacacaccaatgtgatgagactactggagagaactgttcaaacagttgtgggtttcaccaaaggactgaaagtctcttcatgataaatttatggtatcccttggcaacaagcctagacttgtaagtgttcaatgtgccatctgcattaagctttattttatagacccattttttgttaataatattcatgtgaggatcatggggaactaatgtccatgtcctttgactttgattaatgctagtatttttctcttttaaataaaatgaaaccatttagaatctttgagagcttgctggatagatctggttcaattggtagaagagtatcttttaatggatgctttgttgatagataaagcctttggcttgtaaaacaccaaaattttgagatttagtctttcatttgcatgaactctaggaactgtgctggaagttagatcagcagttgcatgcatttaggaggaagaagaagaatcatctcaggtgcaggagcatgatgcatctcaaatgtagcgacataattcatctcaggtgtaggaactgtgatcacatcagatgcaaaatatgcattctgttcaattgtaacagtaggctgagggaaaagggtagaagaatttatggtatgagaagatatttatggtaatgttagatggggatttagggtggtatttgaccatgtaagggtgggacattttctgggtgagaggttgagggtacgtttgaggacgacaatggtactgattatgttgtagaaggattgagtgaaggcttaggtggtaaagtggtagaagtagaagcaataaaataggaggatgattagtatgtgttacaacattgggatatgaaaaagtagcagatggtaaagaaaccaacgaggagataggtacctgatgtttgcatttagagatctcccattttgttcatggttataaggacatggatgttgaaaatgaattccttgattgcttgagaacctagctaataactctagaaattagagttatttttcacatttttttaactaaaaattggtttagttcttaagtttttaattaattt

SEQ ID NO: 309961 - DNA, 1590 bp, Cannabis indica
acccttttttcattgttcttcatccagttcacccttactgatagagtgtcatgcccacacatagcaagtcaagtactcaatcatagtgcgaaagacggtggtaaccaacccgaaggagagaaagagatccaggctcagatcttgataatactctacgacagaaaggaataagggtccaatgtaaagttttctaaactcttatgtgtttaatgtcattattttagagatattcatatttaggatgttaatcaacatacttgttagtaaatctagatcttggtaaaatattcccaacattaacaaccaagaacctgttactagaaacagtgttgagccagagcaaggacaagagcgggaacaactagaacaaaagacaaaacaagaaccaatatggaagctacatgtggatgggtcatctatcgatcaactcttttgtgcaggaattacccaccaaggagacaacaaaggcacgaagctataaaatttgggtttccagcctcgaataatgaagcagattatgaagcactcattgttgaactaaaactcactcgagaaatacccgctgaatacttagacatttgtagtgattcataattggtcgtcaatcatgttttgggagaatatatggcctgagggaaaaaatgacagcttacctcagcaagattaaagatctattagcataattcaaggggtgcacaataaagcaaatcccaaaggaagaaagcgcaattgtagacgctttggctcgactagggagttgtgcaatagttgacaaggcaaacctagtccccgttgagtaccatggagagcctagcattgcttgccctgaaggcatcaacatgctagacaatactcctacttggatgaccccaatcgcaacttacctcgaatcaagaacattaccaagtgatatagattacaaattttatattcagatttttatgttacaatatatatgtgtttgacacattatatctcataatataacttctaaatattttaatatatattatttttataataatacatttgtgacaatataatctatcaattatattatcaaataatataacaataaatacaacatcataaagttaaatttgagaagtaaatagctaaaataaatatacaaaatattaataattcaagattaatatatagtaatattttatgagaataataattcataaattaaaataactatagagatgaggtaaaagagaaaaataaatgtggacataggtaaaatctagtgattccacatttctcctcagaaacaggatatcccaattttgaatactccatccaccaatgtaaaaaaaaaatgatatattattattatttattcaaataatattaaactattcaaaataagtaaaaaagaaaagcaaaaaatgggatattattttaggaaaatttgaaaatctatgcattaattgggggataattttttccctaattgaatacatatgaaaattgaaaatatgtgacaattttatctaaaacccaatactacccctctcataactcaatcccatctctctcttcgtctatctctctctctctctcaaccgaccgaaccacaacccc

SEQ ID NO: 309962 - DNA, 687 bp, Cannabis indica
cgctttgacgaaacaacctgtccctaacaattggtacattatgcttttttttaatacttagaaatttataataactttttcttcacaaaaataatttttttttctcattaatttttatcaacaaacatgaatattaattattaattaaataattttttttttttgaaaattagcgtttatagattaaaataaatattagacctcatggtcattacaaatgatagtttttttgtatagaaaagagatcaaccatgtcagtaacattgttagttatgtacatttaactaagttatggactgcaaaattacaatctctaataagttgatacttggtatatatgacttgattcgtcactctatttcatttttcattatctttatttattataagatatgatttcaattatttaatatgaaataagctcttattttacatatattttatatgtaaaaaaatacacatattttacccgataaccaaatttcaaaaccataaaaaatacattttgaaattgtcttcaacaaaacctatcacgttgttataaacaaaacctatcagttatctactttcattaaaaaatcggaataggaatagaaataagaataagaataggaataggaatggtaatggaatggaataggaatagcattaggttgtttggttagatttatggaatcaataattgaa

SEQ ID NO: 309963 - DNA, 563 bp, Cannabis indica
atgaatcagaattttcattactccacaaaagaaatgcctttacaatctataagcacctatcaagtaggccttaactttatctatacaagttacttataacaaatcaaacccaaattatctttttgtttaatcttttttggcattacagaaaatactctacggtttacacaccattttacttgttgaatcacttcagctgtgcctacttttttttccattcaatatttgctcattccgagctgtccacagcaggtatacaactgctgcaacaccagctgccatcactctttttttgaagctggaacatctttcttttctcacctttctcatgatagtttgaagtgaactatccctgatattccatccaaactaggccttcaactgctcgagacattctgcagcaagcacacactcaaaaacaaatgttctgctgtttctgcagcagtattgcaaaagaggcagtttcccgtgtcgatcaaaccttgcttaagtactcgatccctagttttgagcctattcatcatagctaaccatagtaggaagctatgttttgggatgttcaa

SEQ ID NO: 309964 - DNA, 1322 bp, Cannabis indica
ttagggcataaaaccaacaatatccgcattaggtacatgttttcatacccttacctagggctgactctgagaatatatgagcctaaggcaaattagatttttgggccctcactctcaaaaatatatattaaaaatgagtgtcagaggattccaacccatgacattatgtaatatatcatacaccccaagcaactaagctatgaatatttattgtttataatacatttaattttacttaaataaagcttaatgaaaactttttatttttatttgggtccccgaaaagtgtgggccctaggcatgggcctagcctacctatgcctagggccgaccctgtccttacctaccctaaatcgtcattcaacaggttatatcctatccatttgagtagagttcccacagataaatgagttttcgtataaaattgccatctctatctgaaattgaagaagccttaaacctatcaattacattttgagtaaatgctcacttaactaaattcttagtttgttataaactattaagaattttaaataaaaaataaaaattaaaaaaaaattaacaaaaatgtgtcagcacatatatatatattattttttttttaatttttacactttgaaatatctctacaataaaaacaataaatcattttttttagttattttataatttatttatagttcaatcatagttgtcatgagattatttttctaattgttttataatttatttatagttgatttataattgtcgtgagattaattttttattgttttttaattattttcaaattttttggagataaaaatatatttttgtaattttaaaatttaaataatatatattttaaaaaaatttcccaaaatttatttgtaattttaaatatttacaacattttccattaaaaaaacataaacccacatgctccatgcgtgtttatttatatactaggtgaaagttacgtgccgagccacgtaaatgttagtttaatttaaggttttttgatttttttttttagattttggtaactaaagtagtatgattatttaaatgatttgttttataaaagtaagcttgtgtcagtgtatttgataagtaaaacataattgtgtctataaacttatgatatgtacattgttattaataatataaattactaatctcaatattatatctactgtgagtattaagttatagttttaaatatgagcaagtgaaaaaaaaatagatcaatagttagtagttattgttttcgacgtgaaagaaagaataaaataataagaataaaatcaatcattcaaatcatttaagaaggaaagaca

SEQ ID NO: 309965 - DNA, 1440 bp, Cannabis indica
ttttttttttttttaattatagtacaaattaaataagtgaaaaagtatcatattaattaagaagaaaaaaattgagagtgcgaatcataatgtaagacaaataattatcattaattgttgttgttatgtaggtgtacctttatggagcttttcctttggaggtggctgagtgaaaatgattttgtgaatttgttttctctgtgtacaattggtttggcagagcaatatagtcttgaagaaaaatatgagaatttaattggtttattattaataaaattatttatttcatgataatgagaagatgatgccttaaaattactacgaggaactaatttaaaattagttccaagggaggatggaaaactacaaactgatgagaacaccatagatgaaaattataaagaaatatcctatagcaatgaaaagaaaatggttcaagaatattaatgagcttctcaaattataagaggtggctatatatataattattcatatataatactatgcaatacttaattaggcttaatgactatattttttttttgctgaataattaggcttaataatattgatcgcttgtgaaattagttatagttgaaaggtaaactatatttagctgataaagtctttaaagagttcggtaaaagtactatttcttgtgttagggaaaaaagatggatcaatgtaatagtttatagagtaattattattaattaacattaaagggtaatctaatctatagagttgtaattaacgaaattgaagactatataacactagtactacattttttggtgtattaattctctttaaaagttcttagccaagccgcttgatttttttgtttgaccagggctccccgctgttcctcagccttacagtttagctctggtcgggtcttgttgaatcctacactattttcaatttagtcggtttgtttccatccttctgcttgagtgttctttttttttctgtcttttttttttctctggagactcgatcagaagccaaaaatatcacaacgattttaattagtaaggttgataggatttttgagataagtcgatttcaaaattactgaggtgttttggagtacttgaggttgactaaataccctaaggtagaaatttcttagtagctaagaaattataaaataatattttgttattattattgttgttattgttgctgttgttgttgttatttttgttgtggtcgtcgttgttgttaataaaagtttttacttatttaaatatatatgagggatatgattttgtcccgtgatatactttcacggaatgtatttcgtggtacattacatgggtctcagggtacattaaatgagtgtcagggtacgtttctactttttaatcctaattacccttagatcaatctcaaccgtcaaatcaaataactacctcatctgacggctgtcgtaca

SEQ ID NO: 309966 - DNA, 1047 bp, Cannabis indica
tttttattttttttacttttttggtaaataaattttcgatgtcgctttatttattgtttaaaaaaatttattccttgttatatttgaaggttagtatacttttataatatgttaataaaaaaaatattttaatactatattcactaaatccaaagctttagtatacttgctcatacacgatagaacaaagttgttctacaatttattttcaagtatacaaagcaatagatttacttaaaaaaatacttattaatagagtttgaatatcttatacattcattaatagtaaagtaggttttgtaaaacatatactgcggtagaaaatattattgtatttgtgtagtttttttgtagatattgaaaatttaggaatgatcaattttaagttgatacgttgccgaactttcggtagcataacattttagtttatactttaactaaaaaatttgaaaaaaaattggtaacttggttacattttagtttagactttaattaaaaaaaattaaaaagaaattggtaaattggtaacatggtgtagactttaattaaaaagaaattaaatttgaaataaaattaatggtgaaactataacaaattggtaactttaaaatgataaaaaaaagtaatttgaataagttggtaactaatattaaaaattaaattattaatgttaactaattggaaactttggaatgatacttaatttcaacaaattggaaacttgaaatgataaataatattgttaatttaaactaattagaaactttaaaatgatctataaggattgttaattttaagaaattagaaacatgaaaaattaaaataaggattactaattttaagaaattacaaattttaaattgagaaaataatttttaatttaaacaataagttaaaaatattgaataataattttatttaatttttaaaaaaattgaaaatatttttacttagtaataaggttatattaatactattcataattttgaaattgacaataaaaatttataggtggtaaaataaaatagcataagacattgtaagata

SEQ ID NO: 309967 - DNA, 2285 bp, Cannabis indica
ttatcgtaataacacacttattaactaaaagagtagtcatatatataattaatttaattaagaaaaaataggtgttctgcttagctttattgacaagctacctagaatgattattattattaatgataacaataatgataattaagtgggtgtgttagagaagagagtcgttggttggttaaacggtgcatgtaacatcctaacatttaggcacgttatgattttttaataacctaatcccgttaaaccggaattactagaaataagagtagaatttaaactttaaattatttatggaatgaaaatacataacttgtaactatttgaactttacaaaacattccaaaaagatttttcacgtttcgggatcccataaaaattttcacaaaatattacaagtcatttttacataccaatctaagcgacaaaactgagaatataaaatacatcaactggtagacccaaccctcgtggtctagtatggtctgaacatgtacaatccaccgccaagtcctcgaactcatggctgatcacaaactgatttaccctttcctgcatagtagagcacctgtgagccaagcccagcaagacaatataaataacaatatgccatatattcacaattcaaataaatactaatgccaccgcatctactgtctatttagcatagacctacgtgttgctcttacacgtctatttataataaggccttagattggtttatctcggttttgatcaccgagtctaacctaattatgccttacctgcataattatttgtttcaacatatatagcatgacattgcattcaaaattatttaatcactaggatgataactatagaccatataccgctcactttaggttaataaccttaatcccggtttctcacttaatcacaagcataataccaaatatgagcgccaccgtgcttaactctacgtgctaactaatgtcttacatggtatcccaagtatgtggagattccaaaccttcaggtgttcctgagcaagcgccggtaattctagtcacaattcctgggatttcacaaatatggttaatctcaaaatttaatttcacataatttacatttcaattgcagatagcatataaagctcaaaacgagctttccaacgatataaagaacatcccaaatggagtcccgagtaaaaaattatggcaaaaataaaataaaaaaatttccggggaaaatagggcctcgccgcggtgagcccaaccgtggccgcggcgaggggccttcttccacttcgaattttaagccaaaaatcattccaaactcattcaaagcatgtacaaactcaatttcaatccaacaacaattcatgtcaactttggaactcaagagagtgcctcaacaaactcaaaataacaactaaactcaaaataactaaacataaaatttaatccataccattacccataaatcaagcataaacttcaaggcctcaatctaacaaaagaaccaagaaatttcaagcttcaaaacccgaaatcaaatcccaaatctcagcctaaaaatcacccaacataacctataagcactatatgcattccctatagctcaatcacacaaaaaaaataccaaaatatcatcaacatccacacaaatcaccaagacttgcatccaaaactcatatgaacaccataaacaagggttaaagcttcaaataaaatcattataacataattacaagagatgaagagtaataccacaaattcctcaaacttctaacaatgattctcaccaaaaccacaccaattcaagcttgatttttaaaattgattgaaaatgaagagaaagtaagaaatggagagtaagggggtcggctaggactgagaacaaccagaaaaaatgggtttctaattttcaaagttaattttggttgaaaatgaaataaatggtcaaatgaccaaaatactcccaaaatcaatcataagcatatccatatactcaagggcaaattagtcaattcatcacacccatataacacataaatttcagatttctcatttatcaccaaaactcaacaattaagggcccgttttggcacagcttttggaaaagctaaaagctgttttttgaaaaaaaatgtgataaaagtgtgtttggtaaacagtcaaaaaacaactttttgaagaatttttagaaaagctacagctaaaagctgaagctactccaacccaacttttagaaaaaattgttttgactaaaagactataataattttttttatactaaaaccatatttacttatttattacata

SEQ ID NO: 309968 - DNA, 2860 bp, Cannabis indica
ttagtttcttcatgttgaaaaaaaactaaaaatattttcatacacttaaaattgttcaaacctatttttaagtgaacaaataatttggtcaatcaagttaaaaataatcaattcgaaatgattcttcagtggatttaattatatcaacatcaacatttttatcaaattgatttttcctacgaattaatcattttcacaaaatttaagctctattcccatctcaattgcaattttttagttgaattcatagcaactgcaaatctatttttcctataatcttcaaaataagaaaggaggtattcaaatctcttatagccttgtcaatgtccatgttcttattactttgtaaatgtttactaattgagtttataggaaataaaatatcataccaaatggtcatgcccaacaaaaatttaaattctctaattcataatttactaaacttgaagcttcactctttattttaggatgctcacttatttttgcaagttcaagtaaagcatctcttatatttggagcttgagatataattaccttaacactatatgtgactttcccaacgagtttgagataataatttcacagtaaaagtattatttttaatattgcccgtcgtttggttgaaaaagagaataatgaatatatataaatatatatatgcgttgtaaaataccaaaaatagatctagctttaacacaagaattaacaacatcacaaatcactaaattaaggttatgacaaccgcaaggtgtatataatgctctagaatttatatgtaataatcttttttgtacacctttgtactttcctttcatgctagactcattatcatacccttaccctcttatatcattgacctcaagtttcaatttttcaatttcttttgcaagttcatcaaaaagtcattttcctaaagtatcctccacattcaaaaatcccaacaaaaaaaaatctcccactattattgcactagatgaaatatctatacacctcaatatgagagacatttgttcttgatggcttacatcaggagtaaaatcaagtaaaattgaaaaaatatttagctactttaatctattttgaaattatatttttcactccaacaattgtatcaactcattttgaatattatgtcccaaataatgattatgaattttactattttaaatacgtcgaacatattcttgtattattggatcaaattcaacaatcatttccattaagctcaaaaagttactattattttcttgatagatcttttttattacatcctcgaaaggccaaattgtttttagctagatttttgacaattgtacttattgttactaaaacatttctccaatgttctttctatttattaagtctttcttgagcatctttatcaatcattttattctttgataatctcaattctaaatcaatccaaacactcatgttaactatgtgatcattacttgtttcgtgattcttcaacttatcacctaaatgtctccaatctttagttcctttgctacccaattaatttatacttaattaccatattagatctcttgccaaatagtttataataaaatatatttcatcaaaatcttttgagaaattcattttttttcttactctctctcccttctttaccatcaataccaccctaaaaaaaaccaccacaatccacaccaccagaacaaccacaccattgcaccactagaaataaccaccgcagccacaccactgccactactacaaccaccaccatcgcaatcatatcgctgctcgttctctctctctctctttctgctgcacaatattcaagccaagtcaataaaataaaaatttctaccaaataattaagtatcaagcaaacaattaataattatatgtatttattgttactttgttattcgtatggtgtgcatttaaaatgaattcacacttttctacatattctctaaaaatttgcctaacttattatgtgttttgaaatcaatatatttattggtttataataagatgaatagagagatttctacatgatcatgtaatattcggaaaatgagatatggattagtaattaacttatttatagttcatccttctcctcctcctcgttctcgaattggcaacgccattgttatggggtagtgagatgagtgagaagaaagtgatcgagagaggcgacaaatgaggtttggggttggaagggaattagggttggggaattggtaagggtttggggataagaagaggtagaagaagaataaggaaaatagtaattggaagagtaagagaaggacgattgagaaagagagatgggagaatggttgagagagagagagaggaacaacgaagaatgaaagatcgtggcttggttttggtgtgagattgcgactttcgtggtggtggtggcggcgagttctactatgaagatctgaaaaaatatcgaagatgaagaagaatgaactgagagagagggcacaatccattgggtgcagcaaggttttttttttttggctcaacgtgtagcaaagaaattgggtgtagggtttgacgaagaagaagaagaaaataataagaaaatagttttggaaaattttacaatgcacctcctaaaaggggtgtattagtagacctcaatctgtttcaaaatctagaataattttttagtctaatttttttcatgtttgtggacgttgtagttatttaaagcttcctgcaaaattttgaggaattcaaaaaaatttaacatgtcgaaaatatggttcaaagtagggctgaacatttctagcgggttcgacccgaacccaagcaacccgcccgaacccgaaccggtgaacctgcaaattttttttttgaaaaaatgttc

SEQ ID NO: 309969 - DNA, 1482 bp, Cannabis indica
tctttgtatcctaattttgattttaattataaatcataactctaaagaagaaaagggagacatgatatcagtgtagctcttgaaaatgacctcttatttagaagaataacgaaaaataactcttattatatgttaatcattgcatatatattttagttttaaaagatggttactaaaaggagaattaataataagaaattcctcaccaattatctcttgttaaacctgtaatcaaatacagagacatgtcaattgtaatccttgatagccttgaaggttttccatctttttttgcttctttgcacataatgttcttcattccacacttgcaacctatcataaatgaaatgaaaaaaaaaaatcatccctaaaatttccactgaatcattattataagatcgaaaatattcaaatttaaccataaaaataataatcgattcaatcaaatagaaaaagcaaaacttttaagaaaaaaaaaactttattattgaatatatgtataaataaagattttacttttaatttaagactataaaattaaagagacattacatataattgaacgacggaagagggtcgtggtggtggtcggtaatgatggagttgctggaatgttctgcttcttacaaaactatgacagcgatgctacgatttcttgggtactcggttgcggtcacttgttctgcgaggtttatctccttgaactctcccaacgcttcccttaaaccattcaatgccctcaaggcccttctgttctccccaagaacattgatctcctctctctttgtaactcccaaaatcctatccccaatattattacctccgatgatccccattgataatattaattttccttctctgttcttcctccattaggcttacaattttaggggttatgtgggtggagggggaatacttgtctctggatcgattttgatatgcctttgctttaaagtcttcgtcacacagaagagaaaaataataataaatcaatttgaatttaaattggaatttgagagttttagagaggcaaaagatcctgataagactaattcatatgctatagagttagggttttaatttaacaagagagttaacttcaatgttaagtttaactgataaaaagaaaacaatctttaaactaagaattgtcgttatatagccacttttaatatataaagatatgaaaaaataaaataaaaatcatattgtaataggaacatttcatttaatatacttaaaaaaaatctcaatttcaaaaaatacccctttaataaatttatataatacaatcctctcactttatttaaagaaacccttaccatttatttttttcaaaaacttaaaaaaacctaaaaaaaaaaaataaatactctctcgacagcccccatcagccacccgctaccttctagcccccaactctgtgtaactcggccacaatctgatcccactctgcccactcgcgcgaagaataaaggaccc

SEQ ID NO: 309970 - DNA, 1582 bp, Cannabis indica
cggataattattaaattttattttgacaaaaaaacagttcagggtcctatttttacaattttggaaaatatagggtctattttatcatttaacaaaatagaaggtccaatcagtaacttttgtaaaacacaaggtccaaaatagtatttacccaaaataaaataaaataagagaaatttatttattcatttatttgtttgtttttttgcttaacaatattacacaaaatttaggggggccaaggaataaaaaaaaaaattgatggctaaaattaaaaatcaaaattaattgttttttttttctaaaaaataaaattaagattctctttctttatcatttggtcaaatttgactttggtcaatattaacctacggcaaatcaattttatttatttattttttttttaagggtattttatttatatttattaaaaagaaaaaaacagctaagccatgcatgcaccgactgataataagatttaaaattacatatttacccctatatttattcttgaaataataattgtaatttttggtatgacagctcatattgataattccattaaaggaaatcttggaaaaatagaaagttggtcttatttttctcccctactattctatcaagtgtaaattgcaaccaaatttttaatattttcatttccttaacaattaattcttaaatttttaatatcccgactaaactgctatcatgtttggtagcagagtttgaagtttaataaagtttatgaatattcattcaaaaaaattcttaaatttaaattttagtaacaaaactcttaaaattacgatgtcattaacattttacagtttttatttaaatttaactgttaactactgttgacataatttttcgtcaacttaatttaagaaaattacttattcaaaaaaagaagagacacaaataataagtgaacatcaaatatttttacgtaattttgtagttaaaatttacatactttacgagttcatattatttttgagttttggttgtatttacaatttgacaaagtttctataaatcagaattattccattttccctttgagtgaactcatatttataagaataagattgtggttactcaatcttatcttagttaatactcatgcttcatacataaattgtacatttagataagtataaataaccgtttatatttaaaaatacaaagaagtagtctttgaagtggtctttaacttggtcagaccatattatttatgaagaggtgcattattgagcatatattttgaggagatgcattgttgttgcgtaatacgaggcaaatcattactgccgtgtaatacgagatgattcatcactcatgtgtattacgaggtaattcatcactgctgtatattaaaaggtaattcatcacattgtgtgacagacagtagttccgtgatccataagggtaaatactgggtaagctgtgtaatcccacatcgcttagggaagatcaagtgtgatgattctgaggctgtgtaggtatgaaactacacagttgaagatggctaaaatagattgattggtactacctatatcaacaaggtgcatcttgtttt

SEQ ID NO: 309971 - DNA, 1200 bp, Cannabis indica
ttttaaaatttgtccaccacaccactaattttttttttaaccaccactccaatctatccaagatcacaacaataattttaaaactactccaattatttcatcacacttcaccaacttcaaaagtcacctacacttaacccaactactcggattgcacattcccacaatatatatattaaaatctatccacacaccaaaccaacacttctaatcacaccaaacttccaatatcacaccaagaatttcaaagtcacaccactcatttcagattatccatgtaatcaaattaaatcatttccacaattaaattcactactcagcagccatgataaaattttcactaatacttccaaaaccaattcaacaactccaattagcaatattatccaacttgacacacccacacaccaccaatttaccactcggcacccaaaacaaagtccaaatgaaaagaaaaaaaaatactagcaggttattcttgacaaaccagaggggtttaagtgatccgttagcctccttgactgcttgcacacgagaatggaaggaaatggtgatgatggaggcggctggtgatctgtgttgggtatcgtctgtttgcgtggaggtggagagtagctgctggttgaatgaagatgatgataacaactttgaatggacgatggaggttatttcgggttgaagaagaggtgattggagttgagttgaagaagcggtgatggtggttggtgaatcgtggtggctgggttctgtggctcgagttggtggtgggtcgaccagagatgttgaaggtgattcgtggttttttgagcttgggtgccgaccagtgacggacccagaatttttgatcagtgggggcttaattattataaaaatatttattatttactttacattaaaattataattattttgtggggactttttactattttgttgtataattatttaattaaatagaagatatttaattttttttaacactatttttttttagtggggactatagcccccacactttctttactgcgtccgtccatggtgccgactgctgttagacaaagaggatgagggtgaacgaaggttaatggaaatgggctagggttgataatggttgaacgtgacttttcttcttttaggtcctttttgggcaatttagttgtcaaaatatttttaaattaatgtgcattttaattgagcatt

SEQ ID NO: 309972 - DNA, 1759 bp, Cannabis indica
cacatttttatcacaattttttcaaaaagcaacttttagcttttccaaaaactgtgtcaaacggaccctaaatcacttacttgatttgacatcgagaagaagtttttaatcaattttttttttcatatttgcgtacgttatagttatttaaaatatcttacaaaattttaagaaatttttaaaataatttacaatatagaaagtagtttttaaacaatctattttatatgcatataaaataaaatagtcatgtgtgcaacacactatttgaattctattttcaacgtattaaattttttaaaattttttaaaattttacagaatatcttaaaaaactataacgtacatgataatgagaaaaaatttaactagaaatttattttggataccaaaacaaacaaaagtgcatcggtacaattcttttaaaggggtacattataaaatttttctatacattttatagatgataaagttagacttcctaaccattataaagagcattgctacgggtaattaaagtctctagcaccactataaggtaacaccttataaatagttaataatttttttgtaatttttataaactaaaatatataagacccgatattaaattacacctataaccatattaaacattacaaaagtgctagacttatagtaccctttactaattcttcatttaatttatttatttgacaaattctgtctcttacttttaaaatagaaaaaaagaggatgtctggtcaacctttgactagtcttccccctatcactttacatctacacaactaaatacaaaaatttacataataataacaagcaaatgaatggtcgtgttttatgcaggttttttggtggtatatatgaaaaataatatatatatatataaataaataataaattccacaaaatatatatataaaaaggttcaagaaagaaaggattatatatactaatcttaacaccattgtaatgttgtaccaacaagattctcactaataattaatgccaactataaaaaagaaggctttgtcttttcatggacacttcttcttatttgaataatatataacaattaataattgcccaaatattcaaaattttaatatctaaaaaaattttaacaatgaaatttgtcaaacatcattccttcattgttgccgcgttggtcatatatttgatattaatcaatatatatttgatattttataataataaaaacattacaattctatttaaatctaaactacaatccatacataagggcaaaaatcatcatcaaatatatattatattacgatatcaccttatattcaacacaactaatcaatcatatagtatagtactttagcttaaacattataatattctatctggtaggatttttcttcctaaattcttaatcccctgagattgttttttttctttgaccatgtctaccagctttttttgagtttaggtatggcttggtcgagatttgtagttttgctactatgtttagtcttgtctctgtgtcatgattttgagtatctattttcttaagttactacaattaatcttgtctttgtgacataatttttattttatttcgttgttagtttgccttctttgttcttcaattcctcgacatcaaactactattaatgattgagaataacaaattctatgcggcaggaccgagttaatttgagccctaagaaaaataattttttggtattttttataaaaataaatggcattttaaaaaatatgtatattt

SEQ ID NO: 309973 - DNA, 838 bp, Cannabis indica
aaaaacttgaggttgatgcagattagtccccaacctcgaaaattgacggtgaaaatacccaaggtcgacaaagttatttgtccgttcatacacaatccgttaatgtaagtaacgtgacacgtggacgctccaaatttagtcctaacctttttaatttttatttttccctaaaattaaaaactaataactaaaacaaataaataaataaaacaaatctaaaattaattaaattgattgtattaaaacaaaaagaaccaaaaagaaacacaataaaatttcatagtacattataggacactattttttaacagagaatcttgattcctccagtagtggacataaaacttgtgttatatttattatgatgtagagtgctccgctcatcattttattacaatatcttagttaatttttgtacctgaaaatatatgttgaaatattttttaaaatttttcgtatagtgttagttatactcacaacatcatcccaataattttttttttttttgaataatttacagtgctaaaaataggttttaaattttttgaacacgcgtggtcaactggaatatgatcaagaactctgtttccagtagtataaaataaattatttaaattttttaaaaatttatatggatgatattgtaattataacgaacatcgctataaaaaatatattttgacatgtaattttgggcatgaagattaattaaaaggttgtgataggatgttgtaattagcattcctctattttatttcattatagatagaagattaaaataaataaaaaaaaacacaccttgaaattaataaaaatctaaaaaaaatataaaaaaaaa

SEQ ID NO: 309974 - DNA, 6410 bp, Cannabis indica
attttatattctgcctgttcagttttgtcactgcaaaacgagtttctgcagtagcagaattactttcagcttctgcagacgcatatagtttttatattttcttatatataattgacatttacaaaaacacggcttttcaattataaccacactctcgtaactataaattaaaaatattgtatctatcattattattgctattttttataatatatgtttggacattatatataaaatatattttgaaagtaattaaacttttaatcaaactcaatttttatcaaaatattttttaatgtaatcctcgtatataaagatatcaatacgtataacaatgaaattcattcttttatatatataatcacatctaaggaacacactaatgtaactgtaatggctaaaaaaattctcaaagatcaaaatctgcaatcctatttcaaaaattaaaaaataaaaatacattacctaactaagaaaattgaacatacatatattgcacttaacatcacttaactaaaaagaaaactaattatacgtgcattgcacataacatcaacctaatatatatatacaccgtttcttgaacaaggtcttcggccatgatttgaactaaactttggaaaaaaataaattagatattttgaataaaattattaatttttttaaaatttattaaaattttatttttagttaaatgacacattaattaattaaatttttattgttaatttttttattttaatattaatttcacattattcttgacatgttttactaataatcattattatttttttttccttaatgaataaattttaattcacttgtaagaatctttcataaaaaataatatcacaataaaaataagcataattataaggaaatatattatgatattatttagaggtgatttatatatataatttctcattaaaaatataattaattattgtggtgaatcaatcaccctccaagaacataacaaacacacataaataaaagattaacaaagaaaactaaaatcagaaagatgtacaacaagaaatgaaaaacagagtatgaacatgtaggatcacaaggttcgatcacaagctttgaaacttggatctactccttgggtggaactaccttgaggctttgcctttattgcttgaagatgaagctcaacgatggtacaaaaacattgacagaaaataagaactaaatggagtcttgctcctacaataatggctcacttgaggcacatgagttatacaaatctcataccctttaccactctacacactctcaacttaactcagcacatgaatagcgaaatagtctttatacatagactgatacaagtgtactagaaccagcaacctttaacagaattaactaacaaatcctaactaccaaaactgtccaacttgcactaatgtataaatcccacaaatttcacctggtttatatacttgtgcatgtttaaaaaactcttagcaaaaacaaattagaaaaaactgttccatcaataaggtttccttcaggaatgaagggtcagcaatcttctatgttcagcagctttaggcatagcctaaacttctcactagtgacacacttagtaaacatatcagttggattttcatgtgtgctaatcttcttcacgctaactttcttgctggcaataatgtctctgataaactatagcttgatgtcaatatgattagacctttcatggtacataggattcttcataagatggattgcactttggttatcacagtgtatggctaaattttttgagtgaatccctatttcagttatcaaacccttgagctagctggcttctttaacagcttttgttgcattcatgtactttgcttatgtggatgacaaggctacaaccttttgtaggttagctttccaactaacacaacctccaaaaatagttaacacaaaatcaaaaattgattttctagtgtccgaatttccaacatagtcaaagtcaacaaagccagctacattttcagtattattgctgtctttgccaaatactagaccactgtaaagtgagcctttgatgtatctaagaatccatttcagtcccttccaatgttcttcacctggatcactaataaatctactgacaacactcatgttatgtgccagatcaaatttggtgcacaccatatatagcatgcatgaggcttcctactccattggcatagggtatgttctccataatcttcctcttagcatctgtctttggtgactggttcagagacagtttgaaatgttgagcaaggggagtagttacaggtttggcatctttcatgccatgtttgtcaagtaccatcttgaggtaattttcttgagataggctgatgccatgaggtctatttctcttgatgtcaatgcctaagattttcctagcaggccctaagtccttcatttcaaattcaacactgacttgagacttgagattgtcaatatgattcctttctttcacaactataagaattccataaacatacaatagtagatagataccatcatgaaagtagacacgtgtatcataattgcttttggttaaaccaattttcatcataaattcatcaaatcttaggttccattgtctaggagcctattttaatccatagagagatttgtttaggaggcatacctgatctggttttccattctcatagccttcaggcatctccatataaattgtctcttccaggtttccatgaaggaatgcagttctaacatccatttgatccacctcaagatcgaatttcgcaaccatggacatgatgactctgatagttgtttatttaacaactagggagaatatatcattgtaatcaatgccttattattgggtaaatccctttgcaacaagtctttctttgtaccttggaccctcaccccttggtattccttcattctgtttgaataactatttgcatttgattacttttgggttgtctgatttgttaaccattttccaggtcttgttctttttcagtgatagtttctcctcctcaatagtttgcagccaagctacactattcttctcagtaatagcatctatgtaactagatggttcagcgctgtctatgtcttctgcaacactaagagcatagacggtgaatttttcttagccatatttgtcaggtgcttttgtggctcttctttccctgtctctagctagttggtaatttcttagcttgagtgtcatctctagtggtatcttcaacaaaggcttcatcaacatctgtcggtcgagatgaggttgtatccacctcaatttggtccttgttgctactagtttttgatgtagcaatcctaacctcccttttcgtaacaatttcttcctcattgaagaccacatcgctgctaatgatgcatttcttgtgccctggttctaagcaccacaactggtaacccttcacaccatctggatagcctaggaacatacattttagggctctaggttgaagtttatcttgcctgtaatgagcataggcaatgcagccaaatacccttaggtaatctagcttaggtacaaggcttgtccaaacttcttgtggtgttttaaacttcaaaggaacagatggacacctattcatcaggtaacaagcagtcttaacaccctttaccatacaccttactctctcaataagagttctattcatcctttcagcaagtctattttgatgagatgtatccctacctattatgtgtctagctatctcatgttccttgtagaacttatcaaattgctttgagaaatattcccaaccattgtcagtccttagctttctaattttccatctggtttgactttcactcaacctttttcacgtgcaaaagtattgaaagcctcatccttgctcttcaagaggaacacccacactttccttgagaagtcatttataatgctaatgaaatagcttgcaccacctagggtcttgattctggatggccccctagagatcagagtgtatgtaggccaattttgctttggtagtgtgttatccagtagagaatttaaccctacaacttttaccataaacacactcttcacaaaaaccagtttggaactcaatccaccttgaaatagcccttgattgtcaagctcggtgaggcctctctcactaacatgaccaagcctcaaatgccatagattagtgttgtcattcttgacattgttaacaacaggtgatgtgttcctataactgctgttccaatcatataatacagaccatttttgagttacctctaacaaccactagagaaccttttgaaatgctgagtatgccattgtctattttaacagtatagccatggttatcaaacataccaattgacaataagtttcttttgagatcaggcacataccttacatattgtactaatcgagttatgccatcatgcgtcttcacctcaactgtgccaattccaagaatcttgcaagccttattattttctagaagaacagtactaactgagttttcttcataacttgtgagcagatccttgtttggagtcatgtgaaatgaatagccagagtcaagaatccattctcctcctaaatcttctcttgagacaactaggacatatgttgaatcatagccacttgatgcaatatctgcttcacctctttctttactcttgtctctcttaagcttgtttttcagttgttaacattcatccctgaaatgtccatctttcttgcagtaaaaacatttctacctagctgtatttctgttcttggaatatgacttgtgtccaatcttggatttcttgaagtctctcttctctattcttcctcgagcaaacaacccttcaccaccaatttctattctgtcatcaaccttcttctaaatttcctttcaattgagtggagccttaacttcagacatagataaggtatccttgccatataagatcatatcccaaaattgttcatagtttttcgacaaggagcttaacagtaggatagcttggtcttcttccttaattttaaccccaatgttgtttaagtctacgagcagtttgttgaagtcattaagatgcttcttgagttctttcgtttcatccattttcatggtgtaaagcttcttcttcaaatagagtttgattgccagggatttcttcatgtatattgatccaagtttgttccacaatcctaatgcagtttgttatcctgaaccttctcgaagcatttcatctcctaagctcaatagaattgcacttgagccttcatctcaatttcttgagagactttcttggcttcttctccttctttagagataacttccattatggcacttgcaatgccctgatgcacgagtagtgccttcatcttgattttccaaagaccaaagtcattgactcctgtaaacttatccacttcaaatcttaaagttgccatctttgttttttaactttgattatctcggttcttggtttttcgacaacaacctgtgctctgataccatttgtggcgaatgaaacaccttccaagaacataacaaacacacgtaaagcaaagattaacaaagaaatctaaaactagaaagatgtacaacaagaaatgaaaaatagagtatgaacacataggattacaaggttcgatcacaagctttgaaacatggatctactccttcggtggaaatgccttgaggctttgcctttattgcttgaagatgaagctcagagatggtacaaaaacatgaatagaaaacaagaactaaatggagtcttgctcttacagtaatggctcactcgagggacatgagttatacaaatctcatactctttacaactgcacacactctcaacttattttagtacatgaatagcaaaatgttctttatatatagacaaacacaagtgtactagaaccaacaacctttaacataattaactaacaaatcctaactaccaaaactgtccaacttgcactagtgtataaaccccacaattattaattgatagttccaaaattttagattaatttttttttttcattcaaaattttagattgattgaaataaaatattgacatttagaagtaaatattaatgttccaatttattgaaagaagaagattttttttttttgaaaatatatgaaatatatattttaatgtatatcacccatattattaaaatatattgtcgaaaatctgtagctttccaacaccacttgatacaaggattaaaacatgtatgatttatgaaatttttcaaaacttctcatctaattatgtgtccataaaagatgttaatattaaaaacacataaaactgacccaacaggaagactcaccactctcaaaggaaccaaagggttcggcccaattgaagtcaagcccaattgaagtcaagcccaattgaagaataagtggttgaaataaag

SEQ ID NO: 309975 - DNA, 2540 bp, Cannabis indica
ttttattttaccaatgcaataccagcttttgccagcacaaaaatgtgctggcaaaagtgacatttcttgtagtgtatgtgattgatcagtagtatacaccttctctctcaggctagctaacttttgggagcgagttctacccaaatcgttgtatcacattaatatagtggcattgatatattaattattattataagaaatgacatcgtctcattggtttcttaattaatttttgcgtagcccgatgaaaatcctttcgaaccaggaaatccaaaaaatttgagttacttttcagctgcttcttcaagatatggagaattttttaatggaaaaacaaccactttatgtgtgcgtagtattcctggcaccactagtgagattctatgcaagtccaagcctggagataaaattcaactcgcaggtattttagctaagctcaatgttaaaattgaaaagattttattgtggaattttattccagtaatattataaattatttttacaatgtgacatagaatgtatatgtattatctattgatcactaataatatgaagcgcgctgcactcgctacaggcccaactcgcgaggcaatgatttcaggagatttcagaaaccctaatgcaactcacatatttgtggctactgggactggtgttgcgccatttagggctcatcttcaacgtttcttcaaagaagatattccaacattccaattctccggacatgcatggctattccaaggggcgagcaacaacgatagcccactctttaaaaatgaattcgagcaatatcaaaaggagtacccaaataattttcgttataacatagcatatagcagagaacaaaagaacaaattgggggggaaaatgtatgttcaagacatttttagtgactatgctgatgaggtgctagagttgttgcttaaaggagcctacatatacttagctgggcttaaggacatggtaaaaccaattgaagatgccttaagtgatgctgcaacaaaaaaggacaaagattggaatgagatactcacatcgttaaagattaacgaccaatggcgagttgaagtttattgatgatgatgttgtcctactacgcacaagctagtgtgtaagcctacgtacatgcatgcatgcatgtcttctctcttctattatatatttatatatatttgtgtgtgtatctctattccccttcaaacatgtgatgggagtttgtttgagttgtttcagttgaataaagaagagaataataataatattaataaaagtttttcatttttgtttgtcattttatattattattattattgttgttgttgttgttgttgttggtgccacttttgttggatatatagcgataacaaggtcggttttatgttagggcgagttaggcttgtactccacaccaagcccaagagtttctttttttttttaaatatatatatatttaataatttttaaaaatactttacattttttaataagggctcaataatatgtttttttcctaaatctcaaagaaggtcgtgagagataataaattattgttaaacttaaaagctagaaaagccatctatatagttaattataagcaattttttattgtataagaagaaggaaatattattttgaaccttctactttacaaaagttacagttggatttaatttttattttattaaataacaactcatatcatgtattttgtaaaatagaacataatgatacctcaaactccattttggtcaaactttttttagataaaggatagaataaaaattgaaccataatttttagagataagaaatagaaagttttagggtttggaggacaaatttttagagttaaaataaaattgagggacccggttaataatatttacaaaataaatgatcaaaaatagtatttactttttatttattataaatattgataaaattataataatataatagaaaattaattacaaaacttctattattggtaaaaattgaaccataatttttagagatatataagaaatagaaagttttatgggttggaagacaaatttttagagttaaaataaaactgagggataggtccataatttttataaaacaaatagtcaaaaatagtatttaccttttatttattataaatattgataaaattataataatataatggaaaaattacataaactgttattattgataaattttttacacttttacgtttaaagttatttttttttttacattttcacggtattctataaaaataagaaaaataacataaaaaataacttaaaataatattaaaacaacaacaaaacatcaaaataatataaaaaataatatataaataacgaacaatcataatgttcaatttggatcaaccatgatcccattctttcctacaatatgtcccagaaatgatacctcagacaaccagaattcgcattttttgaactttgcatataacttgtgatccctaagtcgctgtaataccattcgaagatgatgctcgcgctcctcttctgactgagagtatac

SEQ ID NO: 309976 - DNA, 1348 bp, Cannabis indica
ataaaagattttaaaaaacaaatagtgtgaactggtgaagaaatgagggagaatggggggttttccacggtggttggcgagggtttcgtatgggtttttcgggctggttcttgctgaagaaggaggttaaatggggaagacgaagaccctgctgctcgtacatataatacatatggcatcggttattaggcaataatcgatgctatacgtgcacagtttattgacacgtgccctcctatggtgtcaattatttccataataaccgatgtcgtatgtattatatatacagcaggaagattttcaacccctaaccaaccacataattggttttattaatctctatacctatggtttttatcaaaaaaaaaatgtatctaaatgttaatttcgaactaggcaggtattttcacaccttttagcttctcctcttataaattgggttgaaaaaatagcctctcaagacccatattatagtagtgacaaaacaaaagtatttgtgtagcttgtgtagcttttaggttattttttaatgttgattatatgtgtgttatacttcataaatgtaagatagtgccatataatttagattccatatatcttaatcaggacatagattgtttcataatccgtagtcatactagataaaagaagaatattagtttgcattattgaaataagaagtggaagcaattctctatattttatttcctagttaaatcttgtttattcttttattatttaattattgcttaaattatttagttttaaaatctatttttcgattgttaaatagaaaaaaatatttaattgtttggtacttagctacattccttttgggaacaatctcacttacctgagtattacttgtaaaagcaatacatatacttacttgttagatttataacagcaggaccccagccccggcccggaccccgaccccagcccggaccctggccccggactctgaccctagagtcgcactcggacccaaactcgaactcgaaccccatacttagtccttagacctcggtcttagccctgaccctggacccgaggctggagttgaccccagccctagactcagacttagaccccgaactcggtccctagccccaaactggcatcgggacccaaacccccgccccagaccccagaccccaaacctagaccctaaacccagactccagccccgaaccctatcccatccccggacccagactccagcccaaacttgattcttgccccaaacataaataaatatataaactatatttatatattttattaagtatataattattcttagtataaagttatatttttgtaatacgagacttaaaaattatat

SEQ ID NO: 309977 - DNA, 569 bp, Cannabis indica
ctggagaaggaagctgacaaatatatgttaattttttattttttcttttgcagtgacaaataaatgttaattacaacttttagttcctattgtactatgtaattagtggaatcaaactaataggtcttcaattaaaagatcggatactcatattttcaacacgtaggatgcatcgattttaactcaaaatatggtcagaatttggagttgttattttctacaaactgtaatttttatatttatggataaaaataataataatatttttatcaataaaaattaagtcaataaataaagaatactttaagaaaaaaaaaagaaacttttagtagtattagtaattaaattataaaattaatagaaatagtttaagagttggatcaagacgtttgctggttaagggaaattaccttttactattttcactactgttgttaatgattgttgtgattaataatattagtgaattttctcaaaaaaaaaaaaaaaaaactaattttaaaaaaacgtgaatagtgtgtacctttttcggttaggtatttgtttgttattatttttcaatgtgatta

SEQ ID NO: 309978 - DNA, 835 bp, Cannabis indica
gataactaatcagattgtaaagagttttatttagggcataaaacccaatagttgaagggtggtactggagccaagaagtatgctcaagaatattttgagcaggagaaggatgctaaagattattcagagaaggagagcccatgcaaaaagaagaagactttcccgaccgagcaagtgcccatagagcatgctattcggattagggaacctggcatgcctgctcagccatctatccctatggagggaaaaggaaaggctgtcctggaggagcaagaagactctacatatgatgacgctccatctgtacttgtttgggagaatggtcccgctagcgtgcagagtacttcaacttgcatttattttccttgttttttatgccctcatatattttatgtcctcttctgactacatcatttttcctgtgcagaaatgtcttagaaaattattgaagctctgaagaagagagtaggggtgagctcggacttgtctcctctggcgaagaagtctaagggtggtaagactccgtccaaggtaaaggtaccggttgaagaagtcattgatctctctgagaagcaacttgctgtggacccttctaccttgaaggtcgctaagcccaaaagttcccagggggagttcggacggaacttagcaggctaagattggatccgagctatgaacaagttaggggccctgccccaactctagcgttgtgcacgaagacctggaaaggaaaagtcatgcttaaccactacgtgtgtgacagtcagtagtcccgtgatccgtaaggggaaataccgggtaagttgtgcaatcccacaccgcctggggaaggtca

SEQ ID NO: 309979 - DNA, 1930 bp, Cannabis indica
tgttgtgactgaaagatccgtgactaaaagtattagtcaacaaaaattacaatttgttctgactaatttagtcacaatatttgttgtgattaaaactaaattaatgacaacttgtaactaaatacgacgttttagttacaagtaactttttgttataactaaaagtcgtacatgtagtcacaaaagatttatgttgtgactaaaagattgtcactaaaagtagtagttttttataatgacaccgaagtgtttataagcaccactatgaagtggctttctataattaattagttagcgattttttgtaattattattaaagttaaataagtagaacttaatattattaaagaaaattatagtgccctttaacatttttctttaaagatttctcaaatcctaagatgtttgcacccttcaactaccctatgtagtatatttaatttcacggtcatttcatatcattatttgcttttatattagttgactttatacttcttttaatctacaagttagcacattcagttattgttgctttatttttacctaacaaatactcaagaattgagtataaaaacaaagtaataaaatattcttattgacaatcttttagttacaacataaattttttatgactaaatgtgatttttaatcacaacaaaaagttacttataattaaaacatagtattcatatacaaattgtcactaatttagctttagtcacaataagtataataacacatttattcacaaaaaattataatttttataactaatacctttagccacaaatattttagttacaacataaacacaaaatttgttatgactaacctgatattttgtcaaaattaaatggaacatttaattaattttaatatgttgaaaattagcaattttaacgttaacttgtaattaaagatggtgtaatacaattccaattccaatgaggcgtgaatatgaatacgtggtctctctttatacttatgccacaaaagtttggttattaagtcaagccaaaccgagacaagatcatgttcctttgtccatggaaaaagcacaactaacaaaaatttgaatggtacaatgaggtacttagcactttataacgcgatgtcatatatattgttatgggtataattaagtattggatcgcatactcaagaaaataggttttaggaaatatcgctacccaatcataaagcgccacttataaaaagtgttaagtaccactagtgcccaactttaaaaggtaaacaaagagcgaacatcatcaattgaggaattaacacaagtcaaatcaagacattaataatgatgtattctttgtttggttgatgagaggagcaaatctaacgtttcccacgatgaccctcctttttgcaccgccttatgagccataactgcaaattcttctaccttcttcctcatctcttttcccacctctccctccattaactccttcaccattttactcacttcttcactcttcacaatcccattcaatgatccatcgtagctcttaactctcagcccaatcttaatctcttccaccaccattttcgcgtttatatgttgctccgccatcatcggaaaacctagaattggcaatccagcacttaaactctccatcactgagttccaaccacagtgactgaaaaaccctttaacgcttttgtgcttcaatatctccatttggttaacccagtctctaaccactattcctctatttttcactctcttttcaaactcttctaagaacttgttctcttctggctctaattttcttagcacccagaagaaatttacgtttgaatcttccaaccctttcgcgatttctctaacttgttccgatgacacagttgcttgagacccaaaggccacataaagaaccgaactcgattccttttcatcgagccatggatgaacaa

SEQ ID NO: 309980 - DNA, 1016 bp, Cannabis indica
gaataggaatggaatagaattaaaatttaaaattgataaaaaatcattaatttttttttcttgttacattggaatggtcattcatttctttttaaaatggaatagccattccaccaaaatagtggaaagagcattccattagaatgccattgcaatactttaaaatgcaaccaaacaaaaaaatggaatgaaaattgtttcctttccattccattccatttcattacctccaaccaaacaccaccttaatgtattatgtatgttatatagaaaatttatagtttttatgtttttcgctcagtgacgatagaaaatacgaccgatagccgagttactcatatgggttagcttagaacctttttatttagcggagtattcataagttgatatttagaatatcaaaattaagtgggattatgattttggaccattttatccccaagtcattttaccatttaaacacttaagggcgacattatagtcgttttggtttaggagttaggtggttgcttttctagtggatatttggccactatgtgttgtttcagcctaatcctgttattgattaatgagattaatcaaattttaaagaaaaagaaagaaaaaccaatattcatattggtatctatctgtaccacgaaaaaataataaatttaatactcattaacttttactacccatttatttcagtatctttccaataatagaataaaattaaaaatatcttcaattcactattaatgtccccacctcccattgattatgaaatctccacatttataattttttcaccaaaatagtattatgttatatatagtgaaactcatatttattgtcaatataaattctcataaattgaattaaaatgaaagggaaatttgatattatatgcttaaaattaatttatctactaaaaatatgctagcatattttgcatcatgtaaagtatacttacaccatttttctcatccaattttacccctaaacaaataaaaaccaaacatccatctctctct

SEQ ID NO: 309981 - DNA, 950 bp, Cannabis indica
tatattttatgtaaaataaatttttttgaaatgaagtgcacttataaatttttgggtgcaaataataacataagggtttataataaagaaaaaaattaggttttttagttcctaaatttatagctatcaaaggctgtcttttttctctgatcaggcccgtcggctttacttgggttgcagcttggtcgggattgtattttgctatagcaattcgatttttgctactgcaattagtcttgtctgtgacatacttttgacttttgagtgttttagtcttgtctctatgatatgattttgagtattttagtcttatctgtatgacatagttttattttgttttgtttcgttgttggttcttctttgttctttaatggttcaccatcaaattattgggaataacaagtttttcacgattgaagaggttgttagtagtgtagttacataatagttgagtgctcaaactacgaggttgaatgaacctgttgcaacagtttctactgttgtgtctcctaaacggtggataaaatagaatatatgtatccttaaggttaattgtaatgtcaaaatctgttttatctgattttattttaattcttttgtcaaacaatctagaaattagacggatgattatttggttcgtttttctaattctattctagttgtgtctcaaacgtggaaaattttccgatgggattgtaaattattattttagtgagtattgctattaggcaacattggtgcccaacaccttttatagattacactatacgattggttatcaatattccttaaatactattttttaagttatatgagactccatatttaattacaccaataacgttatgacactaagaaatttgctattttaattgattttcattaaataaaatttcatgatttattttaaaaaaatatatatttttgtgtaaaataaaaattattaaaat

SEQ ID NO: 309982 - DNA, 1409 bp, Cannabis indica
agaaaacaagcgtaattttgcacaaaatgaatataatcaattgaaacacacctctaaaacactttataaaatatacctaaaactagcctatcaaatatcaaatgggtagggcaagatcatcatgtggagttctatcggggaaattctcgggatatgcaagaatctttggcatttatcacatttctttacaaactcatgtgtatctttgttgatggttggccaataatatccttatcgaattatcttcttcgacaaacttttccaaccagcatggtctccacaaaagccttcatgaatttcctttataatgctcttgaattctgtctgtaatacacatcgttgtaaatgcattgaatatcggtatagctttgcctctacaatcgcgtatcttggtactttatacataagttttcttgcctcatttttgctgatagaatttgacaagttaagagataattcattattggcgtcatggaagttagacttgtgttaatcatttctacatcttgtttctccatctaaaatattcttggtttttgtagcttttcaattggaaccaagttgaggtcgtcagattcagattgcgatgccaatttggccaaaacatcagcattgagatttggttctcttaatacgcgttcaattttgtaataatcaaaattttctaagttcttttgaactttttccaagaatttggccattttaattctccaagcacttgatttacagtcaattgagaatcgctaaaaaatgtactgctttagcatttacaactttaggtatccttaaacctattagaagcgcttcgtattctgccttgttgtttgaagctggaaattgaaaccttagcgcataatgaaacctaaagtttttcaggttataccagtattacacatgtccccgatccattgtcattggacgagtcatcaacgaataatttccaaaattttttattttgaatctcttttattttttctttaatatttatcccttaaattaagaaatctgacaaggctttccctttgatggctgctcgcgggtgataagatacatcaaacagtgctagttcagttgaccattttatcaatcgtcctacaacatcgggttttgagagaacttgccttaatggttgatttgttaaaacatggattaggtgtgcttgaaaatatggtctaagtctccttgaggcatggaccaaagtttgtgtgagtttttcgaggggtggatatctagattctatcccaataaacgtttacttacgtaatatactggtaattgggcctttccctcttctcgtactaatattgtgctaattgtattttctgatattgataagtatagaaataagatctcaacaattaccaattttgatgataccggtggagttgataagtgttggaaatatttta

SEQ ID NO: 309983 - DNA, 559 bp, Cannabis indica
ggtttgccattgctcgatcaagtcggacctccgtccagtttggctccccacgatgcatctcccaagtatacggatgacccaataattgaatatcacacaactcacattcagccgtgatgttgttgaaaccttcaatgagatttcttgggtatggattacctcccctcttctcttcttgacacatgatgttgttgaaatccccaataacacaccacggttcttgagttgagtcatggagagttcgaagcaaattccaagtgtgaaatcgcaagtgtcttcgtggttctccatagatgcccgtaagtctccaagtctgctgggtatcagttgtgactttaaaatcaatgtgattatgagaatagcccttgatacatccattatcctcatttctccataataaagccagcccaccttttctaccttgggcctccacacaaaaaattccttcaaagcccaaactccttcccacccattcaactctacttttttcacattttgtttcacttagaaaaatgacattgggtttcttttgagaaataatctcctttaggaattgaaa

SEQ ID NO: 309984 - DNA, 976 bp, Cannabis indica
tgttaattaagagacttttttaagtaaaaaaataaatggaaaaacatatatctatcgattaatgaacaacaaatgtaaaataactcaagcatttgttgttgacataagtagagaaggttaaataattcaagcttgcccctagatctatagattaatgaacaagttatgttgctaccacaacaattacggtgatgacactaatgagtgttatcagttacaggacgagatagaattcttgattcaacaaaagtatgttgccctccaacggtatgtgaggccagaagcgccaacagaaggcaatgctcttcttgcacctcataacgatgcaatgatcgtatacttagcatacacaattactagattcagagattacttgatcatgaatttaagaaatgctagaattgctaactaaggtttgcatgtttgatagctattctgaagtgattaggggtggatcatcctatggtcattaagataagaaagtttttgtgtcaacaaataattattttttaagaacatgactaaatctaaaaacaaagtagcaaagtaaaggaaatactatttgattcaaacccaaagtgttccatcatcttatactatataagatggtctcactccctatgttgtattgacacaactgaagaggataacaccactgatgttcctgaatagaaagtcacagtacctcatcgtagtgggagggtttcaaggaacacatcctgttatgacttggaagacactagtgatgacaatccattattagtttaaacaagcaatgggtcctaataaggaagactcgaagccaagagaactatggtttaaccactcacatggattaaccaaaagtttcaaatacaaggacaagaagggaaactctgctaattaaaatagctctattcaatggacttaagcaaacttcccgttcctagtattatgggtttgatgagatcatcaaaaccaatggcttgtggtatac

SEQ ID NO: 309985 - DNA, 2114 bp, Cannabis indica
cctgaacttttaagattattagatttaagaatttttattgaatttcattcaattttactattttagtgattgtttatggactaaatcatgctctccagaattaaatatctaccaaatcatgccccttaaattttgacatatactaatcatgccccctgaactttttatctatatgttagatttttttttactaaaattagacaaaagttcttaaatccaacaatctcaatagttcatgaggtatttttaacgatcttaaaagtttaaagaacataatttagtacatattaaagttggaaggataaaaatccgcattatattttctattatatattgacaaattaactaattaggaaccttccttatttcattttattataattataatagtattctcactccagaaaaagagagaaaaaaagataggaagaaaacaaagtcttatcatgatcagcacatgcgtgtatcactacaaagaatatcaaagtgaaattttatatgtttacataaaacgacaagtgacaatttgacattgtggataattttaggtaaatgtaatcttttttttcttttttttgaaaaacaaacgtttatgtataaaaagaaaataaggagactccatattatttgttgggattgttgaaatttgaactataccaattatatcttaggtaaaaatttacttagtcatgttataggtcgcaaaattataaagtttagaaataaaaacaaaattacaataatccaaaaatagactagagagtattacattgatgcacacagttaccaatacctaattagaaaggttcctttcagcgttttaataactgtctcagagtcgctctcaatcaacacaaaaagatgctttcaagaaattattgtctccatggctaacaaaaaagtcgcagcctcactaataagtgggtcagagaaactgagcctgttggtaaccacccacaaaacttatcccaagtaatctctagctaatgacaccacactcatggtcgcattccccacctttaacatcacaattaattttgatctaatctttcgggagtgggatccacaggagagaggtaacaaattgatgagatggaaacaaacagcagctatactatgcataacaatgagtgacaaagtcaaatataatgtttaatgttactcagattattattgtgtatcttataattatgagcctgctaaatcgtatccaccataatcaaagcatagaagaaaaactcatcaatattgacaccattagacttcagaccccataaaagtttaatccaacccaaacataggtacatgagtccataaccgacatatttccagtgggaggatctccatataagtgaaaagcaaagttgcaatttaagaaaagacacttcatagtctcctcaccctcaccacataaaggacaggaagtatcttcaatttccattcttactagcaatcagagcacaaattggagagtattagaaataatgctccaccaatgaacattatggcattctaacactttactattctacagggagaatgtaaagaccgcttagtttaatttggaaatcagcagttaattatgtttaattatggaaaattatttatagatatttaaataattatttatgctgttattattgaattctgaaatgcattttatgtcatatagtgatttttataattttgcatttccggtgcccggtaacatggaactcggtgtttggctcagtaaaatcacaacttagtatgttagtattaggggacggtttttagacattaagaatgtcgggattggtcggaaatttagaatttcccaaaattacccctttagtgctctttatgttattttagtgtgaaggggcaaaatggtattttgtcctttagtggacttagtgttgtgaaaataattaatttattatgttatttgttggctgaataaaggttgttattttgcatgctttctctcattattcaaagatttcaaaaacttagaaaaaatagaaaattcaagagctcatttcctctttctctctctctcggctgggtgtggttgctaggggctgggatttcttttgattttttcaagtcctttttcattcaatctaagtgtt

SEQ ID NO: 309986 - DNA, 690 bp, Cannabis indica
acacaaaaaaaacaaaaaaaaaaacaaaccaaatttgagaaccccaaatctgaaaacacttcacattcatccaaccccatatatgaagcaattctctagcagccacggaagcaatcacgggaatgtgaccgtcattcacaatagaccagagaatgatcaagtccacccacaccacttcccctacaaaccccaaagcttgagcaacctgtccgtcggtgccgcagagcccaatggctttgaccctagcttggttgatcaaagagactatgtttttgttcactggagcgactccgattgagctataggttgatctctggccagagcccagaaattgacctcgatgttgagccgtttgagccagaggttgatctcgggcccacctccgtggaccaggacgggacggagtcccatgcaggagagtaggacgaggtcgttgacgaccaaggcttggagcgactctaatttggtggcgccgccatacttgacgacaatagtctttcccctaaatttctggatgaaggggagggactcggagagaatgtctactcgaagttgagctaggatggctgagttcgctatggagagaggagcggttagggttttggggttggggtccggtaagagagagagggtgaaagaaatgtattttaggtttagattagggttttctttagcagagaagaagaagaa

SEQ ID NO: 309987 - DNA, 924 bp, Cannabis indica
aaaaacttagtgatcaagaaaataccttattcaccactacatcattaaaaataaacaaataacaaaaagctatcatattcccatttaaagaaaatgatcacatctttatgctttcctaccccaaaattcaattccttaccaataataatcgtaaagtttgacattaattttttctccatcctttatttgccaataacatataattactaacatttcacagaaatcaattacaatatatagttcattactcaaatatataaatatatatataggatagaaaatttctgtagtaataaatcacagatcctcctggctccttgtacatctcttatttattttggcattcaaaaagttttttaaattcaattctttttcacaatcaagtaagttgtaattatttaagatttttttgtacatttttaaaaaattctaaataatttacaatacaaaaataaaatataaataattactttctatagatctaaaaaaaaatcacacttataataaaatatataaatattacttttagtatagaaaactattttgaattttctaaaaaatttacagattatcttaaataattataatacacacaatcttaaaaaaaaataaactaattttttttttcctctaatgcggaaactgataaaaatcttacaaatcttacaaaatagaaagattaaaagcaaaaattaattaagtagaagaatttgatcatttttgcaagcttttctttcctcgaaaaccattaacaataaaaaagagagacgtgtatgtactatatattatacttttatatataacaaattatactcaaatgttagttaacttattaacccatacccattaacatatctatataagagtcatttaacatgtttactaaatataggtgccgtttagtaacacttttgttttctaatt

SEQ ID NO: 309988 - DNA, 2828 bp, Cannabis indica
tttcccgactcttcttctgctctgctttctctctcccctcgcacagtatgaacatggctttttcattgcatccagagcgttcacacctctcctctgttcgtttccacagcgtgaaaccattgcaaagccccagatctgctgatttaggtggctccgattccctctcaagcgaatctcagagcagctcaactcatccgagccactcgagctgcaccagccgatctcgacccaaccacccccgtcgaatcaacatttattccggcctccttcccagatcgtcgactcgtacggagattaataaatctcttacaggtattcaatttctcttccaatctaccctgttccttgtcaaatcggtgcagaggaaaaaactcttcactgaacaatttaggtataaatttggcatccctattaaattacaatacgacttttttgttttgaatgggtttctctgcaataagtatcaattcatatgtatccctagaagaggtttaatcctctttgtcgaattggaattaataggtgcattaatttctatctgtatgtgtaatctgcccagtacaaattacgtatcttttgtgcagcatctctcttctaatattaatgctcgtgaagtgacaattaccaaatcggtttggcttagtttcctgaagaattttctatttaaagccaaaccgagatggtactcttgcactctcagtccaaacattccccgtaagtaccttccagtttcccatttattatcaccattaatacgcagcatctatgtcccaaacactttaaaaacttgtttcaacctcacggttctgtcaccccgagtacacaccactctcagttttccagtctgctgtttttttggtattttttaatttctgttatctccacttctcacctcctcaggctttgtttcgcccgtaatgcctcattcctttttcaaaacaaacattccccctctgaaaaactagtgtcgaacaactattgtttcttttggtcttctgtgtcttctcttaatcaatctcacttagtttatattttctacaagagtctttattacaaatatcacacattctcttctgtctacgtcctagtgcaaactgaaaagatattagctctgttttctctgtggtgtcgatttactaggacttgtactgttgttctttctccactttttttgtcatctttgctttctctgcattctcagtttaaacatccagtccatttaatggatgacttaacaaactccctttccattgcccttaatctcacagatactgagtgtaccatccaaacactccatgatccctcccctctcaatgttcctgagaacgaagtccagcccgttcccctctacctagttctcaaagtgcatacggttaaatcatttaaccgtaggaatttcatggagaaaatgactagggattggaaccacatctctcgtagtcccgtgaccattacggaccgctccaatggtctctttttggttgagtttggttgtgatggggataggcgccgggttttgctccaacaaccttggacctatcttaatcaagctatcctaatggacattccaaactctttggatgttctcaatggtgatagtcttcttaaaataccgctgtgggtgcaagtgttcaacacccctttcctcaaacgttctgaagagttagccgtcctggtttcttcctctctcggccatctccttgaaatctaccggccatcttttcgtgaaacttgggggccctactttcgccttcgggttatgtttgacgtctctcggcctctccctagaggcattccagtccatttcacggggataaacaaggttgtctggcttgagttaaaatatgagaacctccccgatatttgttttttctgtggccggatgggacacagttacaacaaagggtgcatggattatatgaaagcttgtgacgaagccccatttcccccggagctaaggtatgacatcaaaaccatcatgggtaaagttaaggttaccactaacgctttgttgtctcctgaacagctcaatttcgccaatcccccggtggcttccttatgacttccaacccggctagtgctatgtgtgtagcccctcccgacaacaccccaccatttcccacatatggctcccaaaatctttgccccccccatgaccaaacccaacaagttggtttatacaagtcgggcccttcgacatacactcaagaacaccctccaatgacccaaactgagccccataccactactattaaccccaaccctccacctgagacaatcaccccttcatacactgccctgctcaatgccactatgagtaacacgagtgttcaaaaagcctctcccgtttccaacccaagtcaaactaccaccccccagaattccagtagctcacattccaccagctccaaatactgtcaagtgcctttacctgaaaatctccctctcctggacaccagcaaaagacttgaagccatgaacctcacctaccagccgggtgtggcatctcccatgggctcaaaggcttcgaggaaaagaaacaagcccgactccaaggacaaattcaaaaggcaaatggaaatggtccatggagagctccgtcaccaaatcaagcgatcccgctcgagcaaccctccgggcactgaagcctcttctggaagtgcaggccttgcctctgagcaggcctgcccgccgccatgaagcttgtgagctggaatgcacgtggtcttgggagtgatcgtgcattccgtaacctctcccgcttagtgtcctcttgtaatcctagtttgttatttgtaatggaatctcggcttgttaaaaatgctatc

SEQ ID NO: 309989 - DNA, 810 bp, Cannabis indica
aagagaagagaagagaagagagaagactattatgaatataaagtgtgcctattttattaattttagaaagtttctgttcaaaaatttaatatacaccaattgcatgtatataaattcaaattttcctattataaatatagcatgtatttcatcgaataaagtttaaacaattgaatgcaggtgtgctaattttaaaattggatattagggacaatactatttaaattatatatttcgttatagtatgccacaaattaatttttttggggcaaaatcctctaagcttcagttctgttttgatttttactattctgttactataaagagctattaaataccaaataaacatgacatattcaagactggctcaagggtgggcagtagaggctaacaaattatttaactcgaaatagtattttgtcattttacatatttagaagtttaaatatgtatgagattgtttttttttatgatgatataataattaaatttttttggcatgtgtataatgcctaatatttacaaaaaatattgttattgttatgagtataatagtaataatattatgtgttaatttcataatacaatatagaataataatatttgttattattattatttttggaatagtaatagaaaatattattatataatggcatcagagccttgactcagccgaaagtgtagtcgacgaggacgttggaacccgtaagggggggtaattgtgatagtcagtagtcctgtgatccgtaaaggaaaatgacgggtaagagtgcaatcccacaccgcctggggaatgtcatgtgtgat

SEQ ID NO: 309990 - DNA, 1713 bp, Cannabis indica
agttttaataattttttttgtatgaatgatatatatgtgtatatattcatattatatatttgaaataaataaaatataataaaattagaaaaaaaataaaattttagtgatttattttaatgaaaataatgcatggtatgatattaaagctgttttaaaataaagaaaagtaaaagtttaatcatgcattttaaaaaataaagtaaaaatgaggcggccttgatgcaaaactatcggacaaatatcattactcaaagttagtttcaaataatggggtggtccatttgtaagatatttcaatttttttttctttggaattaggtgaacggataaaaggctgatttgacaaatctaacaatcaatgccacaccaacgtttactaaacgtcatgtacatatatccacacaatttcatggcgccgcctattatatctgagtaatgagtaatgatcctgcaccataatttatacacaaacttacaacacatgtaacaattaattttatcgttatttaagattggtccaaacttaattaccacataattatatatgcatgtgtgtaatttataagtagacaacttatttattttctttataagaaatccattgcgtaaagtaattagttcaatatacttttcaaataaatggatgagaattgacagacttaattttctttattaattgcatgtctacatcgatgaatatgatctacgtacgtgtccaattattatatataaacacagatataatcgtagaaacaaaccataaattaatccactatcaatttctctatactcaaaaaccttaggttcatattcaaaatgaagtcaacgatcatagcaggaagcactctcattagcttggtgtggcttgtaattatggccatagtagccacagctcaagaacccacgaacaatccagttctggacaccaccggaaatcctcttcggcgcggggttgattactacatcaagccggccatcacggacaacggcggcaggtttacgctggtcgaagggagcgagtggtgcaagctgtacgccggccaggaaaacgattcgagcagcgaagggttaccggtaacctttgaaccgttcgcggaaggcgaggatgtgattagggagatgagggatttgaagatcaccttctctgcaaacaccatctgtattgtgtcgaccaggtgggagttggaagtacagagagatatggaggtgggaaggagacttattgggactggaagctcaggaacaggaactaactactttcgaattgagaaacaaaatgggaactacatcatcaattggtgccctaatgagttctgttctcggtgtaggatcgattgtggttttgttggggctgttgtcaagaatggaacgaggtttctggctttagatggttctgttctcccactaatttttgagagggctccatcgcagtcattaactaacatatagttaatttgtatagatatatgattttaaataaagttaataattggtgtaatattaattaacgtcgtgatcatgagaaatgattatacaataagaataagaataagaccatctcagtagatcatgtagaaattgtgctcattttattatattatttgcatcaaatttcataattttgattcaatacacaatagttgtgaaaaatttgatatttatttattttattttttttttgaaggaaaatggtaaactttattagaatga

SEQ ID NO: 309991 - DNA, 874 bp, Cannabis indica
tatattggatctgatacttaattgtgatattacaccttggagggtgctagacagtatcttttggcatttccattagtgagatctgcattaccctcggttaaaaatattttagaacattttttaaacttatttcattgagcattgtaattaggcagcagtaccgacttattaaattatattatgatatatatatatatatttctgatttactaaacttttcttcctagatcactatttctgaagtagatggtataattgtgatgatctaatcataggtattgcaatagataattaagatttaagaatagattggtgtggttatgggtttacaaaggaattgttacaaagaaagaaagttatcaaatgtttaaaaggattcacctggagcatcaaaatgtaaaaccaaaacagtaaatgaaggaaatgaaaaaacagaaagaacatgttcaagaatttatcttgttaggattaatgacccaacaatcaatctaataatgtcctatatggagagtgtgtggcacactcattaacttgtaagaatataagttacatcactcattacaaattgattaatgtgcaaactttatatccttctacatgatggtcataaattacgagtcattctaaaataattagttcatgttacaagagatatattgctgtcaatttgaaataattatcattttcttggctaagtagatgagcttcagtaagcaaggaacatgaagttcttgattgcattagtgtaaaagacctatgtggtgaatcaaactcacctttctctctcactgttacttagtggcaagattgaactcaaacaacaataccttgaacaagaaatttaaaaccagaaacagagatgaaaaacaagaga

SEQ ID NO: 309992 - DNA, 1339 bp, Cannabis indica
acatgaagaatggaatttagatgtaaagattgagtgtgagttagggagggaagagtagaatgaccaatgctagaaatgaccagtttcttaccattacccactgccattgtttcatttcctctgtagggagcagccacatcaagatgagttgtatcattagcaacatgatttgtggcacctgtgtccacgtaccaagactcatcatcaccaagatcagggatcatggttgtgagatgtgcctgcgggtcataaacaacatcagattcagttaaatgggcctggggagtgaaggtaccatatttgggagtgacccaatttctgtcgaagcgatagtgacaaacagcagccgtgtgtccagttcggaggcagacttgacatagcagtttattcatgttgccacgaccataagtgcgagggcgattggtgtcactgggttgactacgatccatagcacgaccataggaacgagagttcccgtttctggagtgctgaaatgcaagattagcttgcatttttatagaaagatcagctgctgagtggtgatgttcaagtctagtctcgtgagagagaagaagagcttgaacctcttcaaaggaaagaaaatcgcttcgagatgtgatccctgagaccacaggatcgtagtcgggccctaagccatttaagagttgtaacaccaaatcttgattggtgacaggagaaccagcaattgatagtgcatcagcaagattctgagccttgtccacatagtcggagattgacaaattggctttgtggagttgggagaactgacccttgagctgaaggagacgagcctttgtcacgctagagaacctctgttccaaggcacgccaaacagagtatgaggaagtcagtgtggcaactgaagcgagaaccggttcggacatcgatgatcgtagccaggagagtagtaactgatctctctttttccattgagtgaattcaggattaacggcgccggtgatcagagttgggggaggagaagcatcggagaacagcacatgatcaagatcgtgaccaattaccgtgggaaccacttgtgatttccaagaaaggtaattgtgacgatcgagctttagggttaatgaagaagagagggaattggagaagggactccattggagattctgagttgttgcagtaggaagcgtagtatgaggatcggaggaggaagactccatggacgcaagtcaattggacgatgataccatgtagaaggtagataccttcagaccagtaatggcagaagccagagcagagaaagtagaaaacagagtaaccagaaatgaaagaattaggagccttactcaactgagtagct

SEQ ID NO: 309993 - DNA, 554 bp, Cannabis indica
cttttaaaaaaaaaaaacatttttttcatttccagtttaggtaagtggtccaataattgggacaaactgaagtgtctctatccctgtaaaataatttagcaccagatgtaacttataaggttattattgattttaaaaaaaatgccattcttgtccacacaatattttagctaagtgattggatgtgttcaatgttgtccccattcctcattaataaaatctattttgggtacctacgaaacaagtaacataaaacgaagaagacgttgacgctgattacatttacattcgaacagggaatttgacttttaaagattcaatattttcaaggtatctttccacaccacaagagtccatgagtccatgacaatgcttgggcttcattacagtttcaaacctcatggaaacattctggcccatttattatagtaagtagttggttagtagttgtattctttctagtactactactttcaatcaagactagtcaaatcaatttcagttacaatgtgaaatcaacgatgagattcaaattaacactagacaaaacgttc

SEQ ID NO: 309994 - DNA, 709 bp, Cannabis indica
attgatgattatcgacggcggcgatggagaagatattagaaaaaacgacggagtaacgatcgtcgtttggtttctggtggcttcggccgaagagacgagagcttcttggaactgtaactcctcggcgtatttagcgtcggaaactggtaaaatatcggtggaaggttcgtcgaagagtaaggagaagtagaaatcgtcgactaaagctacgtcgagaacggaggaggagggtggtgatagtagctgtgccatttttggtcttctctaagataatattctctggtagtctggttcttcttcttcttcttcctcactctctctctctctctatatatatatatatatatatatatatttatatgaatgtgaaaaaagaaaaaatagttgtaaaagggaaaagataatttaaattggtaattttcattagggaatggataaagtgaaatagtggcaattgtagggccctattaaattgagcgggaattgggaggaaattacatggggaagttgaaaaaatactatttttattaattaattaatcaaatttacttttaattttatatttaattgaaatataaataccctgatataagagagtcacatgaagaatatcttgaactaataggggcaaaattggtacaacgtttaaaaaagaggtaaaaatgatagattttaaacaagagtgtaaaaagaaaagaggacaatataa

SEQ ID NO: 309995 - DNA, 2288 bp, Cannabis indica
actaaaaaattattactaaaaataacaattttttttttttgtaattgtagttggtttgaactaatatatttggcccagaactaacacatatgctagctacgtacgtaaaaaagaatagtacgtaggctaatacatatttattaatcaacggaaaatacttaggaaaattctatattaacttaaatatatagtaacttgcaagcaaagtgtggctattatagcgatgtcacttggatcatatcgatctgtgtggaagtttctattaatttttacctaaatggttgacaaaactcaatagacactacactatcctaaccaattaaaacataaacctaaaaaataagtaaagttcataacataataacattactattacatcctttaggattcgtttggtatatcgtattttatattaattatattttattcaatatttttatgtaaactgtatgtggtattaatttttatggacatctaaatatataatattttaaaactaatacaattctattataggagcgtgaaaacaggaggagagagaaaccctacagaggcgacgagaagcttccagggtcgtgtgcgattatcttcagagttgtgtgtgataatgatagcctccaggagcgttgtcggcgagttgtcagccgttcggttcacgttggccggcgacgccaatcaacgacagccaccgtcggttcttgtcttttgtcttgtcttgtcttttgtgacatgtgattgtttgagattggttcctgtttatcggttcttgttattggtttgagtttgttatggttttgccattgttttctggcttgagtgtctaagttttctggcttgagagtaaattttttggtttgagattgtttatggttttatggtttgagagtctaagttttctagtttgagattgggttcggtctgttggttttagtttcttgtttcgattgtttttgggatgacttcttgtttcgattgtttcgagggttcaaactgaaagttgctaagatggttggtatcaaggaagcgttaagttggattgatcatcataattggggacaagtaattttagaatcagattggtatgcatacaagctattcaaagtgaaatctctatgtcatcttcttttggtctctttgtgcatgatgttcgtgcgttatttttatctttagaaaatattgaattgcgttttgtcaaacgatctgcaaacaagctagctccccgcttagctagaaattcttgtttctctccaggtcgtgtgctttagttggaggattgttcctctgaagcacgttctattgtttttaaccaaatgattagttattaaaaataccgatttggatcaaaaataaatatatatataatattttagtataaattaaagttttacatatagtattatataaaaatatgttgtataatccaattcaatataatataataaaatatatatgacctaacacagcttccaaacgagcccttaaagtttttaaaactatattgatgtaaaacgtgagtggttgatggtatacaatatccctaaagtccaattgtgtgcacacaaagctttacaaaagaaattaataacccacaaaacctagttggagttcttccaataaaattaagtgagtgtttaaaattgatgcctataatggagaatacccgtcaattttaaactatttttgtcgatttaaaatggctctgaaataaaaattgaaaggagcatttcagctatgcactatcttatgcaatggagaaatatctaaagttcttttttttactgctttagtttcctactaatttagtaggagatggattttatttgttgggttgagatgcagatgaacacaatcaatcactacaacaataaaaggtattagcagcgaaattattagtgactgatggtgttcgccgctaataaggggcctggcggcgaaaaatagggttcgccaataataaaattcaaaatttttaaaataatattttccattattagtaacaggacccgctgttaatgtcacccgctaataataatctcaaaaacaatcgtgaaaattcctgcccattcaaatttagaattattagcggcgaatcctgtcgctaataatattttttaattactaaattattaaaaaaaaaaaaagaattatcccatatactatttttttttaactttttatacaaaattacggtttgggattctaaagtggttgcagcgctagttgcaataggagtttctatatgattttttgttgcaatttaagttgcagcgctagttgcaatatgagtt

SEQ ID NO: 309996 - DNA, 1150 bp, Cannabis indica
tgtagctagattttttttttttttggttaatcatgcgaagataaatgttatgaagcgcttgtggtgggctccatagacatataataaagagagaaatataggcaccaacgagagagaagtttgtatgcaaattatatatatgcattgacgagaacaattgataactgtgacagttaatgtcaattgtgtaggtctaacattgaagctgcaactacatgaaaattgacaatacatgcataggatacataggaagagcctcatgccgttagggaattagctatagtcatcatcagaccataaatcatcataatcttttcatttcaacttgtacagctaccaaaaagaaaagcttaaggacagctcatcatgctcttatatgttatgttccggctggtgatagttgttgttgtccttttggttactattttacaacaaaatgtggcccaattctttacacttcttcactagtggagatagaatttgattgagatatgctaaaaagtactcctaatgtccgaaaaagaatttgttgtacccaaattagcatgctattcttattttactaataattttagtacatattatttatacttatttaacatataataaattccttaacatactttaaactaaattaatacatgtaaaatatgtataaatgatatattctgacatgattagtggggacataaaaagtcacaccaatttaaggacaccagattttttttagtggtgtctagcatgctcttacgtattaatattgttattgatcaactaggtactgaatctcatataatttaatataataatttttaaggagtatagctatccaattgtaaaacaacaaatttagaagttattaaacagtactagtgtccaatagtaatatttgttgagttttcatacataccaatataacattttttttttttttttttctttttgttctttttccgtattttaaatagaaaaccttgactactacgtacatcagttgtttccatgataatactactgtaaccttaaatctaaggaatgatgagtatgtaatgacaatatatatatcttactattataaaagtgagggaattgtgtgacattaccataccacttttgcccctcacattaatttataaatacattagtgtga

SEQ ID NO: 309997 - DNA, 1103 bp, Cannabis indica
aaatcactttttggagacttgaaaacaaaactaagagttttcctacttataaataacatggcgataccctaaatattgctaaaacataagaatctagggtgcctaaaactgccacaatcgataaactagatcccaactggaaaatcagtttctaagcatgcttccaaggggaaccagtcgactggttccacagtgcaaaactgaactggtcgatctgtttaatgcagaaaccaccaaaatcttcacacacaccactcaattctaccctaaatcaaaccaaatcttccaaaccacctaaacaagtcataacaaacctatttcaagcaataaccatagttataatcctttgaattcgatttcaccatgaaaggtcaaagtttgagtttaaaaactcaaaccttggttcaacacactcacaggcaacaaaatcaagcacaaactaatcatactaacctaaaatcaactcagaaaatgaatcccaagcaacatcgttatcgaaactaagaaaagtttattgtttaatgtatccagacaaggtctgggatgtgttcagattcaagctgacagagttatagcctatgcccataagttcaaagagtatgaccatcgttatccgacactatttaggcttgctgctattgtatttgcttgaaaaatatggcaacattacttgtatggaaaaaagtgtaagatctacatagaccacaagagtctcaagtatttcttcactaaaaagatttgaatatgaggcagagaaggtggttggaattagtcaaagattatgactataagactctatactatctcgagaaagccaatgtaatggtggatgctttgaacaaattaggtcccgggcaagtctttaatactgcgataataacaccttagttgccctcaaatatggttaagggtcaaattgagtttttggttgggaaattacttaacctgacacttcagtaagatttatttgaaagaatcagaaatgcacaattggaagacactgaactagttaatgttttggatgagatattggcaggtctgctgaagaacttcttaatctcgaataatggaattttactttacaaggcttgagtttgtgtacc

SEQ ID NO: 309998 - DNA, 1759 bp, Cannabis indica
caatttattttgagagtatttttggctaatagttagtgatatgtttaatttgtcacttgttcatttaggttggaaatctggtattcttcatactcttttgatgattcacaactagtggcttattagtctttttgttgaagatgttattaggattttttttctcttatggtgaataggttggttagccattttttcaaaagagaaaaggcttggttagcttattttggttgagtatgttgtatgagcgacatcatcatgtaatgaattttgtctgatttacctataaatgaatatctttatttttctttcaaaaataaataaataaacaaataaagttcaaaatagtatgttgaacacgtgtaagtggttattagaattctatttttaacactttaaattatttagaatttctagattgcttagtataattataatatacattattatgtaaaaaaattatatgataatttctctatataccgataatattttaacaataggagcaaaaataactcctacctaaaacttttcccataattatatagctataattttaagtaattataaaatatttttagcaaatttatctataataatattaatgtcacgtcaacattaaatactagatttcaaaatagttaattattatttgaatttaaaaaaaaatgaagaaagaattcttggttcttaatatcttgaaaaaaattgataagggaaaaattattttagtttcttatgattctaataaaatataaattcatatgcattctaattaattattttgattaattgctttgaaaaccatgagtatatttttacattataatattgtttataaaaaattttgaaaactaaatataataagattaagttaaagaaaaatgattaaaagagaataacacacgatttttacgtggttcaagcattaatgacccttatagtcgacgaggcaattttataagctttttgtaatggagttcttacagctcaaacaagcatctctttttttttttgttatgtattttcaaaccctttgcatgaattctgtattgtcctatttataggaagataagcttaatgggtcagacgggatctagtatgcattagggtttttactaataaaatccaatgatggtgtaaaatacattgaatttgtgctttcttaagctgttgggtcggataggtgaggttcaattctaaaaagggatctgttgtacggtgcatggtactgttgacagtgatagttggtgtgcgagtcattgttgggaaagagaatgtcagaatatgggtgcaatgcacgaaaaggtaaccacctttttgtcttgagcctttttggcatctgacggaggggaaaagtggtcagattctttgggattgtgttagaggcgtaccacgtaaaaaaatatctaggaggttagaccatgtcagacaacccttttagcttctgttattccaatttctgctcagggtgatgtgtcatttgataagaatgacacgtagagagcatttccaaagcttggactggtgattttccttcaacggactgtccaaatagttatatgtaaacttgattaagttttaaccttcactaggtattatccagacaaagcctatatgcgactgtcaaagcagtcctcaccatccattgaacccaaatacacagctgaaaaatatcttcaaggatatttttcataaatattcacatttatacctcaattagatccctatttttctaagatcacatgttaacagaaagatt

SEQ ID NO: 309999 - DNA, 1283 bp, Cannabis indica
gtagacactaatattatttaacatcaccttaaaatgaggtcttgtaatatccaattgtaattattaaactaaattatatggtactgatacttaattctattaattaacgatattatattttggagggggctaaatacaattagtatttttttaatatttttcttcactaaatatgtatttatactatttaatacatacattagtgaaaacatgggcaatcgagatcgaccaaattcaaaagtataatacacactaattaattaagttcataaacaaattcatcgtgttccttatattatttatatattttttaaatttgttttctcataattaataatcttctttaaatccttctttttatatttgactatatatatataattcttaataattaaataaaaatcgttatagtggaagagtgattatcccaaagtatgggacttataagtccctcatcatataaagaataaaaaccgcccccacttaataattatttattcaataaaaataaaaaataaaaaaaatgaaaagaaaaaagaaatcaacttttgaataaggaataactgcttccaaaaattccctctatttagcatctctcatagctaggaaacacatttgaaaaattgaatgaatatttatatacaatacaaacaatattaattagtatttagtagtattagttagtatatatacagtatactagtactataattaatatattactagaaattagaagattttatgtatgtgtaatcagtattagttgttggagtatattaagtcaaacctcacataaattcttaataaatgtactatacatgcatgcatgcaaggaaattttactaatttaatttatacagactcaaaatttattacacaaaaattccttaaaaaaaaaaacgaaattaactacagtatcatcactcatcatatcttcacaaatatttaattcatatatattatagctatagattgcatgccttaatttaatattaattcaatatttaatattaataagttataaattaaagtggctatatatagttgagatatatattctcgacgataatcaggatagcattatcttgaaatattaaatactattcttgggtcagaaaaaaacttcctttccatgcatattaatatttttgcccatcttattctgttattttacatacacgttatttgtatatgtatgtgtcccacttttttttttttcttttctattaatttataattttaatttgctttttccaagtatattaatatacatatatatatat

SEQ ID NO: 310000 - DNA, 2285 bp, Cannabis indica
tcattaacttgtgttcgaggggtattagaaaagaaggaaaagaggagaggagagataacaaagtatatttctcgttgattcaactgaaaagatacaaagcaggggagcatatgtatattgctcaataaaggagtacaaaccagcaagaaggtaataacagaaagcaacttacaaactgataaactactacagcctaacaacctttctaactaacaactgaatcttatcacttcccctcaagatggagatgtaatactcattaatctcatcttgtctttcaagttgttaaactaattaggaaataaagccttggtaaaacaatcagcaagttgttcctttgatgatacatggctggtttttatgacacattgtcgaaccttttcttgaactagatgacaatttatttcgatgtgtttagtcctctcattgaaaacaggattagctatatgttgagcagctttgttatcacaatggaggatagccatgccatcatgttcagcttttagctccttaagaatagacaaaagccacgcaaatgcacaagttgtgttggccattgacctatattctgcttcagcagatgatcttgaaatggtttgttgtttcttacttttccaggagattagagaatctccaagaaatatacaaaaccctgttgtggattttggagtatctagacaagcagcccagtcagcatcactataagctttaagcttgacttctgatgttgtagggaagaggagcccctgtccagggaaagttttcacatattgcagcactctctcagctgcctttaggtgtctagctttaggaacaacaaggattggctcaatctattaacagataatgatatgtctggccttgtgattgtaaggtattagagtttacatattattcttttgtataactttgggtcagtaagcttgtcttccttttcatcttggctcaactttaagtttgcctccataggtgttgtgacaggtttgcaacctaaataacgaagatcttcaagaatttgcaaagcataaggcctttgcgatatgaaaatccctttggcagatctagcaatctccaatcctagaaagtatttgagatttcctaggtctttgagtctaaatatatcattcaactttatcttcaaggcttacaactcatctaaattgttgctggccaatataacatcatcaacatagataagaagaatgataaaattggtcccaacatgtctcataaagagagaatgatcagttgcagaatagtggaaaccttcttccatcaaggcattagaaaatttttcaaaccattgtcttgaaacttgctttgaaccatacaaggacttcttgagtttacaaacagtatttggtggaatctcccccttaggactataccctggaggtaaagtcatatacacatcttcatgtaaatcaccatgaaaaaatgcattgttaacatcaagttggtgaaggtaccaaccattgatggcagcaagtgctaacacaatcttgactgtaactaactttgtcgcaggagcaaaagtatatgtgtagtctattccttcttgttggttgtatccatttgccacaagcctagccttaagcctctcaataacataacaaccatctggtaatgtcaccactgtccaagtattatttttctcaagagcatcaatttcacaatccatagccctatcccattcaggaattcctttaccttgactaaagaattcaggttcataataacttgatatagccaaaacagtagcacaaaaatgacgcttcaacctactataatcaagaacttgagaaataggataaggtgtgacagctttattttcctgatgcaaaacagaaatattagcattagcaagataatagtgataatcttgtaaatatgagggtttatttatggttctaagtacaagtctgatatggagagtactagcatggaactgatcatggattttgttctgctgattaaaatcaacatcaggttcactgctggtttgaggaacaataacagcatcgggtatttgatgtttctgatttatagcagtatcaacttcatgatcataggtatcatgttcctgctgcatatcagcaataggtgcagaaacatggtcagaattatggacatgattgctgctatcataatcagcaacaccagtaggtaaaccagcagatgcaagattagagttaaaaaaaaaatcataatatacctttgacaaagaattgttgttatgaaaaggaaaaatagtctcatggaattgaacatctctagaacaaaaa

SEQ ID NO: 310001 - DNA, 2804 bp, Cannabis indica
aaaaaaattagccgaaaactgcaccatcaacattgtgaacactcatacccactgttcatatgaagtttttttttgttttgttttttctttctaaggactgttcatatgaagttgtttcatagaaattatcctttcaaagaacatgatcgccctctaatgttgcaaaagaatgagaaatgggaatatgttctaatattgcagaaatgagaatatgtgccttaagtacctacacttactcaaatgatcccaatctattggggttaaaaaaaatcatgagctcaactatttgagaacaaagttatttgcaggggatgttgccattgatgttattggtaggaatggaggtgttgctttcttttggaaaaataaggaggatgtgtccttgatttactattctattaattatattgatgtgttcatttctctggcagataatgcgaggtatcatttaactggaatttatggggaacttaatagagctttgaggaggaatacatgagctattcttcatactcttaaagacacatcttctcttctttagtgtttaattggtgattttaataatgtattgattcagaatgaagaaaaatgggatcttctgtatcccaattggctagcggaggactttcatgaggtagttaagagtgtagtttggtagacttgtatttggttgggtatccgtatacttgggagatgggaagggaaactaatggttggttggaggctcgtttggacagggctttgatcacttcaaattggcttcatcgttttgatgtcgcaaagcttgaaactttagaagtttcaattattgctcattgtttgattttcttatgaccggaggttagtgtttctagtctttatgcgcctcgtttctagtttgagaatgcttggttataagaactcctttgcttttgtttggttgatgagtgttgggctacttgtgttagtcttcctatatgttctaatattagatattgtaatggtatttttagactttggagtaacgatatcacatgaattttaaagaggggttcaggattgtaaaggtagattgaagtttcttaaaaatggcgtcatgatcttaaagttgttctgagatataaagagaaaagtcttaagatgcaagaaatattgacacaacgtgaaatattttggcagcaacttttaaataattatgattaaaggaaggagattaatatagtaaatacttccatgttgttgcttcaacctggagttgtcataactaggtgctaaaattgaagaataatgctgggttttgggtgggctaaaattcaggtctctctgagttgatgacagattatttaatctgttgttctcagcctcaaatacaaattaggatgaagatgtgttacgaattctatttcttgaatgaaaaatcttgagttgtttaagccaattgaggaaatgactcttttttagacatgccctgataaatctccaggacctgatggtatgactcctaaaatataaaaaatattagaataatattggtcttgatattactttaatagtaaaattattctttctcataggtgttttagaggagagtttaaatgataaaaatattattcttattcataaaaagaagaatctagagacaatgggggagttaagatcgatagctttgtgtaatgtgctctacagggtgatatataaggtcattgccaatcatttaaagaaggttttatctcaagttataaagctagcctgttcatgcctggatttggtgaccctggctagttcttggctgagtcatgggaccctaactgactctttcaaggcttgagaaccttggccggcatgggctttggttccaagtgggtagccaattttctgttatcttttgacttcggcaagaatctggctctataggcatatacaaccttaatttcatacgtggtttccttggaaactttgtatgaaacttaatgatgagtctattatagttgaatgttcaacataagattcaacatggcttaaagcctgtaaggaactctgccttagccgtagcccggtacgtggcccctataagagctttgtccggctcttttctagctataaggttcttgtagggccttcgcctcatgcatgtgaatcgattttatatttggccttaaggctttcatgttcttgctttagcctatatgtcctctgttttcgaacactactattgttttagccttaaagccttttatgacgaacatatgatcgtcctggctatcttcttatggccttgacatgtaaaggtctgaatttactttgtcaagccgaagtatgcctgaacgacttagaggcaggtttagtagcttattataagcattgaaatttatctacataagttctttgcgatagttcgatgcattgtacgttataggtgccccaagcgaccatccaggaaagtcttttggtcacttgttattcctcaagtttcatagacttttcctgggttctttcttggggtgttatccataggatatatgtgaaactgaaagagtgactttaagaagttaatcttgtgagcaagtgatttagacacaatcttacattaaacaaaagcttttagcttagtgtctgcttttgaaatcacgtagtgggtaccccctacgcggcttaccgtgcaacgaccatcactgaagagtgatgggaggccatgctgaaaagcaatgggtactagctcttttatgggttcctgcacaatgaaacaattgacaagttggctagtgagagtacttaccgagatgttccctatttcagtgttcgggtagaagttttgacttcaagtt

SEQ ID NO: 310002 - DNA, 628 bp, Cannabis indica
cttcttcttcttcttctatctgatgaggctctctcttgcctctcttatatctgatgaggctaagcgatgaagcagatcccattgttaaaacaaaaagaagaaagaaaaaaccaaaccagacactaatttatgattttttctcatctcagtaaccaaatcaaataccaaacaaaagatatatttttgtatatatacacttgttgaatgtgttgttagtgcccaatatcaatatgcccttgtattgttctaatatgatttcaaaaaaaaaaaaaatgaaaaaccatattcataagtttggtaccaaagtcaaattcattgtttcaaataataattcaaacaaaatccaaatactcaaatacccaaaccaccaaaatccaaatcttatttttgcttttctttttctcatatcagtaaccaaataatctatagaaaatactaaatacaaaacacaaaatacaaaacacacacacatatatatatatatactcgttggtgtgctgaaccagaggtgcgtaatttagggtaaacgacgaccagtggcagcagcttgaatttcaatcgccattgctcctcatcagatatgagaaagaagaaagaagaaagaagaaagaaaaaaaaagaaaagaaa

SEQ ID NO: 310003 - DNA, 795 bp, Cannabis indica
tttataaaatatatttttgaaaaatagttttacttttccaattttataacataaaactgaataaaaaaaatatgttatcaaatgcgtctttaattaattggtaaacaattttttctccaaacatgtttggaacttccaaagccactctttggaccagtggaggttcggatttcatgaccaactcgtccaacatgaacctcaaagcaatacccaaaaagaaagcctcttctaacttagaatattataagatgacatgaacatatgagattcgtagttgagaaatcaacaaactgaatctgcaataaacttttttggatctcggtgttagctcctaagtttcttttcaaggatcatggcttcaatgcacaagtgcttgtttggagttctcgaagttttgtagatgtagaagggaggacacaggcttttctcaaaggaatgtgcttcgcttgttctatctctttcagcattctaaacttaaatgggaggccaagagtgaactgcgctcgtcgaaagttggcagccctcctttgcccttggtcggtttgttttggtttgtcttagtgaatccattgtgttagggatagactttatcatactgttgtgatattttatttttttggtttgtattttttagtttttgtagtttttccagtgttttgaactagggttaatttcacaaatgcaaaaaaacaacaaaaatacagttttacggaattttaaacatttttacaattttttgtatttatttactataaaatacggtcttttatgttgtaaatttgttcatttgttgtt

SEQ ID NO: 310004 - DNA, 1514 bp, Cannabis indica
aaaaaaaaaaaaaacaaatctcacccttaaccaactaataatatcttattgagttaattatggtaaaactttcaaaagtttgatcacgctagcaattaattttcaaaatctaatttttaacgttaaaactctcaaaactcgtagtgccatagtatgtacatgtagcacaactttattagttcacataatctaattattttttaaaaaataaaaataaaaataaattaatttataattaaaaataatttaaaaaatttaaaaacaaaccatattttaataaataattatgaaagaataaaaataaaactaaagaaaacccaaattccctatacctaaaaaccaaattacctcactctctctcgcttcagcttactgcaaacccctctgcaaaatgatagtgccttgaaactcagttggaacatgtcgtatgtccacaccgaccagaggtcccaaaacgacaatatttacccataaactaaccctatgatgtggacatcaatgtttgacacgtgacaagaaaaaaatatcctaaagtttaatagtttcgagtcgtagtagtcccaagtcctgcgcccagattgattacgggaacttcagaatggatgttaagattccgctaagttgtttccaactcaccatctttcagtattatgtaccatgaacacaagaagaatccaaattcaaggcttgaaagctgaaaaatacatgaaacaacacccataaagtcaacccaggtgcccaacacccatgtaacgccctcttccatagggatgtcatgtctgtgactttataaactagattaatactaatatattaattaattattaaacatcgataactcatattgtattcacatataccatataaatctctgtaattcataaattacacttatttatctacttatagcaaatttaaaatttatgttgaactagattagtaggatcataatcccacttattttctaattaacctataatataattataaatcctaattatttaccattaggcttatcgggatattacaactatcccctccttataagaatatcgtgctcaaaatttacctaaataatttaggaatacaactcctgcatctgcgactctaattcctaagtcgttagttgtaattattctatagagacgacacgtgtatgattttataaactaaattaatactaatatattaattaattattaaacaccggtaactcatattacattcacatatactatataaatctctgtaatgtataaattacgcttgtgtaatatctcagaaaataaaataatatttaaatagacatattttattaaatatgtaaatattttggtaacgaagtgagattatgatcttacttagggtaattactgagaatttattgaatgatatatatagcgtaatttattaattacggagattatattgagatatgtgagtatcgagaatactattattgaaataaaaatattttatcgggcccggcgactgtggaaatttaacgatgtggt

SEQ ID NO: 310005 - DNA, 833 bp, Cannabis indica
acatttggtgcattatttaatttttgaacacagacttactagatttaataaaaatgagcactacttattattaatatcatactaccttctcccttctccttctccttctccttctcttctcttctaacttcaccatccatacttctcacttcccatccagtaccggtggtggtttgagtgggagtctaatggttcggcccgatgtaatatattagtttttttttttttatgttttttatacataaaaaaaatagtagcatcagaccaccattagactaccatcggactaccatcaaactattattgaaccatatcttacatttataggtagtattgggccactattagaccaccattagaccttcgtcttcaacttttactcattttgactaccatcgggcttggaaaaaaaccaattttttacctagaactcagatccgaccgttttctaccctaaatctaacatcaactcatagataacagacattaatcatacaattattcctaaatcaataaacctataagtaaaatcatacattttaaccataaatcacacagaatacaataaaatgaaatggaaaacttacattcacggcgcggtggtcatagttcggagatcttgggtcttgggtttgtagtcattggtgggttggtggtctttgagtggaggcgcggtggttagaagtcgtgggatgctagggtctttctgtgcgtgagaagaagatagcgaaagacacagaaagaatagaggaagagagagaggaggggtgtgttatgagagaggtatgatatgttattttttacattaagaatattaattgtatatatattaa

SEQ ID NO: 310006 - DNA, 1928 bp, Cannabis indica
cttctttgctcagccgatcacccaggtctcatccatgtctccaccgttctcaatggtgcaaattatcagtcctggaagagagacataagaatggacgttagataagaaaaaaaaaaaaaaaaaaaaaaaaacctaaaccttcatagatggcatttcctcaacctacaattggtaatcctctccttaactcttggaatcgttgtaagaacatggtaatgtcttggctcataaactctgtctcctctgaaattgcacagagtatcatgtattttgatcttgctacagatatgtggcatgatcttcaagaaatattcaatgagggtaatggacctcgaatctttcagttgcaaacacaactcacccatttgcaacaaggtgaccaatccgtcaccatatactttacaaagctcaaatcgatttgggatgagctaaaataattccaaccaaacgccacttgttcttgtggtgccatgaaattgtttcttgattactataaccaaaatcaagtcttgcaatttctcaccggtctcaataagtcttatgcatctgtaagggctcaaattcttcttaatgaactgattcctaacctctctcgagtcttctctatgatagttcaagaagagagataaaggactttaagatcctcatatatgtcatcccttgcatccttggttcgcccttcttcatccactaacaatcctcgatccaaaaaatcgaggccttcttgtactagttgtagcgaaccaggacattatgtggataaatgctactttctttatgggtttccaccaggctatgtggacaaaaagaaatctgataaaggcaaggccactgccaataatgttgcagcaagttctaaaccagaaattgcgcatagtaactctcaagctgacctttccacccaatgtcagcagctcatttctttactcagtcacaaattgagccaaggtccaactcgtgatgactccaacaatgttcctatagcttcaaacatggctagtaacaagtctttatttcaaaaaaaaaattcggataattgataaaggagccacacatcacatgtgctccaccaaatcttatttttccaattttactaatcatgctttcccaccacaagtgcttctccctaatggcactaacattcatgttcaaagaatcggcactatcaaattaaaccagcaactaactcttcataatgtgctgtttgtacccacatgcattataaacttgttttccattcctacatttcttcacaacaccactaacatggtctctttcaaacttaattattggttttacaggctcattcttcgagtgtggtgattgggacagctagaagacttggaaaattttatgtcattctccaagattcacttccaatagctagttctacttgtcctttattttctactaataatggagaccattgacataaacgccttggccatccttcaatgtacatttctcaaactttcaataaaatgcatgatgttggttccattaattccaagaatcacttctatcatatttgtcaccttgcaaaacaaaagaggttgcctttcatatcaaataacaactttgttgaaaacatatttgaccttatccacatggacatttggggaccattcaacataataagtattgaaggttacaaatattttcttataatcgttgatgacaaatctcgatttacatcgacattcatgcttaaaaccaagtctgaagtgcaaaatactatccttatgttctataacatggcttgcacgcaataatcaaaacctattaaagctattatatctgacaatgccaaagaacttaatatgcaatcttttaatgcttccaaagacattttccattaccattcgtgtgttgaaagaccacagcaaaactcggttgcgaaaagaaaacaccaacatattttaaatatt

SEQ ID NO: 310007 - DNA, 2024 bp, Cannabis indica
ttttcgtatatattattgacattttataaaaacttagtttttcaatgagcatagcaaagttagcaatatatataaatatatatattatcataacaagattttcattgtacaagagcctaccattcaaaatatacaagtctaacctttgtaaatttgattcacaaaatgattaggaatggttctcctagttttaaccttaataattcttaatatcatctaaattaatattacttctattcttcatcatcttctctgtaaaatttattggtataagtgttgcctcaagctttgtaatcaactttctgcaatcaagaaaatttattgatataagtcaacacacaactcaaaagtttatatataaaatcacttcatatatttgaaaaatatttccatgaacaacttcctaaaaattctaaaaaacaaagagaaaaattaaatttttttttactaactctttagctttatgcccaattataaaaataaaattttgtctaaaatgcaacaaataaatttaacttaagaatatattatcctataaaaaaaatttatatcaatacatcataatttctatttatactactcacttttcaaacgaactaagttaagtactataggcattctaatattttatttacatagaagaaacaaaattatagtagtaaacaaatcgccataatcctttaatgtttagaagctctgatcaataagaaattcgaaaatagaactaagactagccaaagagcactcaaataccaagagaaatcacactaattaaattcaacttagggaatagttagtatttgactcattattattatattaattaaaagaaaaaaaatatagatgaatatatatatatagtttcatgtatatatgaacaaaatattttataatgaaaaaacaataatagagaagctagaattcatttggcttgttattacaagaatataaaacgagccaaacaaactaagaaactctcaaaagaataagaaaattacacataaaattactagtaacactcgtaaaagcatagcaaagacaaatatatgtcaataaagtaattgatcaataacaaaaaaaaaaaaaacaacaaaaagagagaccaataggtaaaaccattaaatcaaacactaaaatgatcataagaatccccatacataatttcagaaccaaattgtacatatatcaatgttattgttagtattagtaaaagcaaataacattaatttaccaaatttaatggcaatgagcaggatcaaagattatatgccaacaaatattttaatttcagtattacaaagtaataataaaacagagctagattcagaaaatgtaaatagaaaaattactttttctcctagctttacaagcttcaactcaactacttgagcaataatattggcattaggaacaacattcctattactggacctttgcaaagaataaggtatgtgctaccacagcaataaatcaatctttatagtagcccatatcattgcaacagtagaaattccattaatctcttcattcaatatttggaagaaaaaaattacaaagaaaatctaactatgagcaatataaactctctctaacatatgaatctcttttctcagaaaaatctacaatcttaactttcggtttgcattcaaataacactagatggagcctctataaattcaaaataaaaaacttactatacaattttttttttaaataaatgtacaactaaaattattatggaaaaaaaaactaacatgtgaatttggaggagttggtctcgattggttgtgtgccttggtggagctagaggagcagtggttgtgggctgaacaagaacaaaaacagagaaataaaattaagatctcaaatattgtaataaacaatcatagaaatgattatccaaaacactgaaatgtataagattttttttgacatatcttaaagatattacatacataacataaaataaataacacatttaataaaaacaaattataatctcattttctactaaatatatcatg

SEQ ID NO: 310008 - DNA, 739 bp, Cannabis indica
cacccagcaaccttcgtttgatgtaacttttggtcaaccacccaccaactttcgtttgatgctttttgggattgaaacattcgtctgatgcaatctttggtcaaccacctaacaaccttcatctgatgctccatgggattgaaacttttgtctgatgcaactttcggtcaaccacccagcaaccttcagccaaccactcagcaaccgtcgtctgattgtgtaagagatatttcggtaattaaaagtatataaaaggaataacatattgtccacaccttatggaggtatttttatgaaaaaaaaatgtcaatttgtatttttcatgtaataattccattaattgataattctataataattaattaaataaataataataaactaatcaaatagtctcattcaacttcataaatgcaaagtaagaatgacagtagctttggaagccggtaatagtaagagaacaaaagtggatggaataagaaaataaataaagggtaaattgcagcaaaacatccaatacttttaatattttagcaattaactcctaaaactcatttttgcagcaaaacccccaaaactcatggtctgttagcaattgagcatttccatcaaattttatctgttaagtgacatgttggattgtccacatgtacctagtttacacgtgacacaattttattgatcaatataatttataatgaaaaaaatataaaaaataaattaattaaaaattaaaaaa

SEQ ID NO: 310009 - DNA, 978 bp, Cannabis indica
agtaaaataagattaaagattcattgtcatgagacacacaaaatatatagtgcacatacatattacaaccaattgccttttgacatttagggtgtctactgataggtctaattttaaggtgtctattgtagaattaccctattctttaatatgatatcgacttgtattaatagcttgtgcaaaattatattatctttaccataaaattgaccccaacttcgactcccgtttgggtccgagtctgggtctagggtttggggtccagggccaggtcagggtcagggttaggatcaaggtctgaggttcaaggttcggggtttggatctggggctggatctgggtcggggtcggggtttggggctgggctggtctaggtcggggtccaggcctagggttgggtttggggtccaagtctggggacgtgtctagggtctaaggacgagtctgggtccaaggtctgggtatgggtccaaggtctcggtatgggtccaaagctaggtctggggaaggtgactccgaccctttgtacatattataatacaagctaatacgaatcatttgttattaattaaataatacaattcacactgtatcaaaatttttgctcgtaataatgaatataatataatctttttaacaaagaataacaaatatataattaaatagtgagttttatatattttaatttaatttaaaatacgttaagaataatatgttaaggagatattaggcattataaattagtttagcaataatagtcaatgataattagtattttttgtgttatcgttacaactaggggtgttcatttaatttaatccgcactattttgctcttagtgcatccgatttgcactaagtgtagattttatattttgaatccaatccaatctgtacagtagctcaaatccaatccaatccaatccgtaaaagtacggattggatcgattattttagattggttactttaatattaaat

SEQ ID NO: 310010 - DNA, 1293 bp, Cannabis indica
aaatatttgacaactaatttccaaaaaaggacctaacaactataaaaaactttctttttaatcacaacaaaatgtgtgattaaaagtacatataaaaactgtgactaattatacattgttattcctacattttgactaaaatatttgtgggtaaatgtattagtcacaaaaattacaatttattgtaactaaatatatttttagttacaatacttgttgtgactaaaactaaattagtgacaacttgtgtctaaatactatttttagtcacaagtaacttttttgttgtgactaaaagtcacatttagtcacaaattttttttgttgtgactaaaaagttgttactaaaagtagtcttttttgtagtggtataacagtttatcaagtttttaaaaaaaccaaatataataaaatttaggctaaagaaaggaagattagaaagaaaataagataaaaatattacacgattgaaacattatttaacaagtcttagttcatgagtcactattattatgctcttgctatggtgtttacaatgtattttttagtttttggacactagaaattccaaccctttgtgtggaaggaaaatgccatatttataggcatatatctttgaagggtcagactgatctggaaacattggggttattgtagtgcaaaaagatcactaatagggtaaaatataaatataatttgaggtaataggcgggtaggtaaggccaaagttagattgagttgccttccatacggtcatactgttgacattgataggggaggtgtgcgccttcatggggaggaaagaatgttagaatagtgggtgttcgcccaaaaaagtgatttcctttttattgtgtgcctttccaaggcctaacacaagggactggctgcctgattctcaggatcatgctattagagatgtgccacgtagacaactcttgagaaactatgtgaacccgaacgacctttcatattctgttcctggattacacctaggggcatcctccttgagttcacgtgtttgcatgctaagtgtagaattagtatccgagactcattgtctggatccgtcaggaataaatgatgcgggaatcaaaccatatgtttgtttttgcctattcttagtggatggaccgagtaagttatcttcattgtgccaagggatggatctgatatccgtaatgggcctctacgagggtccacatatcgtctttctgaaatctcgaataataataataaatataatagggaaattctataatgcatcccccttaaaagggatacaccgataca

SEQ ID NO: 310011 - DNA, 1500 bp, Cannabis indica
tatataaatttttgtgtgtaaatataatcatgtttataacaaaatgtgaattacttaaattagaactaaacacaaacatacaaactttttctccgcaaattaagtatacaaacatatacttactgtgctgatatttaccaataatttaaataaaattatactcttttgaacatgtacaattacttaaaataatttggagtacaaagatattttcattttttttaaaataaaaattaaataataccgtataaattactgaataatctttaaaaatattagtaaactacatttgaatttaaatcatacaaatatctatttgttttaaaagtagacaaaaaaaaaagtataaatagacatctaggtcaaaggaaaagaacataaacactctctaacacttgattattatgtgctttcggcaaagtcaaagatgaacgaagaaagagttcagataatcgggaacgacatgatcatagattcctctctttggcatgcctgtgccggaagactagttcatgttcctccggtcaactctacggtatcttacttccctcaaggtcacttcgaacacgccggaatggaaaacgccgatgacgccatagccacggcgagtagaattccatggaggattcaatgccgagtcacgtccgtggagttaaagatggattcaagaactgaagaggtttacaccaagattcatctcaacccaatagtgaccaataataataattctactgatgatgataaagactacgctttgagcgagagtttgaatttatttgggagatcccaatttcttaccaaagtccttactcaatcggacgcgaacaatggcgggggtttctctgtaccgaaaaaactagcggagacaatattcccaccattaaattacaaaattactaaacctggtattgaaaatcttccgtctcaggatattctggcgagggattacagaggcaatatttggaaattcaggcatgtttatagggggaatcctctgcggcacttgttgacaactggatggagtaaattcgttacagccaagcaagtggtttctggagacacgatcgtgttcgggagggatgacaatggagatgtctatgttggaataaggcgtgttaggagggcaaggtggcaaggaagaattagggctgaaagtgttctagaagctgcaagacttgctgccattgggagaggttttgaagttaggtattacccgagtagtagcacaacagagttttgtgttgtggattcggtggttaatgcaacgaagaggaagatgatgaatgagtttggggctgggacaaggatcaagatggctttcgagactttaaattcgactggagtggaaccagtgggctggtacaagggttctattgagtctgttgaagatgttgacccgaatcactggcctggttctttatggcgccgtcttaaggtttgtatattcatctcgatcgatcttataatacttgcaattaaataatatgatgcttattaatt

SEQ ID NO: 310012 - DNA, 1741 bp, Cannabis indica
agcaagacagtaaaaacataacaataagatgctcattatgctatttaaatagtaatgccattcacatatacatctgtataacacagacctgcatgttgctctcacatgcctatttatgtctacgtggcgtagacctacatgtttctctcacacgtctatatacaataaggcattagaatgattcatctcggttatggttaccgagtcaaacctgattatgccttgaacgcataatccttaaatctcaatataatcatacacttaacatggcataacatttactcatttatatcactaggatcataatcctaggctattaaccgttcctattagggtaataaccctaatctcggttacaattgctcacatataacatattcaacataagcgccaccgcgcatactctacatgctaactgttgtcttacctgttgtcccgcaatagaagagattccaaatccctgggtgctcctaatcaggtaccggtaatcctagtcacacaatctgggattttcacaaatagggttaacccctgatttcaaactcataaatatattcatggcatttaaaactcatataatcacatagagctcgaaacgaggtttccaacggtatatagaactccacaaacggagttcggaatcaaaatatatgcattttcaaagttcgaattcaaaactgcccaaaaactcgagggcgggccgcgacatgcccaagccatgccgcggcacctgggacaaaatcccaagttccaccaacaggggcgggccgcgacatgctcagaccatgccgcggcacataggttgaaaacccaaaaatcagcaaccaaaaactcgaatttccagcctcaattcatcatctaatcatcctatttcaccaccaaactttcaaatcaacaaatagggttgctagtaattaatagatgctcaaataaacatacttcatgcatcaattccagtaataaaccctcaattttagattacaataacaacacaaaacatgctcaaacacttaactcaactagctcaagaacttgagcttaatccaaccattcctatcaatttttccagcaactcaatactaaataaaacatgaatttcaacctacaaaatccccttaaatctcagccacaactcaacaattaaaacctacaacaaattcatgttattcacacccaattcaccaagatcaaacatcaaactcgacaacatgcatactcaagaacaccacacccttttcatgctctacttacaattaaattcagtaataaacaaagattaaaccaaagaaagttacctcaaatctcaattcaagagcaagctcaagattcaacaacaacaaagctttaaagcaagctaagattcaagcttttctttccaaaaatcaagattgaacacaaagagggttgagtgagaaagaggggtcgggtgagaggaggagaaaaatccagaaattcatttcttattttctcaaaaattcaacctttaacaaagtaagtcaaataaggtcataacaccaaaatgcccctaaggccaattctcacatatttaaacatacaagggcataattgtcatttcatgcacatttaattcaaataaaatttagatttctcattatcaaataaaataccaaataattcaatccaatttgcatttcgggcccgaaatacccagttgtgactataccgtgccaacctgccagaacacacctgaaacaacaacacaggcatactatataataat

SEQ ID NO: 310013 - DNA, 935 bp, Cannabis indica
ggataactaaaacagatagagaaaaatctgtgcatcttcttttatgggggagtattatagaattttccaaaaatatatattataaaaaatatgagtaagtttataatacataaggttattctagagacctcttatctgttttgtcatacaaaaagagctttttagtcattttttcattagtgtttacgttatagttatgtatgactactcgtaaattattaaaaattttgactagcttacagtgttaaatataagatttatctattttattgcacgcgcaactatttttttcttttatgcttaacaaataaatgcttaaactaaattttacgtaaagcaaattatttagaattttttaaattttcgtacatataattttaaaaaactacaacctacaccgtcttaataattttttttttcgaaatgttaaaacagttaacagtttactacagaaatttcaaaaccatataccactactacaaaaacccccctttagaggcggtttttaagccctttcagcatcggtatttgcgaaattcgctaccgacgctgatcaaggcgacgctaaagggttttgaggaactgacgctaaagggttttgaggaaccgacgccatatatacccctatggcgtcagttactaactaggaaccgacgccataagggcacatatggcgtcggttcctagccaataaccgacgccgtatgtggcgtagcaactgacgccaaaagtgagcagattttagtttttttcaaatttaattatataatttattttaattatatatttattaatttatatattattttatttaatttaaattacatatttattttttaaaatgtaaattaaatattatttaaattaattttaaaattggctaaaatacataatttcatttcataaaagtaattaaatattacacaaacactaat

SEQ ID NO: 310014 - DNA, 3270 bp, Cannabis indica
ttctgctagaatcccacgacagattcgagagagaaaactcttttgctctaaaattacttagtgagaaaagtggtaagagtaatttatgagaattttcagccctatttataagccaacttgtgaaagggtgtaattaattcaaacccaaacgctttgatttccctgcaaaaagaaaaatattgggaaattaaaagcaatcaagtactagagaagggtaatcgtcaaaggcgtgtgagtgaagggcccgtctcaaagaacgaatcaatcaaagcattaattagccgaaaactaaagggactcctagtcagaatcacatcgaatcacgaacggactcatttaacatgtgtcacccattcaaatgtaaagttagctcgggtgaagtctacacacaacttcagaagtcccgtagagacttggggggcaaatgttatcccattttttgcactatgatgtggcagcacatgctggtgacacgtggacctgattccccatatccgcccaagagagatgctccgggcagggcacaacatacacctgcacggacgatgtctttccagccgagcagtggataatccgagcagcacatcaacacttagcaatttcaaaatttgcatcctgaagcacaagagtaatccctatcaatctaggatcgtgtcacaaagatatggcaagctgtccaaatcccacaatatgtgtattctaaatacgtagtatatgttcttaccaattatagacattgtaagcaaaagggaaaccttccctcaagcatgtagccctataaatagtgatccattctcactagtaaaggggtggagagaattactcaagaaaattctaagagagcatactcaaatatttcattgtgagagcttcaagagaggaaacactgtgttctttgctcttaacttaatacaaatcaaggggagtaagctattaccgaactgaacggggccgaacctctttcaaaaccttgtgttcaaaaccttgtgtgcttatattatacataaatcatatttcttattgcttattactagactcattgtcgttggctaaaagcgaggtcaacaaatttatagtagttcatttcctgtatcgcgacagtaatggacctacgtctacttcaagcttttatttctcacaagatggtattaaagaaaaaggctaagtgtcagaagctccaatttctagaaaggaaaactagagagaaaagctctgaccttgtgggtagttttttgaacgtgaaaaatgagctaagggagctctcctcttataggtgaaggaggacacaaaataggagaaaagtacaaattagatgtttttgaccatagttgatgatataacagtaaaaatcaacttctagtggtgatggccatttcttagagcccaacgagacccgctgcgggtgacccagacattattttagtaattcatttagggtgaaatttggtgccaatagcttcagaattttgattgaagtatgagacatgacttgatagatcattgaattagcttcaaaataaaagttcaatcgcatcaatcagtcaatattgagtgagttatgactattttactaaaggctattcatgacccagcgcctagcctgacatcgcagtgcccaagttgacatatgacatcaatcttgatgctagataagtgtaaaaaagtcaaagggatgtactttaagattcgtaagtgatattttgacatcacttagtctatttttatcttctggtgaagctggtcacaagttctcagagatgttgctgttctgtagaaagagactccaaactcttccttttcaaattggtttcccatgttggaaatgagaaatgagacattgtgaatttgacttctctagcttcatggatcttaattattttgaaaaactaaatagatggtccaaacagaatcagaatcaaataagcaaaacccagcgcaccaggccatttgtcaactttggcgttgggtaccctattctcgagctcttgggatctcatttcgaaatttccaaggttgttgaccttgaggaaaaggtctccaaccctatttttgaccattctgaatacattggccgaattcgatttggcatctgagcaatcgaaagcagcgccccaggttgattgtcaacctaggcattgcactctctttctagggtctcgggtttgtggtcttctccctaagttttcttgaatcttcattatttgtgatgacaaaaaaaatgcatggaacagtttttcatgaacttgattggaaacagcctaagttgacattatgtcaacctaggcgctgggactagtgccaggtgtcaacatgggcgctgggtcccagttatggcccctcagaaactttgtttggtccctagatttagttgaatttcaatgttttcggaaaatagagaagattcttggaagatttctcggaaaacatcatcaaaatcagtctaggttgacaatatgttaagttgggcgctaggccttgcttctagtacacaggaagtgttgtttcttccccaaatgtacctaatccctattttaacaaagatgaagaaaatgcaaaagttagatcgtcaatctgatacttggaaggtgcccagatcgagaaactgtcaacttaggcaatggggcacccaagccccaagtgctctaaaatgaacttacttcgaatcttattatgatgccttaaacatgtttatggtatgtcaacttgatgtcccaatgcaagttttaaaccatttgcactaagacagtctcagaaactaaaaccctagttaggaatgtcaaccttggcacttggtgaaaccctaggtgcgtaggttggcttccagattgcaggttcgtgtaattttagctctcgagatttggattcgattgctccatgtcttcatggtacaaaatactaaaagatagtgagttggattcaagttattgaagtccaaacttccatcccagagatcccaaagttaacttgggcataaggctatggtcccttaccaagtcgactgctatgaggcgggtctactcaacttaatgacgtcatcctccttaccacgtcacaaacattgatgtcaatattatcaagaaaaattttcaggttaatagtattaattattacaaccaaaatctttaatacaactaacagttgtattatttaatacataacaaatggtctgtattagattgtatgataatatttaaaaaagctctggggtcaacccgaatctctgacctagatctagggacgcaaacccaaatttgtgttggaaattatttt

SEQ ID NO: 310015 - DNA, 1395 bp, Cannabis indica
aagcaccaaaatgttgacctcgcttttagccaacgacaatgagtctaataataagcgataaagaatatgacttaggtataatataagcaaataaataaagaacacaaggtttttgaagaggttcagccccgttcaattcggtaatagcctactccccttgatttgtattaactcaagaacaaagaacataatgtttcctctcttgaagctcttacaatgaaatctctgagtatgctctcttagatctctctaaagtaattctctcgacccctttaccaatgagaatggatcactatttatagggctacatgcttgaaggaaggtttcccttttgctttcaatgtctataattggtaagaacatatattacatatttagaatacacagattgtgggatttgagcagcttgccatatcttgatgattcgatcccagatttatagggattacttttatgcttcacgatacaaattctggaattgctaagtgttgatgtgctgcccggattatccactgctcggctggaaagacatcgtccatgtaggtatgtgttgtgccatgctcggagcatctctcttgggcatatatggggaatcgagtccacgtgtcactagtatgtgctgccacgtcagtgcaaaaaataggataacagtataaagaaataacaataacatgcgtaaactagtagagtgttacagagttacactgaataccaatggatatatgtttggcaaagtactgattgatgctatcacatcagtacaattagagtgatgagtataggcagatattatggtcaatcgtactgtcgtacaaacgttgcagacttagtatgtgttggacgtgagatagggttgcaatttggtgtatgggcgcctagctatgatgtagtttatgttggtgttatgattatgtttttcttactgagtctgtcgatgcacaaatattattgtataggttttggcaaagctaaggctggacaatagtggactcaagaaaataaagattgtacctcacctcaactaacttctcctccttccatatcaaagccaaaccaccattaaggccctttgggtccatgccaaaataaccctcaaaccccagacaaatcttgagactagggatgccaattatacccgcgggtactcgcccctaatggagcgggtatgggggttgactttcgggagtgggggcaagtatgggtttaaaaaatcatacccaagttggaaacaggacggggcgggggaatagatacctgtcccgaacccgccccgatatgatatatgtatacatttaagtattaaaatcataattactacaattaaaataacttcatgctttaggctttttattgattatactcctttttttactatacatactattccacttaagt

SEQ ID NO: 310016 - DNA, 1632 bp, Cannabis indica
tagcaaagaaccgacggcataagtgcacacatgtcaataaagtgtgcacctatgccgtcggttctttgctaggaaccgacggcataggaaccgacggcatagggtcttccagaaacccttaaaaaatcccaatttccaaccgacgggatagggtttactaatatttatacctacggtttttaccaaaaaaccgcctctaaatgtcaatttcgaatctggtgggtgttttcacaccctttagcttccctttttataaaatgggttaaaaaaagggaagctaaaggcccatattgtagtagtgtgcattggaggttattattttagttggttacttttaataaaattagatgatttattaaaaaataataataacattgttgtcaagactccttatggagtattataaaatagacagtggtgtaatattatattttagagaattgttaaaaggtattattagtgtctagcatcctcttcggtgttatattgttaggaaaatttatatgatatattattttttctcaatttattataaaaatactatcagacggtatttttatcttttttactgtgtatgttttgggttttatacggcaatatactacttttttttgtacaaattttttttttatttttttcactaattacacgtatctttatatgattttcccacatcaaaatttaaagtttttcttttaataaaaaggttgattggacgtgggatgtcacaaaagtgacaggttctttactttttttttatttatttaaatggatttaaaaattattctttattattttttaatgtttaataattatactcccccatcttctatagttcatcttcttattctagtttttttttcaggcagagaatcctctgtgtgccatacttacgaaggttgtgggaaaggcatagtaaagagacggcaaccagacaagcctgcgtggccacgatttgaagctcgaaattcttaatatgatacttctcacaacttggacagtcggagaactcaatcacaaggaccgaaaccaaaacctcaattaccaaaaacacagagcaaggcttagataacaagcctgattataacccagtaaagccataaacttctacaacccttcaagggcttcacttaaatcctcattttctccttttcttttcgcttgatttgaagttagaagagggatttggattgtttggctctctattttcacatgaggctcgaccatgagttagagctttagttaagctcaatcatgtggagaatttttattatattgattataatataaaggaaaagtgctaagttgttgttgtgagaaccgaaaacacagtaaaaagtttgaatttttaacgtcgaccgttggattcattaggttcacggatatattacatgatgcgtgacatgtgaccttcttatacatatatttgtttttgtttgatatttttaatcaacataaacaatcttaaacttaacttcgggacttggaatctattttgtaaagtctcccaaatttgataggtttttttctattgatcttgtgttgttttagtgttttttttaggttgattatatttcccatttctcttttttttttttttgcatgttttttttgttagtcctcctattttat

SEQ ID NO: 310017 - DNA, 1972 bp, Cannabis indica
aaatataaaaaaaataatatttgaagatgcatcattataatgtcacattatctctctaagtttcacaattatataaatgtataaaaaaaaaaaaagataaacattgaaagatgcatcataataacaaatcacctctctagatttcacaattacatacatatatagatagattgatttgattatttagggcgcgtttgaaaagccacagtataattagatttgtgtgtaattggaggtaattacacaatttgacatgtttgtctgaccatataattacactatgattgtaattggaggtaattgatggattctaattacactctctaattttcatgaccccttatgaaaattgagtgtaattacactgtgtaattactaacaacttttcatgtaactaccacatcttatccaaacacaccttgtattttaaattatagtataattactaaactgtgtaattaccaccctaataattacacaacctagtaatgacacagttacttccaaacacacctttagttaattataaatttaaataaaaaacattatatatttatacattctatattttattaattttttaatattatacttatatatttatatgaaattatacaccacccaaaataatttcataaacttatttctttgagtctgtctaatatttgttcttattaatatatcaaaaatataagaatatcacaatttaattaactttctttttccattttttaacttatatgattagtgttaatgcagatttttgttaactaaatttgagcctaatcgtgacaatctcacacagaaaaaataaagctataaaagtaaaaatatgaacacagggttttttacatggttttgcagttaaaattctgcatagtccgtgagtgattcttattcagatttctgattattttctcaggacctcttttgtatgagtttttccatcccctttttgatcttacttgccattatttataatcatatagtgagcagttaattacaaagttgacttgaatctttttacgataatcatcccctagaatcatgggatttgattacaaatcatgctaagtaaatgcagtttctatttaaatttcacatagttgtgaatatcccacttttattgggctaaaatagacgcgtattaaagatatatggtgagccttatctcattgggatacctcgcttggaatggagctgagttaattttgatggcgagctggacgcctcgctatctatcaccttgatttactcctatacttatacttagtttatataccgtgtgctatacgctaaatatttctattgtctttatatctcttccacgcaacgaggttaatgcctcgtcttgcacacttgcagttacatggtttctcgtcgagacacaaatcaacagttagtacatttttatctcgcataagactgttcagtcaaccgaattataaacataatctgttaattatgcttttaacgagttattccacgtcaagtgtaattacgattgtgtgtgtaagttctccattcttcccagctcgacacgtgtcttcttctgatgtgctcgccaaattttaggtataataatttccctttaaaagtacttttttaatgaaaagagctttttaatgattacaaagggtattttttttttctatgatcctctttttgaaaagacgcatgtcctctgattttagcggttgtgcggtttcaaggtacatcaacattaaatgaccaccttttccacttcagctttgaattatatccgtaagatcaaatatttctctaatctaacgaagctaatatcataagtataagtaaggaaaaagaaaccacctttgcattatttcctcaattttagaaagtctaaaaaactcttaagctttttggccaagaatcaccattgagtttgtctgaggacttgcatgccatctctgtccttaacatttttttacaagtttcctccgacttcatc

SEQ ID NO: 310018 - DNA, 1838 bp, Cannabis indica
acaatttctctagtatcaaaaatttaaaaacaaaaaatctctatatatatatgtaattatgcattttctcatcactctcatcattttgcacacttcagttttttttttatatattagcctaattattaggttaattgtaatataattaacatgttaactatatggtccatggtggcagttgagagacatatatctactataccatatatattaactacaagtcaacaatagtttacgagagctcttatatatataaacattaattaaattaatacacactttcattaattatattaattaattcctatttacttatgtctataaatatgggaaattgtgttgaatgtaataaatgtagatataaatatatttgagaacttgttcttttttttaattgacaaaattattaattggtttagttttgatctacttacctttatttgtttcaattaattaattttatattaaaatataataaataaaaccaataatgatatacattaaccttgatattagtgaaaatcaaagaattatttataacatattaactgtatgtgtagttgataagttatatagtgattgttggaataattataattatataataattagaagaacaggtaattaattaatttataattaaataataaataaaaaaggaaccaattaatagaaaaggtcgacacaaaaaaaaggcatatattccaaaaatgaatgaaacaaaagacaatgacactcgtatattacaactcaaagcactaacccaaaccaaagtgaattaaactcatattttatataatatatctagtatagtactatatttatatttatatatatagaaaaaaaaaagaagatggaagaagaagagagaaacaattaatatatatagtacaatttcttgtttgtaatatatatgtttgatataattgtttaaggtgttaaggtcagggcttgtcgagcattacatattacaaatagccattaattaattaatttaagtaatgtaaatataatgttattattattattattaatattaatgttatcactaataatattaatcactttgttatgtcacccatagatgccaacatgtagacctctcaaagttgctattaatattaatcactaatataaatttggtcccacattccaaatccaataatgacactccaactatctacttatacataaatatttatatttatataaacattttttttatataattaataatagtgtatttactacgtaatatacctctctttttatgaaatttgtaccactaacaactagcaatatatatatatatatataaaatttattatatgtatatgtgtacaaatatatgcaatgggaaattgtgtattaattatttttattaagacataaatatatatttatttatacttataataatatttacattgcctatactttctagcgattatgtagggcaatatgtccaaaattcacaagcaataatgtttttttaaatatataaatttgataaattatgaaaacaaaaacaaaaatgtgaaagtttttaatgaacatgatcccaacataaacatgtattatggtacaaaaaaattaattttaattttaattttaatattataattataatatgggccggtgctcactgctcaagaagtgggtgcctaacaaaatataataaaaaaatatgatgaattcatttcccaatataagtctttataaatataaataacaaaataatatgaagcataaaaaaaattaaatctataatatattaggtaaatattattttgaaaagctagaataagaattgcaattaacaaaatagagagactgag

SEQ ID NO: 310019 - DNA, 2019 bp, Cannabis indica
acttcttgtgcggacaaacttcaaacatggcatgacagcaagtacggaaaatgaaaaaaaacattaaaaaaactcaaaagaaagtggagcaactcaacaactctctatctcagaccggcagtcaccttgatgaattaaaacaagctgaaaatattcttgatgaattattggcacaagaagaaacttactggcagcagtgctcgcgggttgattggcttgcttgtggggataggaatacaaaattctttcatgctaaagccaatgccaggaaatcaaacaatcagataaaatttcttttcaatgatgttggtgcaaaggtatcctctaaagatgaaatctccatggttgtgcgagattattattcagatattttcacagctggtccaatagatgatacagcccttgcctctaccttggagtgtattcctactgtgatttctgatgatcataatgcttctcttcttgcaccatttacaaacgatgaagttggaaatgcattacaaaccatgtctgcggataagagtccgggaatagatggaatgtcagccatgttctaccaacaacattggtctattgttggtgaccaagtttcacaagccgtgcttagcatcctcaataatggtgcggatccttcaagcctcaatcgaacacttatcactctcattccgaaaatcaagaaaccccataccatgaaagactttcgtcctattagcttgtgcaacgtcatttcaaaattggttacaaagatgattgttgccaggtttaaggaggttcttcctttggtaatctctgagacgcaaagtgcttttttgtctaataggttgattactgataacattctggtggctttcgagttggtccatgctattaagaacaagaccacagggcgtcatggaattgcctctctaaaacttgacatgagtaaggcctttgatcgagttgaatggcgattcattgaagaggtaatgagaaagatgggttttgctactggttgggttgcacttatcatgaaatgcctaactacaaaccagttttcttttctcatcaatggtgaagtatctggttctttagtgccaactagagggttacgacaaggctgccccttgtccccctatctctttttgatttgtgctgaaggtttgtcgaggctacttcaacatgagcaagatatgggcaacttacatggttacaagctaacgagacatgctccatccatttctcatttgttgtttgccgacgactgtctactcttttgtcaagctgatgaaagttcatgccgagccatcaagagggtcttagatacatatcgtctagcttctggacaaatgatcaatcctgacaaatgtgtcatgtctttctccccgaatacaactttagctgcccaagttttctttcaccgccatctatccatgcctattcgtgaatgtcatgaaagataccttggcttgccatcttattcgggacgagataagaaggtacttttcagcaatattaaggagaggatttggaaactaatgcaatcttggaacgaaaaaatcttctcagccggtggaagggaagtcctccttaaagctgttgtccaatcaattcctacatatgctatgagttgcttccgtctaccggtctatttttgcaaacaacttgaaagtatgatggccaacttttggtggggtatgaatgagaatggctcaaagatacattggcgctcttggaatttgctatgcaaaaaaaaaggtgaaggaggtatgggctttagatcctttatacactttaaccaagctcttctagcgaaacaagcatggcgtctacttgagaacccgaattcactcattggacaacttcttaaaagcaaatattttccacacaattcattcctagaagcttctatgggtcattccccatcactaacatggcaaggaattacatggggccgtgagctgttgataaaagggttgaggtggaaaattggtgaaggtcgatctattattgtggttcggatccttggattcctggtcacac

SEQ ID NO: 310020 - DNA, 1413 bp, Cannabis indica
tgtagtcactacatacgtcacaacattctgtaatttatgaagataatgatttgaaaaagctaaaccaccaattttttttttttatttaatgagttaaactaccaaaacttttcatggactaggaatcacgttgctttcttttcattaattagatttcacaatcttaaaaatgatcaagctatagctagccaagtcaaacaagagtctttgattatatatatgtatataaatatgtgaagaagtaatgagaaccataacaacctaaaaaagctaaataaccatgaataacaaaacccacatagccattttccccagccctggtgttagtcacctaattcccttcattgagttcaccaaacgtcttcttcttctccacaactttcacattacatgcttcattctcaccactactgatgattacagtgctccatctccagccaaaaaggcagttcttaactctctacccgccgccatagacatcatctatcttcctccagttagctttgatgaccttcctaaagactccaatcctgaattgaaactttcactcaccataactcactcactctcttctcttcaaaccgagttaaactctttactaattagtactaattctaccccattaactgctttctttgctgatccttttggtgtaaaagccttagaagtcgccagaggattaaacattcctacttttgtattcttccctacaaatgctgctgtattgtctttgctcttccacttgcccatgttggacaagtcattctcttctcgattcctaagagacttacccgacttgatcaaactacctggctgtgcaccccttcatggtaaggatatgttagaaccgatccaagatcgccaaactgagacttacaagtcatttcttaacatgtctaaagagttctacttgactgagggtatcatcatcaatagcttttcgggtattgaatccgaagcaataaaagctttgcaagcaaatgaaggaatggttcccatctttccagtggggccaatcgtgcaaaatggcccaactaataaaaatggggcagagtattgtttgagctggttggacaagcaaccaagtcgctctgttctatacgtttctttcggtagcggtgggacactttctagtgatcagatgacagagttggcatttggattggaaatgagtgggcagaagtttttatgggtagtgaggaagccagacaatgaatctgctaacgctgcatatctcaaagacggtcaaagccaatttgaggctagtgatgtcttaccaaaagggtttttggagagaaccaaagggcaaggtttggttatgcaatcttgggctccacaaactctggtgctgagccatgactcgactggagggtttttatgccactgtggttggagctcgacccttgagagcat

SEQ ID NO: 310021 - DNA, 2326 bp, Cannabis indica
tatagatatttatttaaataattgaatattatttaattcactgagaattaactactataaatagaagcccgatttgagaaatcagatgatgctttttctacacagttattttcaaaatactagagcagaaaagaaaaattattttcttctctcaaattgttcttcctcatgtgttgggaattcaagaagaacaaattatacactttgtcctagtagcccacactactccttgcgtgtggtggatcgatttggaagactacagtgtgaggatttattagatccaacttacgagagattttgaggataccctgatagtcatcaagaggtatttatttctttcatgtactttatattttgatttaatagatatatatatatatctaaagatcattggaactatggtacaatgataattagatatacaattcttccactacatacctaatttagtaccatacaagtttgtatccttagcttcaactttttcgttcaagaggttcccacagacgacgtcaactattgatattgaaacttagctcaacaataaatattattaagactttgaattctttataccaagttcaatctagtcaaatagcatacttaatcgatttacacaatttcctctcaattcactccagtcggtttggtgtctgctctttgaattcacttacgaatttgagggtgtattccaacatagtttcggctagtctagtgtgatcaaaaattcattgtcacctgttttgaatgacagggtcttctatttataggcgaaaaagaatgcttgattcattcttctttcatgttctgatttttccacatgcgctaattctcatctgctgctcatcacaccttctcttcctttctaagttttgctccacatttcttcttatgtagagctctactcttctgcctttgagtttcctgttctgctttcttttattgaaacaatgtgtttctctttaagacattcaatattataggattagctctttcttcttatttttactttttgaaaatgtttatttaccctctaggattaattttatgtcttacactgacgtactataaataagaacattgctataacgtattagtggtgtttagtactatttaaatgtggtgttttacgattggttgacaatattctataatagttattaaatttaattatatgagatccaatacttaattttaataataacaatattacatattagatgatgatgctactagtgatctttttcagatttctctataaataaatagatcaccatctattgccacaagaaaaattattattattataacttgacaaaataatagaaaaaaaatgtatatcatgtgatgtgatatacatagcttttaaaaatttatatgtatcgaacgagaataatagaccttacctattaataattaattcgacaacacaatatttcattctaacattgtcatatacctaccaatattacaaaatcatgccccatatctaaagaccacaaaaataaaataaaatccatttgaaatctaaaatttgaaattttattatgattcatgaaggttaatttacaagagcagccctcataatattaaaaacaaaattaccattttatcttttaatgtattttattatccttgaacacttagtttttttcataaataatattacaataaactaatataattattgaaatgagatcttaatcaatatctttaatcaaattaaaagaaaatcatcaattcacttctaacattcatagaagttataaatattcatatccatgattaatactcccatctaattatactactgtttctaatatgtaagtatgggctactccttatagtaaattggtaacgaacaagtcaaagaactcgaatagcacaattagcttaaaactaattataatagaattcagatcaaaataatctatgataaattaagtgatattgactcagaatagatataacggtaagtttataatatttattctatatttaatatcggtacagtccaatataaatctatacattcgatacaagtctactttactaatgccttgaaaaaggcatcactttccacagtgtaagtagatcacatcgctgattatcacataagtgtaaatctggtacactgagaaatatcgagactaaataagtttgaagtatataatcacaattatttttcactatgatgacgtcactataattgtgaataactatatgttcaggatttaatagaatctatatattaaatatataaatatgtaaataaacatgtttgaaattccgtattttaatattcccagtttgattatttaattaa

SEQ ID NO: 310022 - DNA, 586 bp, Cannabis indica
ttcactattcgtctattcatgagttaaatatagagaaaaagaatttagaatttgagattgagttatgatagctaagggtttaaatcatttgttagaattcaatttcaaacttttaactatttttttaactttttagttattataattgttgttttgagtgcttttatagatgacctaaaaacctagatgttacatttataaaataattaaagacatttttgttatttcatctcattatataatctcattttcctccaaaccaaaccccaatagcttcataaataataatattagggaatttgacaaaatccaattgaataaataaacaaattattgacttcatttgttcccaatataactttttaactatgatacgtgataaaatgggacttgaccatgactacaatgatatggaatcttagcaaaaaataataactaggacgatgggagagtttggcaaaatcatatattctgacaatgcatagattccccttacaataatacaaaaacaaaatatatacttttgtcagtcaagaattgctgcttctttcaatcttttttatttgtcattttggtaaatattaat

SEQ ID NO: 310023 - DNA, 559 bp, Cannabis indica
ttgatgatgcatcataatcctaccacacatgacacattgaagcactcctctctcatctaaagagaatcctgacactctataaattgtttttattatttctcaaacgtgcacgctatttttataacactccttatttggcttagttttctctctttcattattttactactaagttgaagtgatttgaattactatacttgaacaccatcctccaactccaaatccaactcctactaactaatggaaaccatacaagcaaccacgataacaataacagcatcaacaacaacacgtcaaaaaaatcttgatcgttctacatcatcaacacaaacttttcatactccttcaagtactattgatggtgcaataacactgtgtatttcttaataacactgtcaattagctattatctctattacaaatttttgcgattctttaaaatagtagttttaacttacaaaatattttaattatttccatataaattaatggatacatatatatatataccacaattatatatgtacttgttagtaaattgtaaaaataatcatattta

SEQ ID NO: 310024 - DNA, 822 bp, Cannabis indica
ttggttccggctgccgtggaaaccagacaaaatggtcggaaatatcacgacattaaaggatgagttgaattggaattagaccggactagtttaaaattttaagttatcggtttagcagattaattaaaaattacaaaattatccttaggctttatttttatgtaagtgttttattggaagggcaattcagtcatttactaagttagaatgttgacattttatgaattttgacttaattagggctgattacattagactaagtgatagattaaaagaattcttttattctattttattcatttgaagactaatagttaaaattaagaggaaacctatcaagctctctctcctatttcggccctagaaggaaactaagaaggtcagttgttcatctcaaatttcaatctagatttttgctaaaaatttatactaagtgttgtccaaaaccttgaggtaagcttcttttctattttatggtgatttagcaaagtttaaattgagtattgggtggaattcagtgactttggggctgtgtagttagcttaagtatggaacttgttctagatttaatttaaggattgattagattttaattggttgaattttatggctgcttggttaggaattgaaaatttaagtttaaaaacctaaatttaggttctaacatggtggattggatatagtgatgaatttttgagaattgaatgattgtacacattgtttttatggtatgagactgttctggaaggttttattagaattggaggagatttggttcagttttggagcaaaaaccaaggtttcccgtttctgcaccagggg

SEQ ID NO: 310025 - DNA, 835 bp, Cannabis indica
taaaataatttccaacaataggtccatttgggaagtaaaaacagaactagacttagaattcaactgagaattcgactctatgacagcagcaaacggtctactaacagagtaggcagactttcgacatttatttaaaagggttggagacgtattttgagatgttgagagtgatccatcaagctagtacaatccatctttaagcttcccccgtagcaccaccttccttgttgccatgtccttcacaaaacacatatcagaataaagttcaacgaaaactttattatcaatagttaatttagatatgctaatcagatttttggcaatttcggggacatgtaaaacatcttgtaggattaagtgtttgccacaagaggaagtaagtataccagtccctatgtaagctatgtcaagttggttaccatcaccaactgttaatttgtcattacctccataaggtgcccgagtggtcagattgtcttggtcagaagtgagatggttgtttgccccagagtcagcataccagctatcattgtccacaatatcaggagtagcaacaaaagcactcggatccttcttctcttggtgattgttcttatttggtggtgttgatcccatgaatgtctcatcatatctgttgtagcagtgtgctgctgagtccgtatctaccacagacctgacacgttggctttgagtttcaacctcctctgcctctgccaccattagagcttcctccacgattattcccatagttagaccctcgacctcctccactgtttggtgggaagttatgattcttttgagggttatagacaggttgtttgtgttgggttttgtg

SEQ ID NO: 310026 - DNA, 1476 bp, Cannabis indica
ttttattttatttttataatttacaaccgaacaacataacttattttacttaatttttaattttcacacaaaacaatgcgacaccatatattaatcacagaacaagacctaagaaaactagtttcattatttaataaaactagaatgtgaacaaggggcacacttctatattcatctaaaaataattaaagaaaggtaaactacaaaagcctttgagatttgcagcagcaaaaggataaaaataaaaagaactgtaacttctttatcaaagtatggaatcctagtaaacccagcattagaattgttatgaatattctatagtgtccaatatcataacaattgctatgtaacaccaccatatcttaacagtgggtatcatatattttattttaaattaaaaattaaataacatgaaatcccatactaagttacgacaatatcccttagtattattcataacaatttaacatatcgagattgattctcttgttggagttcgtaataattgtgactacgactacacagtaaaacgtgagtcacacaatgtcaaaagtctaagctaaattcagcatgtgtgactttaacaaattgatcaaaagttcatgtcaaaaaaagtgtacatgtaacagaatgtgacaattgaaaaaccgtgcctctgaaccacattagttttattaatgtcatctatttttctcttgagaaagaccattaggtttaaagccaataatggtattcgctttaagatgaagtgacacaaccacaataaataaaaataataatgaataaaataaaatcctgaacataaaattaaaaatcataacaataagattaagcattaatttatttaaaaaaaaatgaggtagaggacaacacataaccaggtaattagacaccggaacaaacaaataatttgaatttgaaccctactaataaacggtatccaattgtacgtacatgctttaaataatttaattttcctaattattcagctttttcatttattattttccttattctgaaaacctaagaaacaacgaggaagtttcgccttttgtcatcatattaagataaaagtcaaaagttgaagcactgccccacccccaccactacagatatacatgagaatttattgtatttgtgtaccgtattttgaatttgaagggttaccacaacaagatattcttgttagcttcaaaagattatgccgtatttattgctgaactgtcctatttattaacatatctttagtgaaagaaacaacagtgatatgttcacttaaaaaactgtatgcctcaaatatttacttagatatataaatttaacaaattattaaatataatattcgaatgtacatattattattctcaattagaataaatatctatctaaagattatacatttgattttgaaataagattcactgttgtataatacagtgtctctattgcttgaattcgtatatcaatactctaatc

SEQ ID NO: 310027 - DNA, 969 bp, Cannabis indica
atagagcagtgttgtcatcaccccctctaacccagttgatcttagccttttgttggaagaaaaaatacaattccttctgtgctttaatgtaagcttccctagtatccttttcttttagctgcaattaatttttgaaaggatccttctgtaactcttcttgataggttgtgagcaattttttcatttctatttcctttgccataatgtctgagaaggattctttattcagcttcttcaattccactttaagcatcttcagtcgagtcaccagttggtacatcgagtacctttaatttgctgctgctagaatttggaaactatccctgaaaattgaggatgtgatgaccacattctaaaatacttaaatggttttttaccactaaaaatttcaaaatatatagtcagaacaactggggtatgatcaaagataccctcagccaagaaaatagcttcagaattaggtaacttgtccatctagctaggcttcattgacaagaaccctaacaatcttagaatagattctctcaatgccttgtcttttattacaccatgtgaaaaaactcccactagatttaagatcctccaatcagcaagcctcaatgcaattgaaaaaaatcatttacctctttgtatttcactcttttaccaattctttcatctttatgcattattttattaaaatcccccatcaccacccattcctcttttatagccatctcttgtaagtcattccataactcagttctcccatccggctcattgtataatttttgtgaaaaaataaaatttttaccacaaatttaaatattttagttacgacatttgtatggtaaaatattaaatcagggactaaaatttacaaataaatatatatatatatgttgactcaaaaatctgaactatacttctaagccacacctgctcgctagattggtgggaatgaaatagttgttaagtaattataagaga

SEQ ID NO: 310028 - DNA, 1214 bp, Cannabis indica
tgtgattaacaagcacactgttcgttgttcgtttcatgaacataataattggaattcaatatgtactgcttcacaataatctggtaaaacaacactcaaaaggaaagaggacaaacaaatcttggacaaaacaaacagataaataaattgatgttacgtttaatttcaaggataagagtagagcggaccaagttttttacaatcaaattttgcatcagctatgaagatccaagaacaatcattcaatgacatagatactagtccatttatgattacacccaaataatagtatcacaaccccaagaaacaacaaaaacccaattgctcaaccaaaatagttcatcattagattcatataaattattatatatatacatatacatgaaaatgcacacctacaaacaaaatctgaatccactgattgaaaacaacgtaataagattctagtgaacccaataatagtgtggttcttaaattgtgaaaagcaatttgctttttaccatggacaacacacccatacaagaaatatcaatccattgactgaaactattcaatattcatttgaaaaatagaaatatcaatacaagcaaaacatcccaatactataaccgctggattttgtctaaattgtgctgataatacatgaaaagaatgggtgtatgttgccattcatattataaatgcatataaataatttcccaaaacaaaagaagcaaaatttcatagtctttgaagcacaaatttaattttcaaatcgacaatcttataaattaatttaggaaatcaactcttcaaaaatttgacttgagttttcggatagagaatgctacccaggattccaacattactatgtataggaattaaagctcgaaattccaacatgtctaaaatttataatcaaaacaaacataatagaaatcaaaaatagagtaacgactaacgaacatataagaaagaaaagagatacctttgcagcgttggaggaaggggagacaaccaggtaagtgggtttgccggatgaggcaattggggcggcggtagagatggaaattagggttttgaatgaatttgaagaagaaagagtaggctttgccggaggaggcgataccttgggtttacccgatgatggtatattttggtgtggagagtaagtttcttctccgtttcaagactaatgtttctaactcttttttttgttttgttttttttctttt

SEQ ID NO: 310029 - DNA, 1378 bp, Cannabis indica
ttttttttttttttgaatggagataatctgctatttatgtataaaaatatatatactattaaaattttttgacttgtgattggacaattttcttccctatacgatggggtaaaaactattgatcctacagtagagtttccctatatataatattatcataataatgattgattatgatatacacatgtataagctagtgacacatgtgacgtacgataacattttgtttcgatattattagttaagcagagtgttgtatggtaactttcttagtaaccctctcgatcgttcgtacctaataaagatcattatcgactaagatactgtagctagcaagcaacagaggaattaattgtagtgatgaaaaggttggagtattgttgtgatgatgagacttcgctccattaattttggacgtgtgcaaattattttagtattactatatgcaatcggtttaggcctccactacttaaggctcccattttaaaattaaaataaaataattagtaataaagtaaaaccataatacccacattattaaatgtatgttattttagtagaaatttgagtttttttttctttaaaaaaaaaaaaaaagaagttgactaggtcacccgttgacccgagttgacccaacaacgcgaacccgcgagcccgaaactcgcgaacccaaaccgtttcatagatcgggtccgggtacaattttttgaacctgaaacccagtcaactcgcccgatgttcagccccaattcaaatgatgacctacaacctttccaccttgatattttgaacttgcagttttcgaaaggattgccctcatgttgcgtgtaatgttcacattttagaatatgattagtaaaggcaattagcgctaattattgatatttttataattattcatgaatttatttagttgtgggtcccattattagaagtgggcattagagttataagttctcaatttcggaaattttattaaactctagaggtaatatttgtattatagatgaagtatgtaatttttatgatttttgctcgacgatgacggaaaatgcgatggatggccattaggttcacatgggtaagtctagaacctttttcttagtaggataaatatttgagatcaatagaataccaggtttgagcggggttgtggtttcggactattttacccctaggcttattttggcttaagtttatgtgccaagggcattttggtcattttgttattgagttttggtggttgcgttagagcttgacacctagccatttagtatgtgctgaagtaagtgagtttaggtgtattattcacttagaattaattaagaaaaaattaagaaaataagaaaagttcaacctcttttctctctctctctct

SEQ ID NO: 310030 - DNA, 801 bp, Cannabis indica
caatccattggatgtttgatcgattggatgactgaaattaattgaatcgaactgaatggtaaaatcgaacatccaatatataattagatcagatttggatagacctaaaaacgttaaacgtggtccaataatcaaccatactaaatactaataaaaaatatattaaatacaattatcgtataattaatattataatctttttttaataaataattataacttactataataattaaaattagaatatataattatagtaccgtcttataattaatattaaaatttattcacgtgggtaggaacctaaaatacatgtaatattcttacctataataaaagagcaatgctaatcttgcgctcacaattgattagcaatattttttaaaaattattttttattatatagaatgcaatacttaattacattaataacaatgacaaattaataggctgatttttaaatatagtaacaggtatgcgatagaatctctcgataagtttcaaaatctctctttcactctcaagccaaaaaccccaattaagaaatttccaaaattcatattaattattcttctacatcatctacccaagaaattttcaattagtatggattcagattcagatcattaccgaaggagaagattattgtattgatcttcttgattgatgccaaagtttttctcattctcacatcaacgtcttcttctgtgaggggttcaagagcagtcgtctgagagtggttcggttcggctcaacgacgtcctccgtttcagatttttgttttcatttattaatttacta

SEQ ID NO: 310031 - DNA, 2442 bp, Cannabis indica
ttattccttaaaaaaaaggtaagaccgtatctctaggtgatactaagtgtcactaatatataatagcaatgctcattaatatgtctaacatcatacgaagtaattaattgatgtaattagtaatattttatattatttattgctaattaggattttcgccccttaaattttgacatgtactaaatcatgccccctgaactcttaaggtcattttaaatgcctcttgaactattaagatttttggatttaaagactcttatccaattttagtaaaaaaaagtctaacatggatgaaagtttaggggatataatttagtacatgtcaaagttcgaggagcgtaatttggtagatgtcaaaatatgagcagcatggtttagtgtaaaaataatcactaaaatagtaaaattaaatgaaattagacaaaagtccttagtttagggggaattttaaacggccaaaatagttcagggggtatgatttggaacatgttaaaatttaggggacaaaaatcctaattagcctttatttaataaaataaaattattaaattactaaaagaaatactgaagggaccttggagaatcatgtcatacacattttaatttagagaattatattctgtcatacactaatgtgtatattgtaagcggctagtgattttttatattatttatttaattagaatatttaaggttttatattaaattgtaccaataataatatatttgacacttaaaagtagcagttctcataagtacgatggatatgaataatgccaactatttaagaagaaacttatcttgtggtggttttagagatattagtgtctaagactatcttcaatagttaaattaatttggtatgaaatctacaccaatttagtgtagaatcttttattttttagtgcaacaactctaatgattcacactaaatattctatcaaataaatatattttacttaaaagatcttgcattatatattatttacatacaatactatatatattttatttcagtgtcgattttgacaaaattcgctatcgacgatattctaggcaacgtcgtaaccgacagtgtaaggagaccctgtgctatctgttattatgaaataattgacgacataggggattatttggagttattctgtataatgacgccttttatggcaccggttattagcaaataaccaacgtcgtaaggtattttctaaaactgaaaataaaatatttttgtttattttttacatattttatttttatttacttttattaatttattaaaattaaatattaatttcatataattagaaattgaattgaccatataactaaatgtatatatacattattctaaataaatatattgcacaaatattttaaaattattccaagtatttataaactattatctaactatacatagaaaaataagggaattttttttacaaattatctaattaaaacatagaaaaatagggggaaaattcttatacaattcagtatcaagctttcgtgaatcactgcaagtcttcgtgaatcagcgcaagcaattattctatccactgttgatgtaacggtaacaactcaatttttacatcgtatgtcttcttatccctaaacagtaaaagaagtaaatatttattagtatatatatattttagaatgtttgctaatataataaataagataataatagttaaaacttacagctcttacatcggttaagtatctgctagaatttgcatgtgcaatgatatcattgatatattttaatacataaagtttacattcttagtttttaggttattttgggtattttgctacagatatacctggatacactccaatgaacacatttgaccccctaacgtctcgtatgacctgttttaaaaattatattaacattttaattaattaacatatataagttagttattattggtacaatttaatattaggtccatatatcttgtcttttgacatggtgagaggttttctttaattctttttgttcttagtgttttgtatctgttgaatatggattctagtagctatactatcaaggatatggaggaactatgtgctaatatagaaatagaaggagaagatgatgttgtctctacatttgacattgagaattctgatgtacaagttgctgatgttcgcctgtgtattgttgggtaatttcttacagccaggtgattgattatgatgtaatgcgacatataatggcttctctatggcagcctggtaaatgtatgtatgtaaagcaattggaaccaaaccgtttcttattctagttttatcatgaacttgatctggaacgtgtcatagaaggcaactcatggacttttaaccgtattcagctcgtctttgcacgtctaaagcaaagggtgttggaatttattttaccaggatcttagatctactcacaagtatgtt

SEQ ID NO: 310032 - DNA, 2159 bp, Cannabis indica
atatttcagtgtcatgtcatctctaatatacagctagatctcctcctcatcttcctccattttcaactttgtatatatatatataataaaaaaaataatggaagtcccaattctagcttttggaacaatatattttatcagcatcaagcagaaaatttaagaacagtatataatgtgcatgagtgagcacttatttttgttttaaggtaaattttatatgcggatgagtagtgtcatattatatcataatccactagattgaagtttaacccacttatcattataatctaatccttagtattaagcaaaaaacttaaagacaatgtttaagtaaccatttgaataatgattgctttattaaataatcaactaaacctaattatgttgttaaacttaatagtgttttgctatcattatcattagctagctaattaacttggtatgaggttgattaagcctaataatgcatgatatgatatgaaaagaataattaactaaacataaatttatgcatgcatatatatatatatatttatatgtgtgtgtgttaaaacaaatagagaagaacaaaagttagagaagaaaatgtaaaagaaaaataaaatggaatgatatatagtctttactttaagagacaagggtgtctaatcatggtggcaaggagttatcacttgagagatatgggaatatattagtgggccgatatttaggcccacttcaatccaatccaatcttgaaacttcacctcagtaaccgaaaattatcacattaattaattattaataacacttcaacttggttgttattatagctggtcctcaaaaggaccgacccttcttccttttatatgtccccatcttttttattttttatttttctccctcttcctaatacttttattttttctcaccgaaatgacattattaactattatttttctttttagatgatatctatattcaagaaaattttatatgattatttttgttgattataaagattgattcgttaaaagagaaataaaaataataacataaatgttggaaaatgtatacaacataaggatattatattacatataatttagaatactgtcaataattgaatgatataaagaattgcctatcacttcataaaaataattgagacataaaagagtttattagttcattactaaactattaagttttttttcccctaaatctttaaaacaaaagcaaatcaattcatcaactaaaaacatataagtgtgatgatacaatatgtatttataaaaattagagaggtaatctagctataaaatcctagttggattggatctctttatcaaagatttcagttaactagacaaatttacattattgtttcaactagacttcacatagatatactaaatttaatataaaattgaaaaatatacatacatacaaatatatttacaaattttgtttatgtttcataaacaatatataattagcattggtaatgtttataatgctattataaatttagtatatttattatggtaacatttcaatagaatcaatataatttatttattaaaagttaatttaaaaataaaaaacttatatatattttttgaacaaacacttatgtttattagttatttgaaaatatattttaaaaaataaatgaaactgtaattaaatgtgacattacgtataaaatactatgtttatattattattgaaaatgtttatattattatgtaaatttttcaaaaattaataatttaaaatatagttgtccaacaatatatatatttatatataaaatgtgattatttaacactttttgttggttttaacaaaatattttaaaaatataaggaatagttttttttaaaaaatatataaatattaatattatttattttagattaatttaaatctatataaatattaatatattatttgtaatattatttattttttattgttattttaatattgagagtatgtttaatatatagtattgataaatgttgtttaatatacaatattaatatatctattttaataaataaataagtagtttcttttaatttattaaatttttttaaaaataatatataataaaaataaaaataaaaaataactaaatatacgtagaatacacgtaataataatctaatatat

SEQ ID NO: 310033 - DNA, 1023 bp, Cannabis indica
tgagaacctattaaaatcataataaatattatatatatataaaaaaatatttaggctatttttgactgttgatgatgatataatgttgaaattgactccagaggtcggtcgttaatttttggaacttgggtcacgttcacgggacccactttgggtaagttgtagattaaatttgtaactctcttgagaaaaaatttgaagtgtaagacatgacttgataaagcattgaaatatcttcaaaatgaaagtttaattgcatcaatcaaatcaatatagagtgcgctatgactgttttactgaagactactctgatagaagcgcccaggttgacagtccaacgcctaggttaacatatgacgtcaacatggatgttgggtgagtggaaaaacatactgggatgtatttttagattcccaagtgatattttgacttagctagtttcttactctagtgaagtcgttcaccaattctcggagatgttgctatttctcaaaattgggagactcaaaactactcgatttgtgactaagttacttttccaaaaaaagtaagattatgaagttgggaattttacttatcaaagttcatagcttttgtttactatgaaaaactagacaaacgctcgagatggaatcaaaattgaattagtagaacccaacgcaccacgtcccttgtcaacctgcgcgctcggtactctttttggagctttcaggatgtcgtcttgatacttccaaggttcttgaaatcaaaaacaaggtctcctagcctatttatgaccatgccgaagagaatgcttggagaagaatttgcatttgaatgattaaaaccatcgcaccaggttgattgtcaacctagtcgctgcgctcagttttcatgtccttggaattctcttttctctccaagtatacttgtatctttgttatttctaatgatagaaaaaatgcccgaaacacttttttagaaaatatgattagaaacagcctgggtccagtttcaagcaattagatggttccgtttgattct

SEQ ID NO: 310034 - DNA, 1505 bp, Cannabis indica
taggcatgaccgcccctttgatcatcttggctgagaatgttattgacatctccgatgacacaccaagggagggtatcgtcttctgctaactccttcaacaatctccatgtattctctcttcggctcctattaggctcaccgtacagacctgtgagtctccaaaaaacaccatcctccataactattctcatatcaatgtgattatgagaaaagcccaacagactaccctcattcccatacttccataacattgctaaccccccacttaacccttgtggatcaactacaaaaatacaatcaaaacccaatagccggcccacccaatcaattcgacttttaccacacttggtctcacacaaaaatacaaatttgggtttcttttgagtaactatctctttaaggaattgaacggcccgttggttcccaagcccccggcaattccagctcaagacattcataatgcttggcgggcctgcgaaacagaacccgcccccaagaagttttttggatccataccaccatttagcatttctacatcatcaacgttcccactgttgctattatcatcattttccattgaactcttttgaatgttatccatttgaagcccatcttcaggcccaccctcaagcccaacctcaaatccattagtttgggtccttctacgtttgacttcagatatcatcaaggcctccttttgactcttttcgtatggcatatattcaacattaaaagccatattatttttggaattgccagcaatcaaatctggtggagttattatgggtgccattgaccttggagcaattataggattagtcactgcttgatttatggagatattctccaccaaatccgtaggtgtaatggtcaatccctgagaattctccctctgtcttcttggatcattcacagccgtggtagaacttgagccaccgtatgatcccgccggtttagtggccgcacctgatcgcaaccatggagccccaatggtatgttgcctcctacgtggtgccgctttcagagataaatcgaaaggtttttggatttgccccggtggggtatcaaacaaacgatcacaaaaacgttctgagtgtccaagtaccccacatataaagcaaaaagttggtagatcttcatacttaaaatggacctcacatgtctgaccattctttttctcaagctgcatctttttctttagaggtttttcaatgttaatcgtggtacgaactctaaaataatctcgccaaactccggtaaaattattaggatccgatttgacaaacgttcctacataattggcaacatggcggagtgtgctttcagacataaaaccagaagacaagttgtggagttgcatccacatttcaagtttattcatgaccacctgacgaggattctcccctggctttaccctctcaaagatcaatggaactcgatcgaacgtccacgggctgccttccataactctctcaatgtctaactcatgatagaattgaaaaaga

SEQ ID NO: 310035 - DNA, 1039 bp, Cannabis indica
tctaacatggctttgatggctctcggctcaagtgactcaaaggtgttcacaatgattcctgtaaattcacataaataattagccgcgcatgcaagaaaactaccataggccttgtcacggcggtcgagcaaaggcttcgccatgtcagaagacagcagaggcggaactccaggaatatggaggagggtattttggtctttgaagctcttctgggaatttcggtgaagggtgggcaaataaagaaaggcagctaagtcagaagccgatgaggtgtagaatatgaaacaggggattttgagttgaacagagacagtgagtgtttcagcacaaaagaagtcgatgatgaaagcgtggagggtgtagtttttggatatggaggtgagagcttggtgtacggctgacttgttgaaggtggtgagttcgaagaggctgttctcatggtggagcgaagaggctgagatggatggagggaaagaggtgggttgtgggaggtgatggaaggtgatagaaggaatggttgcggagactgtggcgatgtaaggagcagtgtcaccggagttgtaaggagcagtggagatgatgatgtgaatggagagtgatggtttgaaggtgagtattagctttccaagctcaaccatggagattaggtgtcctatggctggtgctggatacaacactattgttgacttcatatttctgatcagttgattgttactcagagtcagattgtaagaaacaatatatgaagagagctcttaataattttagggttgggatgggtagcatgtgttgctgcccaattcatttatgacacggacatgtacaatgacaacgacaagatattcttttgaaaatatgattcatgccctttatatagagaaatgtagtcatagttaatgtctttctttttagggctattgagaaaataaagataaattttgatatatatggcataaaaatttaattacactaaatatgacatttttttaaaaaaacttacaaatatgggaaaaaatcttgaggaatgccataaaaactt

SEQ ID NO: 310036 - DNA, 610 bp, Cannabis indica
ttacaattaagtgtttaggcaaaggaaggaatatgtttggtacgtccctaacatatctgctcccttcaattgagattgggatttcagcatcctcttgcagtatttccgaaatcagaacccgggcatgtgaaccatcatagtctgtgcagtgaacagtgattttaccaacatgttcgtacaaattacaatccttgtataatttcctctccacagttttctctattacaaaaattcatcctgaatttataaaagttgctgcaaaatattgttaatatatcactaatatgacgtcagtctagcccaaacaaaaaataaatgcttaataactaaggtgagatccaaaatataaaattgctctccctgaaaagaaaatcaatatatatatctacatatattttagttaatacatgatatatttaagtttcatatccaaataaaattatttttaatattttagtatggaaagtttactttttaaaccattacctctaagatttgtattaatcattgaagccaacattttttattatttttcttttgttggaaattattttaccaggatcttagatctactcacaagtatgttgattaataccctaaatatgaactt

SEQ ID NO: 310037 - DNA, 1917 bp, Cannabis indica
ttgccattaaatagtatgatggaaaaatcaaggtgcagatgaatctaaggcatatcccaaaccttagacaaaacctcatatcactgggtgcgcttaaagattaggggtacgtatacaagtccatacacgaaagcttgcggatcaccaaaggttatttggtcaatggttatatgttcttcaaggagaaactgtcccagctgcagaagctagtatggtgaaaggactagaatcaaatatgaagttgttgcatcactgacttggacatatcagtgaacaaggcctcaaagaattgctcaaataggttataattgaaaatttaaattcttgtgccttaccattttgtgaagcttgtgatttagggaaataacataagctaaagttcactccatcaaggcacacaactaaaaagagagtcgaatatgtgcatgttgatctttggggactatacaaggtgcctactcacttcagtaagcaatattttctttcaatagttgatgattatagtaagtatatttagacctattgactatcaaccaaaactgagtgcctagaacagtttagaaattggaaaactcaggtggaaaaccaaatagatctttaaattaagaaacttaggactgataatgggttaaagtttgttaactctaaatttgaaaagatgtgtcaagaatttgggataactaggcatagaaccgtactgaagaccccagagaaaaatggtgctgtaggataagaaccttgttaaacaaagttagatgtttactctttagttctaggttagagaaaccattttggatagaagctttaacaatcgcaacataccatatgaatagaagcccaaacagagtgatagacttaaaaacaccttatgaaatgtggtacaacaaaaccccaaacctaacacatttaagaatatttaggtgtacaacatatgtacaccaatccatttacaagctagaacctagatccatgaaggtaactttcttaggttatgccttaggaaccaagaggtatagaagctacattgccaagaagggtaaattaaaggttgtgattgctagaaatattgtttttaatgagttggaatatcctcacttgacctccaagaaaggatgtgtgtcttcgtgtgatgcaggaaaaataggaaacaaagacactataagtatggaaatggagtacggaaccaagctcctagaagaaggttcacatgcaaaagatagtatggaatcgaaagaccatatgcaaatagaagttattattaagctggaagaacaaggtaatgaaacagaggtgatggaagggtccagacagataagtctgaaaggttatcagttagctcgagatagaacttgaagagagatccatcctctagcaaggttcagaacagtagagttaatagcatttgcactaccagtagttcaacaggctaaaattgaagggtctggaagctatgaagaggaaattttaggcgaatacaatctaaatggcttcaggccatacatgaggaggtggattcactccaaaagaacaagacttggataattatgctgaagctggagaacaagaaggttgtggagtgcaaatggattctcaaggtgaaagagagaatcaatgtgaatgaaccagtaaggttcaaagctagattagtggctaaggagtttactcaaatggagtttgaggttgaataacttgatgttaagactgcttttttaaatggattcttggatgaagagatctacatgaagcaaccacctgattttagaaggaagggaaaggagttgaattggcatgcaagattaatatgtctttatattgtttgaaacagtccccaaggaaatagaataagagattcgatacatatatgcatcaaatcgggtttaaatgatttgcctatgaatctggagcaatctacagtca

SEQ ID NO: 310038 - DNA, 2761 bp, Cannabis indica
taaatctaagtatattgaaatgaattttatttagggcataaaacccaacagtttatttccccaagagtgaagcttgagtttcatcttctttaatatcggcccacaatcctcaagcctccatttagttggtctaagagggatcccaaggtacttgagagggaactctcctaaagagagatttattttctgagcaagcagtgtcggttgagcaacacccctaaaataaacctgagatttagcaaaattaatggaaaggcccgaggtcttgctaaattcttcaagcagatttttaatggcagtgagtgaaccctcattccctttacaaaagatcactaaatcatccgcaaaataatgattagtgagtttcaattttttgcacaaggaatggtacctaaaattcttatccctggcggctttttgtatgcttcgagtcaggtaatccataacaaggacaaagaggcggggtgagatagggtccccttgtctaagcccttgttctcctttgaaagtcccctaaactcttccattcatgagtaaagagtacgacgtgtttctcacacagttcatgatccacttaacagtaggcaactaaaagcttctcaagaaaatcccagttgactgtatcataagcttttcttatgtcaatttttattgtgcaccttggggagcagttctttattctatagttttcaagagatcctgaagaataagaatattatacgcaatggaacagcctttaacaaatgcccttggttccggctcactaagttgggaagaacattagcaagcctagaacaaatcaacttagaaacacatttatacaaggttgtacagcaagcaaatggccggtagtctatagctttagatggactctcagtcttagggataagagagggagttgtgttatgtaactctgtcgggaattggttggtgtcgaaaaatagagctattgcagcatgtctatctttccccacctcaggccaaacagaccaaaagaaccccgatccgaatccatcaggaccaggagatttagtaataagaatactaaacatagcagctctaacttctttgagagagaagggtttcaggagatgaacctgttgatcaagattaagcttgggccccaaagctatgcagtccggttgaatctccatactagttggtttgactttccccattatgccttgaaagtgactaatgaaatgttgaacaacatatgggaagtgatcatttaagtccccttgttcagtcacaaacgaaacaatcctgttttcttccttcctcttcttcaataacgcatgaaagtaagtagtgttactatcccctttttgaatccagttgacattgcttctttgatgaaggaaactctggtacattttttcctgagtgtgaaactgattttccgcctcatgctccaaaccaaggaaataaatgttattaggattagcttggcattggaactgagcctcaatgtaagactctttggccttctcaaaggcctctccaatgcttccaatcacatttctgttgaatctttttaatttctgcttgagacgcatagttttgagataaatccccttcaagccacagcatcttagagacttcccccaactatccaaaacagtctttttataatccagatgttctgcccaaaacttgtaacaacaaaacggcttggtgccaaggttttccgtagcagtagagtgaaccacacaaaaacagtgatccgagcaagtctcccaagagaagtgagcaggcgtatttggaaaattatctacccaatcctcattgtggaacacatggtctatgcgagagaaaatcctattgtcttgtttgtttgtccaggtgaaattcgatcccatacgattcataggcccaacactggaattagctatcaagttctttgaatcctctagctccaaagcactaatttccttcccccttgtctgtcatcatgatggaataccgcattaaaatcaccaagaatagtccaagttgttgttacatttatcattgatagagcagaccaaagatcacttcttccttctatggtattagctccatagacaaaggtagcaaagtaatcttttttctgccctatcattttgatatgacaatgaacatattgcttggaatcatcaattacttcaacatttacaaacttctttctccaaagtaaaagaatccgatcttccatttttttactagaatagtaatcccagtaagaaaatctactagccatcatatcttgtaacttctccgctttaactttagtttcaatgaaagcccctatccctatctttttagatctacaaacttcagtaactttctcttgtttctcttttttattcatacccctaactttccaacaacttatgttgcaaaaatccatcaatcacaagctgcagaaactacctccccctatatcttcattttgtccccctgttaggatcgcgaaagagttcctgagaacctttttgcttctgtccgtatcttttctagttgagcccgatccttttgaaactcaatttttaggtgccaaccattccccattagtgtttctccctgtagtgacccttccctgcaccttgggacccttgttttcaatttcagcagtatttaaaccagtgtggccagcttcagaattaacatcacagtttgtagcagatcccttgttatcagtgtcagttgttgcagtaacattttggacagaatcagtgttaacttccttctccatagctgcttcattcgacccctctgc

SEQ ID NO: 310039 - DNA, 679 bp, Cannabis indica
ttaaggttaactgtgatgttacaatcttttttcgtctgacttaatttgtaaagcgcgatccaggaattaggtggccggttagttggcttattcttctgattttaatcctagttgtgttttcaatgggaaagatgtcccgattggattgcagattgctattaataaaattgcatgatttcttcagacaaaaataacaattaatttatttgcgtgctattgtaaaagaagaattttatgtttaatgaaagttaatttttattaaaaaaaaatagcaattaatcgaattcagaatggggctatagtacggtttcctttcttccttgttgcaacctcggaggttaggtttcttcttggccatggttgtaccatatcgtgattggggctatgctaaactgtggctctagttgagaggattggcttgtagttccaatctcgtcacatgtgtagttgttatgtgggttggggtcccgttctgacagcagcttaagtcctctgatagcttcctttcatggtttccagaggaatgctcctttgcataaggttcgttgcacgaggttagcaaaggaaggcttcgacgaatcagtaggcattggtgtgggaggctttgcctgcgggtggggcactggttgggttttggggactctttgattttttctttgtttttagttttatagtttta

SEQ ID NO: 310040 - DNA, 1562 bp, Cannabis indica
caccttaagtacggcatgctgaggcctctcaggtaaaggatattatccatcattacgtatcgatgtgcctgatactataacctcttggatacagccctttcttgagccaattctcctttcgttacgtatttgatgatggagtccatccaactcggtccttgctcgttagtagctaccgtttctttggctttgatgcttggcaccgtgaggtgttcgacgggtaccaccctcagtttttctatttcactgtctgaggctagcttgcccagacaatctgcgtgagcgttcttttctcatgggattctttccactttgtattatgtgaagtcatggagcagttctttgacaatcgctacgtaagcggccattttttctccacgggtttggtattctcctaatacatgattgaccattaactgtgaatcactgaagacttctacccttgtagcccacacctttggccaatcttagtcctgcgattagtgcttcgtattcggcttcgttgttaaaagctggaaatgcgaagcatagggcggcctggagccagagtccgtctggcgatatcattgctatcccggcgccggatccattttcatttgacgccccatcaacgaacattttccatgccggcattcgcggggctagcatattggagctggcctctacttcattacattccgttatgaagttcgccagggcttgtccttttatgaaaatacgcggggcgtagtgtatatcgaactggctcaattccatggcctatttaaggagtcttcttgaggcttcgggtttctgcaagacttgtcgaagcggatttgtaagtaccttaatgggatgggcctggaagtagggtcttaatttcctttgaagccataaggaggcaaaaaaactagtttctcgattaagggataccacgtctgggctcctgtcatgcgcttactaacatagtacaccgaatgctggaccttgtcctcttcccggaccaaggccgcactgtaagcgttttcagagacggccaagtataataacaagtcttctttgtgaagcggttttgacagtacctgtggtttggccatgtgctcttttagttttttgaatgcctcctcgcattcttcagtccactcaaatttttgacatttcttcaaaatattaaagaataggatgcacttgtcggttgaccggaaaatgaatcggcttaggacggcaaccttcccagtcaaactgtgcacatctttgtgtttcttgggggaaggcatgctcagtaaggcctggattttttcgagttttgcctctatccttcgttggcttatgataaatcctaaaaaatttctcgatttgacgccaaaggtacacttcttaggattaagcttcatcccgtacattcagactacttcgaagcacttcgtgagatcattggcatggcccatgcatgtcttagatttaactagcatgtcgtctacatatacctctatatttcttcccaggaggcctttaaacattcgattaagcattctttgataagttacactggcgttttttaatccgaagggcatgaccaggta

SEQ ID NO: 310041 - DNA, 1199 bp, Cannabis indica
tataagtgttcttaaggttaactataatgttgcaatcttctttatctgatattattttatttttttcatcaaacgatctggtaattacgcaattgattattttgtttgtttttctaattttaattttggtcatatctccaaaagagatgtcccaatttgatcgtagactattctttagctaattactattaataaaattttttatgatttattaaaaaaaataattaatattatatgtatgttaatatatataatcaagagacacgtgtccataatattccacatgaaacaatataatatattaattgtagagatttcttttgatttgatgacactaacaaaagtaatattaagatatatatggttttttaattaaaaattataatataatggttaaaattagatatgaaataatttgaagttatcatcatgatatatgattgtttgatgaacttagagttagtggagcaataataaaggcataaaccttttcattactattccttaaagtactacataccaatgttacatataccaatgttatgttacataaaattatatatatttttttggttgggggatttaagcatatcaattattctaatcactaagcaagaatgtgtttaattggcccattaaaattctattgtttattttaaaaccaacaattaatttcaaccaaatttttcaatttcatgtttaactttagtttatgcattaactagaaaacagaaaacatcaaaacgtagttttcaactttcaaaaatattttttttttgtctaagtattatattttacgtttttactcacatactcgcaccatggaactcagatctcggacacggacccaaaccatgaaacttgaacgccagatcttggaccccagaccgactcggaccatggaactcgaaccccgaactcgacccaaacccgaaccccaaccccggtctgggaccccgttcctaacccggaccccgactccgaccctcagcctgacccggaccctgaaaccgaactcgaactcaggctcgggtctgggtccaggtcaaggttcaagtctggattcgaggcggggtctgagttcgaatttgggattggatgggtttatgtcatgatatggtgtcgaatattaatttttttaagtaaaaaaatgtaaaaatagttttaaaaaacccaagtcaaacattattaaattttta

SEQ ID NO: 310042 - DNA, 634 bp, Cannabis indica
caataaaattagatatgtcaattgattaataaattattctagtttttcggtccctcaccattttattttgaaatggtattttaaaaggctattctctaaaaaaaatgtatcatttctaaaaaaaattcatagtattctaaaagaaaaataattttattgaaccattatgatatagttctaaaaaaaggaaaaaaaaataaataaaaaagtgataaatttaatattttaatttcttttctaattaatataaaaaaaaatgattaaacttgtagctcaaataaaatttagttagcaatcaatcttgtgagttactaaaaaatatcttataactactatcatcaaaagtcatttaggcttttgttttagaaaaaatatttgttaagaaaaggaaactaattttaaacttaaagaaaaactaatatacaaaccaacagaatagattagtctcaatttttggttgtttttgcattaaagctaccaaatggtatatttaaaaaaaaaaaattaatgtggttaaaaagttataaaataaccaaatagtattttaaagggttaatttcacaaatgcacaaaaacaacaaaaatagagtttcacggaattttaaatatttactatttttttattttatttaca

SEQ ID NO: 310043 - DNA, 1950 bp, Cannabis indica
agttgaacaacttgatgttaaaactactttactgaatgaattcttggatgaagacatcaacatgaagtaaccatctgggtttcaagtggaagtgaaagaagttgaattagtatgcaagttcaacaggtccttatatggtttgaaatagtccccaagatgatggaataaaagatttgatactcatatgcaacaaattaggttcaaagaatctgcatacgatcactgtttgcattttaagaatctggagcaatctacagctgtatttttattgctctatgtggacgacatgctcatcatgagcaaagacaaattcatgatcaaaagtatcaaagccaagctcaagagagaatttgagatgaaggggcttggaccagttcaaaagatacttggtattgatgtttcaaggaacaagaaggaaaggacaattagcttgaagcaatctggatacatcaagaaagttatttagaagtttaacatggaagatgaatagagtgcatctataccattaggcaaacagttcatcctatcgaagcaacaatgtcctactagtgcagaagagaaagaagaaataaaggatgttccttatgcagtggttttaggatgcctaatgtatgtaatagtgagcaccaaacaaaatatagctcatgctctaagcatcctaagccagttcatgtctaatttaggcattgaaaattggaaggcccttaaaaggttagtaaggttcttgaaaggcactaaggattatggtctggcctataagaaagcaaaaagagaactagagttggaaggtttcgtggatgctgactatgcctcaaatagagatactaaaaaattgatcattttccacatattcatgacaaaccaaaattgtatatgcttgaaggcccagttacaatcccatggttgctctttccaccacgcaagcagaatttatggctatgatggaagtattcaaggaagctttatggctttgaggaaatatgtatgacttaacacaaataaaaggaggagtgactgtgtactcagatagtcagtcatccatcaatctttgcaagaattcaatttatcatgaaaagagcaaacatatatatatatatatataagactctattggattagtgaaatgatagaagaaggactgattgaattggagaaggttagatcagaagataatcctattgatgttgttactaaggtcttaatagtaaaaaggttcaagcattgcttggacatgattaatcttagaagttagtatactgaaataggtggaacacttaccatgatggttgcattcattcttcatcaccatcatattttaatttaaagaaactaggtgaaatttgtggtatagtcctccacatgaaaatgtcgtggaaagctagatgtcgtctggaaaggatttctgaaagtctagcttgtccagttcgggaatggttcatctttatggaaagttagatgtcacccagaaaggcgttcccagaagtctaacttgtccatctggaaggagtcttcaggaacggctagtcttcctccgaaaaggagattcggatggctagttgttccctcttaaaatgaagttccggatagtcgactccaactgtcactttttctatcctagaagtcttttcagcgtatgctttggtttgtcttccgggaagcgtgcgtctcatttagaagccatttaacttaagttgacatggagatattgttacgagaagtttgctaagtttgttaagtcatagctaacttaaaaacttagcatttctagcaaccaactttgggatccatatcccttatctcaacttatcatttataaaagaggatcatttataaaggagggtcacagacgagttttgaggggtgatttcgaagagagtgattgagaggtagagagaggtaccaaaaaaaaaaaaaagagagagattgtgtttgagttttgtatgaagaatc

SEQ ID NO: 310044 - DNA, 801 bp, Cannabis indica
taaacaactgctaatttccaaattaactaagtgggctttacaaaaataatacctgtgtgttttggaatcccacccattgtaatctgtgatttttgaagatccatagtggaacgaggcgagctcgaagaggacgtaccagaccaacacaatattttagggaacctctataaaaatctggtgttttcttctccatttttctaaactgtattttcattgttgtgtttatttgattgctgtgtgtgtatatgacttctggattttaattcgatttgggaaggaactaatttttggggtttgtatctggttattgggggctgactttgtgttcttcagagaagaacaacgaaagagaaaaagggggctctgctagggtttgtgccgcgtgtgtatgtgaataataaaggatatataagtatcgaggttatctaggatttcttaggtgtgtgttaaacgacccgtagctcatcggaaaggggttgtcgtttgggttttcattccaggagtcaacagtgggtttgattggagtaaaaggtttaaattgatcttggtatattgattaatctattgctgtgtgtagggtaaattgggaataaaattcctacactaagcattgtcatagttttacttaagaaagacaacttcattagaggaattgatatttaaatagtatgaacgaaaaaaaaacctttatagtagatcattatttgtgaatatatgcttccaccacacgtgtcatggtcaatggccttgttcattagggcgaaagaaaaataattagaaatggcatatattttttttttt

SEQ ID NO: 310045 - DNA, 1961 bp, Cannabis indica
atatggtcctttccagttaggtcctagcacccccactctcggctcttgatatgccgaaaagacccttctcaagacgagatctatgacttcaaatcttcgggttttgactttcgaattgaagtgtcgggtgatttttccttgatacatcttgagttggatttgtgaattctcccaaacctcttcaatttgatctagtgattcttaaagtaaggcatggtttcaggtaggattgtaagtttctcgtcagtgagaaggtgtcgtattttcttttgggatgataacttcacaaccatagatcattgaatatggagtatgctcggtcaaaatcctatctgtagtccggtatacctaaataactcgaggaagttcatccaaccaatgagtcttacaggcttgcaacttcttctttaacatggtcttaaggattttgtttcctttcacttgtccatttgcctgtggtctggccacatctgagaagcttttgatgattccatgcttggcatagaaattaatgaagtgaacactgtcaaattgcttcccattgtcgtatgcaatcttgtgtggaagatcgtgacaaaataccatgttcttgacgatgaagtccaaagccttcttggaggtgacaatatgcattggttctgcctcgacctacttgataaagtaatcaatgacaacgataacatatttaactattccttcctagtaggaagagagcctacgaaatcgatcccctaaactacaaacaaccatggactattcatcatatttatttctattggcaaaactctcgggactttagcataaagttgacattgctcacacttccagagatagtcgatgcaatattttttcattgttggctaaaaatatccttgttgaatgatcttcttggatagactgggtctggatatgtgctcttaatagaagccttcgtgtatcttatggataacaacacttatttctatcctggctatgcactttagatatggtactgataacacccttcagtataatttttcatccagaattacatatctgggagcttggtgttggatttttaaggttgtactcttgttaggaggaaattctctagaacatagaaacttgtataaatggcctattcaagaggtggagtgatcaatggcgtttaccctcagtggttttgtgcttggaacagctaggtgggcaatgggaacaactcaatattgctaatctctggattagttgctaacttttccaacatatccgcaaagacattttggtcctgggggaccttcctcatggtgtatcatttaaagttttgaagtagctctctgaatctgaagacatatgcaaccaccttctcacatttagcttgatattttctgggtatctgattaaccaccaactgagaatcactatagacttcaatattttgaaccctaacttccttggccaaattgttggggaagtttttccatttttgaatagtaggtctttgtacctgagcaccaagcctatcattcctcataattttgcctcgtgaatcaataaggtagccttgccttggggcataggcaaccttctttttctacagaggttggttggatgggttcttattgttgcgtggagcatccagagcagtcttttttggagggtcacccataattccttttcctttatcctttgccgaagcgaaaggtctaacatttgtgggaatattatcttatggagttggctcttcagaagcgttttcctcaagagcctcttctttaggctcgatcctggcttgtagtcgcgccagtgttttttgcatttgacaggagaattcttcctgaggtaccaacttctttttggtatcggtgagttctcgagccatccaaatcactttaggatcttgctcataataatattctttgttgttttgttgtagtcattgttggaaattattttaccaggaacttagatctactcacaagtat

SEQ ID NO: 310046 - DNA, 1750 bp, Cannabis indica
tgcggtagttttcatgtgggttgttttatggattttagttgcaatttaagttgctttgttagttacttggatttcagtaaaaatacaaaaaaaaaaaatagttttaaaatatatatatatataaaaaaagacaatttatgtatatatagttatagttagggttagaattagggccgactattgttgttacattttatattttataataaattttttttgagtaattaaatttaatttttatacctgtgatataagaataaaattgtttaattttagggtttagggttacataaataaatttataaattatattatttagatatataattatttttatatgaaagtatatactttttttaattaaaatttatttataattaccgagacttaattttattataataaattaaagactatttttagtagagtattcttacatagataagtaggaattcaattggagtttcattatcaattgcattttctttacgtctctatttatttggatttatatatatacaaataactagattcatgtgaaaacttgtcacctaaaatattattctagtactgcacactattattacttattaaataatattttactatattgtgaggtttattggtggaataatattgtatttattattatagtgtgagttgggtaatagtatagtagtacttacttaaacatcactatcttaaataatccaaagccatttaaaatcattattatcacaattaaataaattgaaattgataggtttgaatggtctatatacattgcccccttgaagcctgatatcaccagaataatgttacaaaaaagtcattcaaatcaaactatatagaatgaaaaagaaataataagatgaagaagaagaagaagaaaatctcaattaatttgatcaactttatgaaagtcctccaaaaagaatggacattattgcataatagtgactcttcattactactattatacactttttttttaatttttaattttttcttttttttttgttagagtcacaaactacatatatacatgatataaatatatatatatatatttatattgagaatatatatgtagcttctaggaaagatcttttatcacttttataagttttctatttctataagaaatttataatttattctcatctgactatttttatataatattatttttgatttttcttctcattaattacctaaaaataattaatattaaaataaccttacaaaaataagggttaatattattttgaactctgtgttttgcaaaaattattgattggacatttaattttattaaatgacaaaatagacaatatattttctaaaatagtgcaaatatgacactcacttcaatttttgtcaatgttttttttaatatattcaacttgaagataatttttagtacgaacagatgtagaaaacgtgactagttttatcataatacctctatatatattgggttattatgaaatttaattttacaaaaaaaaaaaaatcaatttagggtactatttagtaacattttagaaaatacaaggttcaatttgacatttaacaaaataaaggatccaattagtaacttttgtaaaattcgggatccaaaatagtatttactcttataataaagtgcaaataggagtgtacagaaaatcatccaattcaattataattgatcgatcatgtctcaaccgacctaatagaatcggatatccaatcataattggatcgg

SEQ ID NO: 310047 - DNA, 814 bp, Cannabis indica
aagaacaagtacaaatataagaagataacaaactaattacagcccaattattttctattaatattcggcccaggcccaagcgcaagcccaaatatcttagggcagcagcagcatcttcttcacccgctacaagctacgcccctgtttcttcatcttcttctcttttatttttttttttgaatgcttggaagcaactgacgacatgatctccttcaattctgcctaggtctctcttcattttgatggttggaaataacactatatatgtatatatattacctttataacaatgagtaaggaaatatatatagatatatttctgcaattgataggagatataaggtcatcatctctactccgatggccttctccaattcggcgcgaccaagcctcccgtcgtccgccagcaaccactttgtccagccgatcatcgtcaaagtttgtttgtcctcctcaatcaaaaaaccaagttagcaaagagcccgactcgattgcaatctcgccggaggaaaggtcaatcatatgttgtttgtggttggaggacgaaaggccaaacaaaagcgcttgttggattgtcgttggaagcataatgccttcgacatccttgatcttctcagatctgcaaacatcgccaatttggattttcccttgatgtcgttgctcttgtaatggcgagacctgcaaattcatttgtcctggtaacctcagcattgaatcagattgagtctccactccactcaattgcatgtcactgatgtcgcccaattagttacactgcggtcgcagtagtaaacgggctatatgtcgtatccac

SEQ ID NO: 310048 - DNA, 616 bp, Cannabis indica
tttttaatgcaaacaatccctcaatcttacttcaaggattattcgtatattatgagtaatgctaactgtcttagggctagtttctacaataggaggttcaatcgtggacagaaaaacatcgtcgtaaggtcgtgtgtaagattttgatatggaagtagtgtgcaaaataacttctaataccatatgagaaacaaagaataaagcaagaagaaaaaatttctttattgtgcttgttctactaaagttattgtacagtgccatgaatatatagtcaaagagatagatcacggttggttagaaaaactaaccgtagttttaacaacctaagaatagtaacctaactaacttatccaagtataactaacttaaccgagattaagtctaataatagtcaaaggtgatgattcagagattgtgtaggtacgagactatacagttaaagatgacttaaatagattgattgatactacttatatcaacaaggtgcatcttattttctggtagaccgctatgaaaaaacctcacaattattttgtgagtgtaagtgtcaaatgaaaacttgaagcgagtcgttatggtctactatctttgttttcttgcttaatttttttttttt

SEQ ID NO: 310049 - DNA, 969 bp, Cannabis indica
tttggaaagtaagatttgtaataactgaagtaagagttttagttattttaatttttttttttcttggttaggaaggaatgataggcagataaggagacgtgcagagagtattatgcatctatcgccggcctttatggagaagagagagagagaaagaagaggtaagtaagtagttacgagagtataaaccctctgtttcctaattcttgacatgtattaatgttccggctgatgtggcataagaggattggctaatttatgttcagagaatgtagaaagtttcactttttggtaaagtgaaaaataattctttctactttaatttattttctctttattattttagtctcgagaaaagtcaaataattgtaatgaatagttgttacttgttaatactataatttttacttgatagtctgtatgatatgggggaatatgagttttatattcttaccaaagcacacagttttcttctggttttatggagaagtagggtatgttaagatatttattgaagcaaagaataatgatactataaaatattgtgtacataatataaatgagtaatatatgatttgtttttactattatcaaagcatctataataaaatactataaaaataatatatatctatatgtatttatatatatatatatatataaataagaagtacgatgggtgagactgtctaaaaataaaaatactttaacgtgatgttttttttttattattcttaattctctcaatatctacatattttaaagaagatattaacatcagtgtataatttttttttttcatgtatttagttacaatatatatatgtattttacccggtaaagattgcacttaaaatttttttttatcacatgattgtcattttttaaacacttatatacatttgatttattaaatttataaacacacaataacatattaaaaataatatcaaaactaaatatatatat

SEQ ID NO: 310050 - DNA, 1126 bp, Cannabis indica
aatatgtatgaaataaatttgtttttatttttgtgagagtatcttaaataaatttgtctggttaaaaggaatattaccatttagtatttttgtgtaaaaatatgcacatattattacgcaaagcagtttgattgtgtaatagtcatctggttgtctattcaaactctgttttgtaataggattttgtcccttgtttgatcactaataaaaatttatttattattgttagtaaatattatgtgacattatttaatacatatttgctcactgatgctaaaatttccagttatattaaaatattttatttgtagccactattatgttgcattattataataatataaggctgtaggtgacaagtatttcataatagaattttcttatttttgaaaaaggattactaaaatcgaagaagaacaaattatacaaactagaaaatgacagaacttgatgaggatatataattaatatatgtatataagacatgaacgtgatatagtttttaacttgtctggtcctatatcctatggtaacacatgtctatgttgcttaaaaaaatggatttattacaatcacagaaaaagtttaagtctttaagattaatggaatacgtaatatagaattacattttctcaaaaaaaaaatatatatatgaaaatagaatattcaccacctacggataacaaacttcaatagttgaagacttaaagtttatacatatataaatgtaatagttgaatatttacaaattacacgatgcattccttactttatttctataataatatgattactacgagaaaaattgagaataagaagtaacggattgtttttggttggggtagggacactagtttttgaaattattgctgaaattgaaaataacaataatttaaaataatgagggcccatgggctgatgattacatatgtaacgggccatgaccatacactgaaaatatggaattttatagggctattttaaaaagaggaaattacacttagtatgggattttaaaagttcttatgataaatatggcacatttaagtttggccaatttatatggtatttttttgttttaggtttttgtatggtattttgatatgccatatatatgtaattaggt

SEQ ID NO: 310051 - DNA, 3010 bp, Cannabis indica
gccatggaggcatcacgggcggccagaccctaccaggtcaggcacggaggaataccgggcagctagaccctgcttaatgcaagtctggccgtccaagcacagcaaccaagcataagcctggctggcctaggccaactcccgtacttgggaatggccgactagggtctataggcatggctgatccttagcatacactctcccagagtatggctagcctacccctgtctctttattagcagcctccctaaggaagaccagtcaatgaagtcctcatagcaacagatccttttatccaagcacagttggaccaactcaaggacatgatccagggcataggaggcttgaagccttcagacctcaaacttgatttgtcgaggggatcacaattctcggtatatataaatgccctacctcaactgaagtttaagatgccagtatggaagatgtatactagagaggaccctgcacatcaaatacttcaagatgaaactcaacctttagaaggtcactagtgatatgggttgtcgtatattcccagctacattgttggagacggcccaacaatggtactttaagctcacctcgaggagattcaactcctaggttgagttctcacgagaattctaaacacaattctggtccttaagacttgtactatcgcagctggaagatcttgtcgaagtcaaatagcgacaaggggaacctttgaaagactatattcagagatttatggccgaggctaccaaagtcaaaaggcttactaaagaaggccgatatacagccacactagggggcatactcccattgagcaacttttggaaggatatcagggggcataccctgggcagttgttcatggtcgaaaagctctatgctgggcagtctcttaccgctcattctcccttgattggctagtgaagcatgtgtgttgatagggggttgatcacaccaattactcgggtttggatctaactatttgaagtgattgttcaatggtggaacaaaatcacttcgattcttactccttgagttggtgttgtcttgggtgtttccatccactcatagtcctagtcaattaaagataggccttaaaatgacttgctcctaaatgttttaaagaggaatctcgctctgtaggccagccaaaggtgcaccactaagggactggtaggccaggggttggccaagtgtgggtgttagtaagctagagatacatggctggccccccatgccattgggtgtcagagtctggctgctcctgccactagatctatgagacaggacttgtctgccttccggcaggggaagtctatccttgttccagaagaacttagttggactgtttgcctatagaccctgctcgatctgttgactagtctctcttggagagaatctcaaatcagatcatgacctctcccgatagttctctcattgaactaccttatcaagtcactatcttccttattacagtggtccaactttgccttatgagatcaaaggatgtacccctagtcatccatccaactcagaaatttgcgtctctattgagtaaacacatcgtaaccaatagtgcatggttcttcagtttggctgacttggcatacaaccactctaagtctggccaattcaaagtcttctcctaagtccacgtgaggctcaccaattattggtttaacaatcctggccctattccatagtataatactggggaccagagttagtcgtggtgcgcaggggttgctccacattgacaaaaccctctattcgaggtgtcaatggcagatctaccctagccggcagaggttggtaattgggatcagctgagttagtagggttgacctaagcagttgcgttggtcgggtttgttaggcctaccaggttggcaagattggtaggatttgccacatccattgggttcatggaaattcgagtggcagctggaacataaacaataggatcagtagtcatggggtcttgaggaagacctcatgtagcacaagtcgtagccataattctccttattacagtcatggtgattgatcagatcaatagacaacgctctcaatgaaagcacaaaaatattgacctcaaatttggccattagacagcaaagtgttaattatgatcagaatcaccatgtgtaaacaattaaaataagtaaataaatggacacaatacttttatagaggttcagctcccttagttagcgggtaatgacctactccccttttagttgtattgatatgagagataataccactaaaatcacaagtgttatgagttctagagtggctctctatgtattacaatggtgaaaatgcaagacatatatatggtaatgagatgagggagacttagtccatattacactataagtggcatgtaggagagagggtgagctagggttttgagtgcatgaactcaagatcttaggaatcaaaacttagcagatttaggatttaacctagtgctccttctataggagagagcgcacataagatagtaggttgatatcccttaaaatgaggagatatcacctatttgttacacattaaataaataagaaaataacttattaattagtcgtaaggaataggcaaataactgaagtttaacccctatttttgtgggttgttgaaggtaattcgtaactgaaaatgtctgtccaggttgaaagctacagaggcattaaaagttcctaccaaaggagaagctggtcggcctaccccttgttagaggctggctggcctatgttgcactagggccgactaggggtggcctagacggaccccctacttggccagtttgttgtctctttctcctacttaagaatttagatccttcatcaacttgtacgttgtgcatgttgacttggtcctcttactaacaagctatactccacgtggcataaatcttgcctatgtcgacatgccacatcacgtggtaaaaaaattgggataacaaattgttggatgttattttaccaggaacttagatctactcacaagtat

SEQ ID NO: 310052 - DNA, 1393 bp, Cannabis indica
gggaccttgatagggtccatttcgactaccggcggcggaggctgttgcaccggcctgggcacaagagagcgggacgggagagaagagagaggtttttgaggttgctaccaaacctttttttttccttatttgtttatttatttatttattttggaaacttacaaaaatactataattttgtttaacttttacaaaaataccctcatacggaaatatattcaaaaatactgtatttttgtaacacaccactaaaaacaaattagaacaattcaaaacaatagtagaacaactaaaatacactaatagaacaccagtaaaaacttaacacagtatattgcagtatgaaacttataaaaaaaacagtaaaaaagtaaaaaataccgcttgacaatatttttataaaaaaaatgacaaaagttagtatatcttgtaaatttccctttattttggcaaattagtctttaattttgtcaaaaatatatataatatattttttgtacttaactaatattttctaatttaatattaataattttcgaaaaaaatttatgtaatttttattttcataaaataaattttatttacgctaattagagtatattttttttttcgaactttgacgtgtattaaatcatatctcggaatttttaaggttgttaaaattttttcatgaactattaagattgttagatttaaaaacttatgtctaattttagtaaggaaagtataatatgaatgaaagctcaagaggcatgatttagtatatgtttaagttcaatgggcatgatttgatagctatcaaaatctgaggaacatgatttagtacatggacaatcactggattagtaaaattgaaagaaaattgacaaaaatccttaaatctaacaatctcaatagtttatgaaaaaaaaatttaacgactagaaaagttcaggagacataatttggtacatatcaaagtttacggaacgaaaattctaattagctttttatttatatgtatttatctcttttattttctctttagaaaaaaattgcaaattacataactgtctctagcggagaggaaaatatacttccatcaaatatcaatcgtatttatcataacaacaaacattgcacaaataagctctaatagaagaatgaagagtaatttgagctcaaacttccttaactttaaagtttggcacgatcaatcactaaattgaaataattagggttgaatttcccgatttacatcttttgtccattttagtccttaaagtgtcaaagttaactgtcacgatatacacaagcatacacgtggtaaaatttcattggtccacataatattaataatttaaatattaaaaattaaaaaaaaaaaaataactatttaaaataattttttttt

SEQ ID NO: 310053 - DNA, 823 bp, Cannabis indica
tgttgtttatctttaatgtaattatgttgttttgtagttaatataaattatatattattttggttataatataattaattaagtttttttaaaaaatgtttaccagcgcattgctgcgctaggaaaaagtggctcaaaaaggttcgcgccaatcgtggggattggcgcgaatagttttgccggcgcatctatagcgccggtaaaaattttggcgccaatcctcagattggcacgaacctttttgccggcgtaatattacgccgacaaacgcttatcaaagcaggttcatagcgaataagggtatcctttaacaccgacatttcacctttgccgacactatttctcatcggtaaaacttttttaccggcgcatttcgtctacgcgccggtaaaaagttctttaccgaccaagattctcaaacatgttttgctggcgcagtattacgtcggcaaagcttttgcgccgccttgagtgtacttttgtcggcgcagtttagtgggttttcttgtagtgaaaaataataaaaattgcgtaattcatatatagcgtaaataatacttctagagtttaataaaatttccagaatcgagaaattataactctagcgctcattccaaataatgggactcacaacataataaaatcattaataactataaaaatatcaataattaatgctaattgcctttactaatctgtattctaaaatgcggtaattacaaatttagtatagcattccatcctcaaacaaatggacagtctgaaaagaccatttagattttaaaagacatgttacgggcatgtgtgttagactttgaaggat

SEQ ID NO: 310054 - DNA, 1773 bp, Cannabis indica
tttttttttctaaaagtaaataaataaaatagtccagtccattcttaaaccaaacacaggattactttcagcataatccaatcttgtccagtccagtccaatccttttcagtccaatccagtccaatcctgcgtaccaaacgggcccataaggttatgttagaaaggatcatatttcattaagataaattaacaattacataaaaacttaaaaattatagacaaacattcttctaaatacacactcctacactaatagtagcagaagtagctagagtatgaaaaatatcattcatagaatgtgaaatagcattacaagaacattcactgataattttcatgatatttaaatgggaattattaatccacccaaccacaattgttgaatcacattcaataatggagatggaggatccaaaaagaaaacttaagtcccaaacagtctgtcaatagctccaccacacttacaccaaaatcccccactgctccaacagcctatcaagcccaaacgacactcgcaccatcatgaactacacctcccaatctcacaaacccacatcctggcaccactgaagcatttgtggataacgaaagctcacacacacgcgggccagggcaggagctcaataaaaacctagatcatgccggccagtgtcgccctgttgggccggggcaccaaccggacccgcgaaaatgccctaaattaccattcctaagttcaaaggactagtgatgctatagaaaagatcaaggctcaattgcttcctacgagttttaccaatgaaaggggtgaggcacttcggaaagaagggcaagttgagccctatgtttacatggacttttgagattctcgagaaggttggacaagtgtcttactgtgtagctttacctccaacattgtcagcaatacataatgtctctcatatatcaatgatgaggaagtacgtgtcaaatccaactcatgtttcaacctatgaagcttaggagttgcagctagatttcttctatgaggaacaaccaattcagatccttgatatgaaggataaagtcctttgaaacaagaccataacattgttcaaagtactctggaggaacaacaaggtggaggaagccacctgagagctagaattcgacatgaggactcagtatccaaagttattcaggttagattttgagaataaaatccttttaaggggggataattgtaattattgcatatttagacataaaactagcaacttattagtaatttaagtaattagtgttttatgatcatatgtgctttagtagaaaataagacatactgtcagaaataggcattagagaaataatttctcaattacggaaattttattaaattttaggtgtggcgtgcatgttatttatgaattttgttatttgttgttttatgcccattaatagtggaattcaacaatttggtcattaaagttacttagatacggttgagtatcttagaattagcgagataagatttttggaattttagaatatcggaattaaatactgtccttaattaatggaataatactcaaaatactgtccttggctcattatgtactgattttcaagttcatgatggtgcggagcattggtcccctccacttgttaacagaattaaggttaatgtagacgcagccttgtttgatgacgatcgctcttttggtacgagtatggtggcaagagacggtaaaggttggttgattgagggccgaaccatctttaatttgggaacggttgaaccaatcttggctga

SEQ ID NO: 310055 - DNA, 2399 bp, Cannabis indica
tattttaattattaaaaaaaattcctgaactattaatatttttagatttaaaaatatttttctaatttcattcgattttactaattctgtgattgtccatatactaaaccatgctcctaaactttgatatttaccaaatcatgtccctcgaactttgacatgtaccaaatcaagcccgtgaacttttatatatgttagactgttctaactaaaattgaaaaaaaaaattcctaaaatattcaacaatctcaataattcagtagagatattttacgaccttaaaagtttaaggatatgatttaatttgttaaagtttaggggtgaaaatctcaattatcttaaaaaagaaaaaatcaaaatcaaatgtttgacttgttatctataattaccatagtttgaggggtttattgtggtgaggtagtttgaggaaactttaactacatttttttttttttttggacttgtttgaaaaaaaatttattaaagaaaacgtgaaaaactttactataaattattttgatttttttttaaattttatataatgtgtcaaataactatattctgtattattatatatataaaattaagaataaaattattgaaggttagaaataatagaaaaagatgtatcgatcctattttttttttttactaaaaattaacaatatttctcaattatttcaattttaatttaataaatagtataaaaaattgctaataactcatatcgcatcagtatggtgttgggcaccttaaggtgcctaatagcaatgctcaatgctaaaagatatcaatagtgtctagcacccttctcgatgtcatattgctattggtgcaataaaatatgaggtcctatatagcttaaaataacaacttttagggaataacaacgcctaatgataacaacgcttcaatcaagtatcaggcttttaggaaatttcgttaaccaatcgtagagcgctagctctaacatcattggtgcccaataacaatgctctaacaaaattatttaaggaaaactttcaaatataccattgttttatttacaattttacaatctaaatttttattataaaaatacgattgtaaagttttaaaattacataaatatattttttcagtgaaaaagtaagaaaacaacgagaaatcaaccttacgacaactataaataaactataaaacaataaaaaataatctcatgacaaatataatacaactataaaattaaaaaaatgatttattattttactaaagagatattttcgtaataaaaaagttcaaagagtaaatatatatatattttcatattgacgtatttttatagttttatttaatattttaatctatattatgtaaatttttcattatttaatatatatatttttaaaaaatgtaatagaaatggtaaaggcaccagtggtgtctaacccccctattacatgtcaatattgttattggtgcaattatgtattaggtccatataatttagagcattaccatgggataccaaggtgtctagcattcatatgacatgacgtcttataattgattagcgatttctataattttcattaaattaaaataagtaagacctcaatattgtgcatcaataactatattaaacctcataaggatactagacactgtgagtgctatttaacatttctctatagtttaatgtaataattttttaagaagtatcgctaaccaatcgcaattcaacacgtttaaaatgtacaagacaccactaatactctttttacaatattcgttcgagtaatttgtggcataaatatctaagtttaacttctgattgtaaataaatacctaaatttactttttggtggtaataatatctaagttataattctaaaacttctataagtacctgactattaagtattaagtaaatcgccacgtgacaataattgattagtctgtatacttaaatttttatttttttttaaaaaaaatagtttaaatgtactaataaaaaataacacatgaataataacttgacatttaatgaccagattcctacaaaatttcagaaatataatttaagtattattaccgctaaaaattaaacttatgtatttatttacaactcatatataactttagatatttatgtcgcaaattattttatgtattactattgcaattaattagctatatccccttgatgcgctgacagttaaaacttatggtcagcccgacctgtttttggctaaagctatggcgttgaaggaggcgctcagttgggtgaagagaaggtgggttgaggggggtgtgcctgctggtgtggttatggaggtggactcgctgctggtggtgcgagccgcgcaacagaagaagcgtttgttgtctccggtggggcttttaatttcggattgtgt

SEQ ID NO: 310056 - DNA, 1677 bp, Cannabis indica
cttgtttatttaacttgaatttataatctttcctgagggtatttataaatattgattcgacattaccggtcgacaatgtcgatgctgaccccttttttgggtttagttttccacagtaatttcatggtgatgataaacgctcatatgatttagtttttcaagtatgattagtttaaaagcaaaataatgaaaactatatcgattatgtctggttctttgttgaaatttttattaccatttttatgtcatcttttatttcttgattattttaagtgtttcttttcatttttggaatatatacaaaagttgtttttgtaacatgttaatctgttccagcgctgtaaaatgaattacatagattacaattcttatttatatataatgttgtaaataggggtgtaaatgtttaattggaacttgtctaattaaaaattagaaaaagttcaaccagtgattttgttagtttggatgggttaacttgtttaaactaattttcacaatttttttttatataattattattgttagtttttagtattcaaataattagatttaaaaagataaaaatatattatttaaatttcatgttaaaaaatgttataatgtaaattaattttaagaattttaatataaaataaatataattgagtaaatataaaataattaaaaaaataataacaaaaagtaataagatgaatgaagattttaaatttcaatttcaatattcaaatataataaaatttattaactataaagtgtaaattttaagttaaatattaaaatgtataaactttaaatacaaaatagtttaactaataaatataatttatgtagtatattatatacacttttattaaaaaatatataaatcggtttaatttggtttattcgggttaattgtacagtttagaataatttgtaaatcacccaatatattcattggcggtttggattttcattgtattatttctagttgtattttttgtcggtttaactctcagattgatagcttcgcgtattgctcatgctttcttgatcagcataacggcgatgcctactaccttctcgcgtttgcctgcctgatcgattgtatcctcgagacctagagtgtcccaaactagagcttgcctcatcttgtaccaaccttctccttcgcaagaggttagatacacgtcctctatttaggtacgtgtatacagcttccctctcggatcgagaaggacgttgggggtgtctcagtggtagcctacttgtcctaggttgagtcccaagatttctcttgttattacgaggtatttcctattccctagcttggggctgccttgtgtcctcattcctacgagaagcctctggtacatcatttcgtttattctcctgattcataaatccttgggatctttgaggaacttctcgacattgttcttggttattttgttattcatccactgggacatccctagtacccccaagttgatcctcctgggtgttttgcagatttcctagatttgcttcctgtctcttggtttttgaaccttgagctctgcctcgtggtcttcttaccccagggaggttgattctgagtattagttccttgagtcgccctagccgctgcaacctgtaacgtccccacttcaagcctccattgggcccgtacacccacggaatgaatggctctta

SEQ ID NO: 310057 - DNA, 1203 bp, Cannabis indica
ttcaataccagtatcatgattaatgaacatgagtcaaaagtgtatgaaagtgccagttccttgtcttagcaacattttctcacttctaattgagtttgttgcaagacttcaaaatcttgtggatgaatttgaagagcttagtgagaaagctaactttaaggatcccttgaacaatcagatccaaagaggtttctgggtttggactagacttttagggcgcctgccattcatgaatcgaaaaccggattcagctttctcaacaacttcagtttgattctatgtttggacattcataaacagttagtaaagttgatatactagcttgctgtttggttatttttgtattaaagtagatgtatagaagtaactcaaggatgagcctagccattggagaggatgtggggatctttcttcatttttttctaatcttatgattatgtggaaatccaagagcctccagaggcataactattttaaatgccaagatggtggaataaatctcatatggagtaaatgagactgcaatggacccaagaggataatctttctaggggatttcatttacaacattgtttgaattttgttttgttttgttttttttttttttttttggatatgttgagtgaagacatagttcagagtaaaaagccaagcagaaaaagtgtaaatgtctttgatatatctcctttatttttccaacaatttaataagcttaaagttttggtgataaacttgattgggtggcatacatgtcactcttatgtttggcaaacttcccctgccctttaaagatcatacttgtatttttagtggttatatttcaaggacttgtattgatccacttcgatttccaaaaataagaatgaggaacaaaaaaaaaaggaaaagatacatatgagatcaaatcccttcccccaactcaagacacactcctcccattgtcagcaatggtttaaactcccctcaattttgattttcttttctatttttttttttttaaaaaaaacaaacacattacatttaatgattgtttagtatttttattaagaaaaatctctataattaagaaaaataataagtgcttttctcaatatccatgcctccctttttccgtaaaatataggttaaatttatagtacacttcctaaaatacatgtaattgagatttatatatctgagaagactataaattaccttattaaa

SEQ ID NO: 310058 - DNA, 1158 bp, Cannabis indica
attttagcataatactctttcccattcttgaacttaagaagatcatttataatctcctgctttttcttgggttccatagccagagtatcaaaactagccggatgctcaaaaaggacatgactccacttagtccgattcccaccataaaagctctcaccagacccatttgtgtaaagctttcgttgccgattcttaaaggcgattcctttaccttcttcgagtacgtgagcaagaaaagattcagtgatgagttgtctatgggttctgtgaaaagttagcttgaaatacctcttctcatcagaattaggatagaatggattagaagaaccttgtgggattttcttggaagaagtccaccatagtttaataccttgaaattcttcagttacttcttcattgtcgtccaagcttagaaccaaggatttgttatctttgatatcgttagcccttaatcgtttagctcgagaagaagaattagcactgagatagttttggatagctgtgtagacctcactgcgtttgaaacggtcaccagtatattcatggaaagtgatttggatatatgggtaaacgaaacccacgattttgttggtatgcttttcaagatgacgacgaagattgtacggaaagtattgttgaattattgcataaacaaacattatgcttgccattactgagcccacttgtgaccatatttctcccatgaacaccatttttttcttttcttctttttcactaaagaagatctttttttttttcttggtgagaaagattatatttttagtctcgtgtattggatattgagattcctctcctatttctctattgctaacatttacaacaatttatgatagtgaggaccacagagttcgtgtcagttttacaatctcaaacttaagcaagaagttaaggctgcttgttagtcaaaccattatttcttattacaatctcaatctcttagtcaacgtatatgttactattttcttaaattttttagaaaaattaaaataatttataatgtcaaaaataaatttgaagttggttcaacatacggaatattaacagtttttgatatggtaaattattcagatttttttaaaaatttaaaagaataatattataactataataaataacaccataaaaaattaaaaaaaa

SEQ ID NO: 310059 - DNA, 660 bp, Cannabis indica
tatagaaaatcaaatttctctatatatataatacaaacacacagacctatatcatcatttattactccatatatatacatacaaatacaacatatatatctatccactctcgagtttgtaatactgcagtaactttatttaataaaatttattaggtagtacagtacatttcttgaagaaataatgtttcggtagatcttttatctgtttcagcatttagagaactttttatcacaatatttttttttttctataatcgtgtattttatatttattaaggattagtatttataaatttttagaaaattctaaatactttatagtgccgataataaagtttatcaacattataaactatatatgcatggaaaaatatatattaattgtacatgaactttattttcaacacagtaactattaagatttttctaaaaatttataggtggttctaaatagttataatgtatgtaattctgaatgtcaaacagatagagaacattcctttatttttaaaaaataaaaataaatagacatatcaggcaataattcattacatgatcactcaaataggagaatcatgttgttacaacaaagactttttataaaaatactagattttggataaaaatttataattttacaatcacatagaattttttt

SEQ ID NO: 310060 - DNA, 2397 bp, Cannabis indica
aaaatgacaaaaaactgttttctattctcatttttaaaaactcaattttgaaaactgaaaactgagaaacacagccaaacaagcttatttttctgaatatctcaaaattttacagaatatcttcaataactatattgtgtacgaccataaaaaaaatctagagtaagaaaatctctaagatacatcatgcttcattattaatattgaattaatttggtatgtgacacacacagagaaaaattcgacacaatttccagaagggaaaacaacgttatcaatcatcaacaagtctgaagcaccaatagaagaaaacaaattgaaagtgatgttggagttgacagggtcaggacttggtaacaacagatctggagttgatcttgtaacagttttagatgtgagtgggtcaatgggtactggtgagaagttagcaaaaatgaaaatggcaatgcaatttgtgattaagaaacttagttcaattgatcgattgtcagttgttactttcaatggtaattcgatgagattatgcccattgcgtcagattactgaaaatgctcaatctgagattgagaatttagtgacagctttaattgcggaaggtaccactaatattgggctggccttgaaactgggttgaaagttgttaatgatcgaacactcagtaaaggtcgtgtggttggtatcatgcttatgtctgatggtctgcaaaatggccctcgtgatgctaccaaagttcagattgggaatgtgcctgtttacacatttggttttggggcagaccatgatccaacagtaagttcatttatatatatatatctatggtaacattaaacttttatttatcaacagtgttatttggcacatggttcaacatttagaacacccacaatagcttcttagcttctttcttaaaaaaaaaaaggctaattaggattttaaagaagttaggagtttatactagttcaaaatcaaagatgaatgtgatctttgtctccccagtatatattttaccttataaatatttgtgataattttggttatataggtgctgaagattgtggcagacaacagtgcaggaggaacattctcagcagttcaaaatgaagacaacttgagcattgcattttctcagtgtttggctggtcttctaactgtggttgttcaagacttaaagctaactctcacagaattcgaaacagaatcgagcattgagaatgtttctgctggaaactaccctcaatcgaaggacatcgacgccggctctgttaccatttcatttggtgatctttatgacaaagagatacgtaaggtcttagtacaccttcttcttccttctattcctaagccaaggggtgcaattgttctaaaaattgattacaattataggtaatttattattacttaattaataatatttcacttattgttatattcttaaccactttaggatattgtcaattttatttaaatttacattattttaaacataaaaactaatttgtttttatgaaattggtacttgataggggctgactttgttttaaataagtacatactttatgttattatatatgttaaattaaaatatgtgagactcgacgataatacttgtacatattctatttttatatgtgtagcactggagggatattatttagggtaaatcctgaacgcgttatcatagagcgaaaggaaacactggtagaagaggcagagaaggaagatgtgacgatggaagataaccgtctttttgttgcaaagacaatgaaagaagcgagatctatggctaacgataaacgacttgaggaggcacgagacaagattgttgatgcccaaaacatgttggaggacggcgttgcttttgttgatgagtcaagccctaattattcgatggttgagatgttgagattcgagttacaacaactattgaggttgatgaaatcagaagacatatacgaaaaacaagggcgtcctttcttactatcttccgagacatctcatgatcgccagcgttttgcttcaagaggaaacgttgataggatgcgtttatttgctacacctcgtatgaactcttaccttgagcaagccaaggctttcgatgaggatccaactaagccattgcccaatgcagatgatgatttgaaggaagaacttgaggctgatccacttggtcctattgttggagctcttagctactatattcaatcagccattcagtcacttcaagctattgacaacataatcaaaaatggtcgttaatttattattaagtaattaattattataatatcgtttaatttgcttttgcttaattcaagtttatgtgttaaataaacaatgtatggtttgtgggtattaactaactgttttgttttagtttattgtttttctatttcagtt

SEQ ID NO: 310061 - DNA, 1543 bp, Cannabis indica
tggtgcccgatgttgggtgggagaagttgctgagtcagagatgggacagaggcgttgttgtggaagaaacctccaagtttcttgagcttcttcctcaggtaaatatcttcgtttgattaaacatgtcaaagatttgtgaccactagaaagattgttaaaatttcagcactattttactcaattgctcattgcattgtagcaacataaattgaatttcagcaatattttcttcttatatgaaatattggcaaaacaacttctgcaaggaagaaatctaagaagacttgaaatgaaatatgagatttttgttgtaatggtttgattgttttttttttatttggaactatttcttgtttgcaagttatattttttcaattcaaaagaggccaaaacaaggtcaggaatttttgtaaaagaaagcacattttgattatcaatttctacaattatttacacctagttaaaaaggtttacaaaaaaaggttagcttttatgtagagaaggttaaagcattcaaataaattgttgttctattagagcgtttaaagagaggaggggtaagttaagagattcattttgtttctataccttatcactctatagtagtttactttggaaatttggccctggcatgctgttaatccaattgatagtgttatttttttgattttgattagatgtaaagataatccatagtagttggatagcttttgacgttttaccaaaaacttcctgccaataatgcttgtttgtggtgattgtgacaatgatgccgaactgttgagaattcgtcaagtttatggagtaatggtctgtagacatacaatctcatgtttcctgagttcattattagtttttgtcatagttctaaattgaattattacgattcaaagctttcttatttcttgggcatgtaggtcagtaatgcacaagaagaactgttagagtgtattcggaaaataagaacaaagaactcttttccatttacttttcgaatctctttgatttgccatttagtataggtcacacatttctagcctatagtctttcatgatgtttcaatcatttgagataaatgtatgttgaatacagtaattgctgtaaagttttgttaagggatgatcacaaaggaatatagaaagcaaaaataaaagatataaagcttaggagaatccacgaataagttgaaaatcttattattttgttatagaacatgaaaaatttcaggaaattttaaatcctagtgttattactttaccttaacaaatatttttactttatctgaaaactgatagtgatcattcacatgttaatgataactctatttactctactacagtaagatataactcctcttggtatttcactttggatgtgtggattcaagcgttttttactttatttttaattgctggttacttcttctgttaatgattacatatttacatggtttataagttatgttagatttttggaaccagatggatggtttacttgctattgatctagtatatttgtccacctttctacatttaaatctgtt

SEQ ID NO: 310062 - DNA, 1146 bp, Cannabis indica
attagtttagctacaatttaccccatgtgaaggggttttttttttgttggggtaggtagctttaactgacacttaatcaatatcaagaataaaatagttgcttttgtacatgttattggtgtttgtgagtttgtgattctcttaagctaaagctactacccaattgatttctacacttcacttagaatgtacactttaaacaacttgcagttttttagtttcgcggtgcgggcgcggtttgggaaattaaaattaaaaaaaccgcatgtgcgggttggtttaaaaaaataattaaaaaccgcaccacccgtaccgcgaacacccctaaatgtgattattagtttttcttacatatattgtgtgatttgttcttatttgttttacttacatattttagactggccatcttaaatgtgatttatgatcttaatatgaaatctgagaagttaatattagaaatgctctaataggacaaacataaattttgatgtaatacgggagtatttatatagcttatgtgatttttagattctgaatttaatgcaagttatatgttaatttacttcagagatacaagtatataatatatgatttaggaccttaatgatctaagaagagttaggattaatttgataatttatcatcaccaaaaagtagagaattaataattaactttaacaaatagaaaactgaactaacatgattcatattcctaaacattcatccataattagttacactttttattgttattttcctacttttcaatttttagttatataattattcaaccttattatcgattttatcaaataaaaatacaaatctaatttaatggcattcaatattaattccatgtggatctacctcacatgtgtgagtataaaactgcaatagattacgtatacttatgtagtttacaatttgcgtaataaatgcttatgttgttgccagtactcagcttcaacagtttgcatattagatactcacagtgtttttacacacacaaatgacaaaacagaaaacaccatacctgtaagtgattttcttgtgtctatatttaacaattgtgttctaatgcacaatagcagtgtaaaaatataaattgacataaaaaataattattattaatgataattaataaat

SEQ ID NO: 310063 - DNA, 1737 bp, Cannabis indica
atatgctcataaaatcgcaacatacgggagaccatgtcgcccacttagattccatgtttaaaatcttgtgccattacaagatgcgacttaatccattaaagtgcgtctttggcgtaggatcaggaaaatttcttggttttatggtaaactagcgaggaatcaaggcaaacccagcaaaaataaaatccttggtagagatgcgatctcctacctagcccaagaagtttaaagccttataggtaaagttgcagctttaaatcgctttgtatcacgatatttcaataaatgtaaagaattttttcaaatattgaaaggcaagaaaaagttttaatggactaacaaatgcgaagaagcatgtattaaaaatgcacttggggcaacctccaatactttccaagcctttcctcaagaagtattgtcaatctatctagcaatgtctgaatatgagattagcttggtgctaatctacgaagaacaaggtagataacacccaatatattatgtaagcaaacacttacttgatgttaagacccgttacccacaaatggagtgacttgcatttacattagtggtggattctcataaattgcgatcctattttcaagcacacaccattaaagtattaacaaattatccactatgccaagtattggccaaggctaacacatcaggacgactacttaaatggtggattgagttaagcctgttcaacataagatacaaactgcgatcagccatcaaaggccaagcccttgctaatttcattcttgatcaaatgaacaagtagctctcatcattgaagagcgagttgatccggaggtaccacaagacgtaggttggaccatgtacgtagacatgacatcaaacagtgaaggttgaggtggtggaatcatgttgatcattcccaataaattcaaggtccacacagctctaaggtttgaattcagagcctccaacaatgagaccgagtacgaagccctaatttttgggttaaactcgcactcaaagtgaaatttgagtatcttgaagcctttaacaattctcaaatagtagtttgtcaagttaatggcgaatatctggcccgaggaggacgattggccaaatacctctcttacacttgtgagtggttgtctaaattttaaaaagttattgttagtaggataccttgtgcttataactctcatgcaaatgccttggctcgactggcctcaacgagagaagtagaattacttgatgtaattccttggacatattagcccaaacaacaattgatcgcaaagaagttatgcaaattgatgttatagagcaaatcacttggatgaccccaatcactacttacttaaaaataggtaaactccttgatgataagatcgaagccaaaagattgtgttatcgagccgctcaatatgtaatctacgacgataagctatatcgcagaagtttcagtcagcctcttctcaggtgtatcgatggagaggaatgtgattatatcttccgagaggtacatgaaggcatatgcggtaaccatatcggcagaaattccttggccctaaaaatcatgcgacaaggttattattggaaaactttatgagtagatgggattaattttgccaaaaggtgcaacaaatgccaacatattgccacatatgtgaatagacccccaagccatttaaattctatcaccagaccgtggtcgttcgcggtctggggcatagatttaattggcgagttaccaaa

SEQ ID NO: 310064 - DNA, 2434 bp, Cannabis indica
taaacctagaaaatagatagataatataactattcatgcgagcaaattaaaaatatacaaagtgataaaatccttaaagtatatttaagtttgcttaaggcagattataactgcaattgcgaggcagaattgacaactgctcgaaaatatgcgttgacaacgtaggtattacaaacaccccaaaatggtccactgttttcccaaaacagtcaactattttttttggattcagccctggataaacggtaagctatttttcctacagaaacaacctaacttggatttcacaaaacaaatccaaccaaaactcctccaaatcctgccaaacttttcagaataatttaaataacataattaagcataacccacaacttaattaccccaaaaatataaaaattaaaagtcaccatgagagctcaagcttgagctccatgaactcaaacttgaatccctaactaacaacagctacacaagcctacaaagaatacaaaaacatgatccaacattaactcaactctatagcaccaattaataaaacctaatccaaagacctatattttccttcaaaattataaagagaaaaatatggagctcatttaccttagcttatcctcaagagttctatctttggacaaggattcattgactaaaatgagataaaatttggatggaaatttttggttttcagcttaggtttctaagtgcttttcaagagagaaagaaaaggagaagaaaagttgataatgatgaagtcatcttgatttaatcctctaataacaatttaattaaaataaaagaaacaaacactatatatcaacttaatttagcctatagttacttaaatttactaagattaaattaaaaaaaccttagtgaaaggaacattctaccctttccttggttactaaaccaattctaagtttaagaattaattggtcataactaattaccctgaataaaacaataccaactttactcctcagtgtaactaacactaaacctattatcatcgtaacatccttgacaaatcaatcaagtttccatagtcgtcgaacctaaaaatattttattttaaaaatgatatatataatacctatatatcaataaaattttcgtaattaataaattacgcttattaactcattttattataatctcaaacttcacgtaattaactttataaaatcataattttatccattatgccctaagtattccatttattttctatatttaataaaatattcaatatttaacgtaatttcatttttgaaatattataatatcccctccttgtagaaattttatgcgaaaaatttacctgaataactcaagatactgcttacgcatctacgactctaatttataagttgcttcttcaaccttgtcgttcctccacaacactttcactaggagaatggtcctgtttcgaattacttattcctttctatctaaaatctagacaagttgttccttatacgacaaatccgtctgaagctcgatatcatcataactaagaatattggtcaaatcacacatatttcctaagcattgacgtatgaaacacattgtgaactccagacaatgcaggggtaaagctagccgataggctacttgacctaccctctcttagatctcgaatggaccaataaatctagggcttaacttcgctttctttcaaaatctctaaattcccttcatagacaaaatcccaagaaagataaagttcccaacttgaaacttaacatccctacgctttggatcagtgtagcttttctatctactttgtgaggcaagcatacgagcttgaatcttttctatggccttactagttttctggaccgctttgggctcaagatacatcctttcacctgtttcatcccagtgaataagtgaacaaaacttcctctcctacaacatttcatatggtgtcataccgatagtaatttgataactattgtatgaaagttctatttgaaggaggtacttattccatgaactttcaaaggccaacacacatgcttgcagtatatcctccagtatttaattagttctctcagactgtccatcaatctgaggatgaaaattcgtactaaactttagtttagttcccaaagctcattataaatcttcccaaaaacttagacgtaagctttggatcttgatttgagataatcgactttggagcaccataaagtcgaagtatctctttaatatataattcatcatattaaactgttgcatatgtagtccacaatggcaaaaagtcttataactttatatatcggtccattatcacctagatagaatcatagaactctattgtccttggtaatctaagtacaaaatacatagttacacctgttgggttttatgccctaaataaaactccatttcaatgtaatttattttatttaacatcaataaagaaaca

SEQ ID NO: 310065 - DNA, 1825 bp, Cannabis indica
aatttttcaaattaaactaggcgatctttacagttagcgccaagaatgttgagtgattgtcagggatgccttccaaaatatccatcaagacctctaggttcttcatgatagagggcatgccacctaatgttatcttcgagttcaggttctcaggtaaacttgtgtttcattttctttatttttgccacacgttgttctacttgccgcaaacttatgcttgattctttatttcactgaccaagagtgttcccaatctcagcgttgactctcgctgagccttatataagttctaaaatctttctagcacaaaaagggctgccaagcatctatttactccttcgaattttaaggactcttgtctaactaacactttgcttctgactttggcccttgcatcgaccgatcttggatgccccgaccaatcttggatgccccgactgaggatggccaagatccttcctatgctctgccctctaaccctgaagggggagagaatgagcaacaggaaagggtcaccccgggtgatgttttatctgttattcttgagggcacaattcctgatcctagtttgagccatgattctcatgcaaaggggaagaagaaaaagggtctcacctttgacacccaagaacagggtgtgatgcctccaccaccctcgaagcctaaaagtttccttgattgaacgaaatgggcatttgacgggttcaaagagaggcaccacacaacctatctggaagtttccaacccacttattcttgataatcccttgaagtcttctctcaaaaacatgccttcaccttcctctccctcctttaatgcgggggagagggataacgtggtggagcctgaacctgtgccttccgatacccaaatggataacattggggtaagcaaccacatggaccatgatctaccacaggactatcatcctcaggggcctcatggttgtccccatgtcggattggactaaggtgattcaaactatctctctaatgtttcttccgaggccttcaacccataagtgtcttatagaagttactgctccaaaatccaccaggatttgtcgtcctagtatggcgttataagccgcgggacaatccaccatcacaaaggcgcaatgcttgaagccgcaagcattattttctccttaaaatgtgattgggagctatatttttagcaattagtattagagcgtccctgttgaccttgcttctagccaacgacaatgagtcaaaaataaagtgattaagtaatataattaaaagaaagaaaaaatagtaaaataaagtgaacaccagattttaaagaggttcagccccgtaagtatggtaatagcctactccccttgtatttgtattaacttgagagaaggaatgaagtgttcttcctcttgaaagctcttataatggatctctgagtaactttctctcttagatcactcttttctctttagagtatatttctgcagcaattctctctatccctttcacaatgaggctaggtcactatttatagagacttcatacatgagggatgatttcccttttgcttacaatgaataaaatagaaaactacaattattctataattacaatgtatgaaataggaaactagaataggttgccgtttttttctaactcaatcccataattgctgggattatcttcgcgtctggtcacaacgagattaatctctaaattttccatctcttgtacatcgctcggcataaacatgtccatacttggtcggacatcttctccacaatcgtgctcggatacctaactattatagatgttggttagtcatttataggctgctagggata

SEQ ID NO: 310066 - DNA, 1910 bp, Cannabis indica
atcgccttttcaatttggacactgttccgattaagctgttaccgagcttggtaacagaattattcgtttaataaatgatgactttcattttaaaaaaaataatgtaaaagaaaaattaatatttgatttaattcaaaaggatatatattaagttgatatataacattctttaaaaaaaattagatatataacatgaaaatacatgaataataataataaaaaaaaagtagagaaaagaaacgcatagtgtcagattttaacattatatatattaaaaatctttaggtgcgaccattagggttgacaatattgttcctaaaagtcaaaaatagaattttgatacgctttgttaggagtattagtagtgacattgtcggtccaaatttcaggcgatttttttgtcgcccctaatagtatttttaggcgcaaattattagaggcgactttgtagcggtaacttatcacctctaatcaatattagtggcgaaatcttatagcttcaggggctactttttccgccgctaatactcataattgttgtgatataaccaatctttctattctaatacttaacttgcatatacaattttgtttttaaaaaaaaaagtttgcatatacaataaaagttgatttgtaataataattacaatgtaacagatttaattattagaatatattatatgtttaaataatttgattggtcgatcttaaccatttttctttcctaactagtattagatttatatgtatacatgtttgtgatttcttttactctttctttcaagtttatttaattttatttgttcatttacaaaatatattattaataaattaaacaaagttcattttattataataatataatcataggggtcattgatgattcttcttgtcttctctaccacggtcaagaggaatcaaatgcatacctattctttgaatgtccttttttaaaagcttgtttgtttgaaatcaagaattagatgcattggcatactaccaccgattcagcaactaaattagtgcaatagattgcacggtccaaggttagtaataaattcaagaagaaagtaatggcagcggcattgacaagtttgatataccatatttggaaaaataaaaataacaaggtatggaatgataaatgtgatgatgtaaataatgttataaatagagtcaacgaaactacaaaagttagaatatttgttgtgtggccaaaaaaagttagtataattgatacaacatggtttcatacattgtaaaaagttttgagattttgaggtcttctatttgaagatgctctttggttgtaaattagtatagtaaatgaatatacttgctgatgaattccaaaaaataataataatataatcataaaacaaaatatataaaaagataataaacttactaagtcaataatcttactcaatattgatcatgagattattggttattttgataagtatttttttttttgtaacaaaagaaaagtatattttattgtttcgataacatgttaagaattataagattttatcctaaattaataggtaatataagtagtaattcatgcaattatatatgattaaaagttggagaggtgacttgtagaaaaacaaaaagtgggtggtaacagacaccttggttggttggtttatttttatttttctcttaaattcttaggaaggtttttttttaataaattattgaattgtattaataacaattaattaaaattataatactctacaatctaattagaatatctctcccgttaaaaacacgatcaggattaaaattaaaaaacgagttaaataatcagccacatatatgattctcaaattgtttgactaaaaaaattaaaataaaatcagatgaattcatcacatccttaagaatacttatattat

SEQ ID NO: 310067 - DNA, 870 bp, Cannabis indica
ctagatcttttcacacggatctatgggggccaacacctattaattcacacactaatttcaggttttacatccattttgtggatgaccacagtcgctacacttggcttttccctttaaaacacaagtccgaagctctcttagcctttactagattcaaaaccttggtggaaaaccaatttgataggaagatcaaagcattaagaacggactgggggggaggggtgaattccaagcattcacagacattgtcaaccaaagtgggattgttttccaacactcttgtccccacacttctgaacaaaacggaagggctgagcgtaagcatcgacatatagtcgaaaccggcctcacccttttagctcaagcacatatgcctcttaggtactggactgatgcttttcacactgctgtccacctcattaatcgtctccctactgctgtcctcaatggaaaatctccatatgaagtcctattctccacaaaacctgactataaatctctaaaaatattcggttcagcatgcttcccttgtttacgttcataccaaactcacaagttccagtttcactcgacaaagtgcatcttggttatagtgaagcgcacaaaggctataaatgtctcagttcgcatggccgtatatacatttcccgacatgtcatttttaatgaacaagagtttccatgtgcacacggcttctttaataactatgttcctgaaagaatagttactcttgacactcctcacacttggttcactcttcccacagacacacacacacaacactcgactgccactacaccagatacacctactttggtcaattcttcttcggcaaacacacctgacagtcccttcattgcagaaccacca

SEQ ID NO: 310068 - DNA, 2252 bp, Cannabis indica
aaaatatctctcatgcaattagaaaaatgggcattgggattgtgtcaaacatattttgggttactaacgaagttcagaaaagatatttttatctgacaattttcttagggtaccagtgttaaagttcaaattgtcacatatttttaacactggttacattagaaaaaggggttccgaatataaaaattatgtcgactattgttgaaggttactaacgaagttcaacttaccctaagaacaatgggataccatccacattgattacctcgggatgcttcttttttagctacttgacggactacattctggagataatgcagccgagccacgtagtcttgggtttgctcaacagctgggactggaacatgccgccaagacgtatacttgggatacttataatcacaagtatacttgttttcagtgatgaggccaacagatctcagattggcttcgttcaagagaaactccgctgatcgaagaccaaaaggaagacccagcagaagcctgcatcgctcgaccatctcaagagtgtgagtttttctttttgagaccgctgtcaaaagggtaaaataagataagttagcaaggccaaaattaaaatcatggaataatttaaaacaaagttggaacaaataactacttacgtattatgcaaaaaacagttgtgttgattgaggagatgctacttgtccagaagaaatcttccttaaaagcagtcttttttggtaacccaacaatgatcttacgatcatttgtataagccccaaaatagtaaaagcctcctgcacaacgtttcctcccagggattgccttgaccgagaagaggtatactatttccaagggagtgggacacacccatcctaaaattttatgcaaaacccttaaacttgcaaggatgaaatagaaaccaattggaatagagagctattccaaggtggttgatgaactccttaaagtaatctcgcaggaggagaatggctcaagccctgatgtgctcaaggctccaagcgcctatctcagccgagccactagtactttcttcgccactagtttcaccaccggcccccttgcgtacctcgcaagtaagtccttctggtggatagcagctaaattcaccaggagcaacagatctaacaaggcactttcatttctgatcaatgccacaagtccttaatatgccaccaacatagtctcttatagcccttattctcgacttaatgagttcgacctcgaacgtaatgttgggatcttgggaagtctttgacttacgaggcttggaaaacattatttcaaagtctaggtcacctgatgaaaaagtaattgtgactctgggtaaaaataagggcttagccaaaggaatagattattaatttggaggttcaggcaaggtagcatctcacaagaaaggacatttaccctctgttatttcttgtaggaaatgcctataacgactagcaacatcatcctgtagggtttttattaaatggtctctaatttttgcatcgtttatctctaatttggactgccgtttttttgtacgggatggcaagttcactaggatcctctatttctaaggattccggagaataaacttttgaaccagattgagacattctcacaaaaaaaaaaagaagcaatcccaattcctggatgaaatttatcaaaccagaggcttaagaatatggtaagcctaaaaatctgtgctctgcctaaaccgtaaagttactcagaaaaatttataccaaaattgctaaaaccaagtggaatggcaaaaatgcaaacaatataaatagtgatcaaaacccaagaatgtgaaaaaggaacagaagaattggtcacttaccgtttgaagttgagttgttgtacgatgaaaagttctgcaaccaaagacggaatgaatggcgtgatgatctttttcagctcttgaggtcgaacaatatatccgagtatactcgcaagaagaatgtcactgacagtgagggcatgcaaagcttcgaaaaaatcaggatgaattttttcgcaaaaaagctcaaaattttttgaaatggccaaaatgatggaaaggtggttcgtttttcagttttataccattgggtttaatcttcatcagaataaaagacaaaggatccaatggatagaaatgagggagaattggaaaatatggctcactaatgttaataatgtgcctcgaaaatataaaccgccaaattaaaaagcatgcattttttcaaaatggattatgacaaatatac

SEQ ID NO: 310069 - DNA, 876 bp, Cannabis indica
agggcacaaaacccaacatcttcgtctatgattcttatttatccaagttgttttcatctatgcaactctagggggatcacatcggtagtggagaggcctcatagacattttcacctagtttgttcttcaccttcgacaatggaggatgaatctaggtaggagtatcccaaaccattgaactttcttttctcttcttcttcttcgattttggccaacccttctactgggtttgttttgattttcaacgaaaatgggtgtgagattttgattaggacttggggttcttctagtttgggttttgtgggattctgttcataaattggttttgatttaatttaggttacttttatttttatttcatttattttaaattgtctttaataagtttttatttcataatgccatgcaattgaaatttttgtgacttggcagttgtaagtctacgtggaaatttgtctcccgagccacatagggcagataatggggtcttgttgacggaggagtgtttttgctaataggcacggaatttaggtggttttatcatcaaaatttaggaattggtagttagttgcaagcgagatgacacttctaaaagttatgccacaattaactctctttttaaggaataggtggctaaatgagaagaagagaaagagatgtgtgaatcatattagttagggtttttttaatttgtctttataagagagagagagtattttattattaataataataataaataaaagaagtgtatgcggctaaacttttagttttttttaaaataagagtcacgttcagcattgttggtcgacatgccctgtgtcacgggctcaccttttcaggcagcggaacacccgtgcggcaccttgacttctc

SEQ ID NO: 310070 - DNA, 1554 bp, Cannabis indica
acttaactacaatcctcgtgggaacgacctcactcttggtgagtttactacttgtcacgatacgtgcacttacgtttgcaaaatatcacaacaatatttttaaacctaatctttaatatttcttcatttaattctattacatagaaattataagtttcattaaaatggatattgatcgttttgatggcttaggtgactatcgaatctagaggaagaaaattagggcattgtttgcccaaaacaaactattgaaggtccggactgaaccaatagagtggcatgctgatacaacaactcaagaggaagaattgctagaaatagcaacaagcttaataattttcaacttatcagactcaataattagattggttgagaaggagaatacactagcaaaaatttgaaagaaaatggagaaacaatttcagaagaagtctttcattaacaagatctacttgaagaaaagaatctttagttttaaaatgcgtcattcaaagactctggaacagaacttagatgagttcttaagattttatattgacttaggaaattcaagagaaaataaggcattgagtgatgagaatcaagccataataattcttaactcattaccaaaattataagggaagttaaaactgcaataaagtatgggagaactgattactcttgaggaagtaatctcagcactaaagtccaaatatttagagatgaaagttgaaaaacctaggaattctaaagacctaaatctaagcaagggaggaccagcacaaaagaaaccttggcaacacagaggtaaaagcactagcagaggatcacacaaaaggaaacaactatcacaacaaaggaatatctaattctaaaggtccttaaaatcccaatgggtgttaccactgtggaaagcttggacatttcaaaagagaagtagagaaaagcctaattcagatcatcaagaagattcaagcaaacaaaacaagagcaagaatacaaaacaagagcaagaatgactatcataatgctaacttaagtgatggttatgatagtggagatatctatgtggctgatccatcttgtaaagatgattggatcattgatttaagtgtactttcatatgactaacaataaatcttatatgtttgattatatggaatttaaaggtggaaatgtcatcctaggaaattatcagacatgcaatattgaaggttcatgttctatcaattttaaagtgtttgctcgaattattagaactttaactaatgttagatatgtgactgatttatctagatacttaatttctataagtgtacttgatgatatgggaattgtaagtaaaattgaggcatggactattaagttggctaaaggctttatgacaatcataaaaggacaaaagaatggtggtctatataagagcatctccaatgaaatatcaaaagggaggtgtattgctatattttaacacactcaagaaaaattatattccaatagtgttttaaaaagtgtactaaatttgacacatgctaaaagttgtgccaaatttggcacaagatatagcattgt

SEQ ID NO: 310071 - DNA, 878 bp, Cannabis indica
tgttccaatatatatataaaaaaaaactatgtaatattttttaaatttgaggagcaagcctctcttgtattacatttgtgtatgatttatgtatgcatacatattattactttatatagaatgacctaaaatataaaacaaattattaaacagtaccataatttttttattttttttgaataacaatactgtgataatttgaaaacgtgtttgtatttatatttattaattttttgttgtgagaatccaaaaagaatatatgagttaacttctagattacttcacaaacacccaatcttcataaaagataaacatatatagtaaaaaaaagacaaaatttcattggactaccaaagaaactttaacgaaagatcaaaaaagaaaatggataaactgatcaattttccaaattaaagtaaaaaaattaattatcattatctttttgtatactcatgaatatataggaataaactcttttttatccttaactatatatgttgaataagacattagaggcataattaactttcactttctttaacttcttatctttggaaggaatctaattttcttaatcctttttcttatctgttatgattggaaggactccttgaaagtatttaaggtacgaagaaatgctatattcaccttaaagtgaaaaattgtgtattcaaaatatgcattcaaatattgtgttattttttattattagttttgttatgactctttcttcattttaatttggaaaacttacaaaaatattaaaatttagattaatttttacaaaaatactgttacacgaatttgctttcaaaaatactgtattttataaaaaaaaaaaagtggaacacaaaacagaacaattaaaaaacaacagt

SEQ ID NO: 310072 - DNA, 3211 bp, Cannabis indica
actgtatttttttgcgatgggggaaggttgaatggtttgatgaataatcctagtattattattatttaataaaatacgaaccttatacgacataccaaatgagtccttaaagaaaataacttcccaaaaaagaatccatgacaaaatagagattgttccctttctatttattgcaaataaaaaaattgaagacatgttaatgaaagaaaaagggaaactaataataccactcacgatctgtaaaaaaaatactttcttgttttcttttttcaaaaaattattgagagaaacaagaaagtaaaaaaacaatgaaactataaacaaactttccatgaagtaaaaccaccccacacataagcaagacttcccaattttttcacatataaaattgtaatttttcagtaaaacaaaaaaatggatagagctcgattgaagtttgaggagcctttgtttagggaaggtatcaagatcgctcaaatagatgttgagaaagtcaaattgcaggctacaaattggagctctgcctgatttgtactgttttgggagctaattctccttttgtcgtttttgaaggattcatacgaaggatgtagagaaactagggaatttctcagattgttcgaattaatggaggctttgcaattgtcaagttcaatgatgaggctaccagagatcattttttggaacattgtgtgattcaatttgatcaaaaaccagtaattacgagactttggactactcatttagatgatgcaaaacttgttaaatttgtgcctttgatgatatgattacatgacctgggattgcagtattggggaaataattgcttgagtgctttagtcagtactattgggaaccctattatggtggataaatttactaaggaaagatctatggtcaaatttgttagagttttggtggagatggatattatggacacacctccgagagttattcacttcattaatgagaaagggagactagttgaacatggtgtggattatgaatggttgccgattaaatgtaagagttgtggggggttttggccatattgtggctgattgtagaaatggggaaaataaacaatgggtcgaaaaagaggtgaaaggaggagggctaggtaaaagtaaggaagggaaggcaggtttaaagaatatataaggaagtagttaagaaatatatgggtactgaggttatgcaagaagatgggaaggaattggggaaagttgttaaatcttactgcaaggaggttgataatagtattaacatgggaattaatgggattgttgaaaatcctaaaagtagggagaaagctcaagaagagaagtgggaaacaccaaaaaaagctttactgcttaaaattaagaagggtaatattgaacaggggcaaatcaggacctcaagaatccttttgaagtgttacaaagcaaggagatagggactaaaaagggagacttattagcagtgatatcttctcaatgaatcgctgtaacattttgtgttggagtgttaggagccttaataaagagaaaagtaagaggcggtgatgaatgtttgtcgtataaaggaagtaggagttgaagctttggtggagactaaactgaaaggagaaaaattgcagaatatgatgactaataaatgatgggcctgggatagttattccagctctgctattgaagggagaatgttgattatttggaagaaagtttatgctagggtgattgtgattgaagaaaccaaccaatatgtgcactgctatgtgaaattagctagccacactaaggctttttatgctacgtttgtgtatgggttgaatggtctggaggagcgcaagttgttatggaagggcctagctaatctaagattccctgtcaaaccttggattattctaagtgatttcaatgctcttcttaactatggtgaaagagttgggggtaaatcggttactaaggctaagattgaagactttaatgtgtggttaagtttgggtcaagtggatacaatgaagagggtgggctgttattatacttggtccagtaatcaaggaggtcatgatagaatttattctagaattgaccatgcttttatgaatgaggattggttggatttattccctaattggatggctactttcaactgggaagtggtttcggaccattgtgccattcttgtctctttgatagttatggtggagataggtgtgaagccattcgagttcttcaactactggtgtgagcataaagatttcgagaatgttgtcttggaaagctggtacaaaccagtttagcaatctggtttattatggctttggataaagctcactcgactatcctgaaagctttcaatacttccaggatgggcaatgttgagtttgaccaccagagggctaaagaaaaatttcaagaggctaatttgaaggctcaagctaagccggggatagagaaattcatagaagaagagaagttagctcctgattaattttgttactcaagaaaggattcctttaaaatttttctggtttagagaagcaaaattaactggctgaaacatggagttgaaaacgtggcgtatttttatgcttgtattcagaagagaagggaggagaataggataacaagttatgttgataatcaaggcaatttaattgacaatcatcctgatgttgtagagcattttattaaccattttagagctacatggaaagttgcagcttggttattagcaggcttgacagtagctatttggagtttggaaacaagttgagtttatctgagcagctaagattgattcaaccttttataatcaaggaaattaaagaagctttgttcaacatctagagtttgaaaagctcgagtcccgatgggtataactctgaattttttaaggtgcttaggctgaaattagagctgaagtcagtaatgctattaaggagttcttcaatactggcaagatccctacccaatttaatgaaactctcatataccttgtccctaaagtggagattcctgtgagggccattgattataggccaattgcttgtttctctacaatttacaaatgcatcactaagctaattagtaaaagacttgctaaagtacttccttggttggttcaccaaaatcaggggatatttatcaagaatagacctattgctcataatatcttaattttctaagatttgattaagaattatggtaggaagattgtctct

SEQ ID NO: 310073 - DNA, 1098 bp, Cannabis indica
ttttttattataaaattttagaaatcccaaatatgtttttttgaatttattattgttattatttttcatatcttatattaatttcttttagaataatattatttatttaattaaattatataggacaacatttattataaacaattaaaaataatacctattaaaaaaataattaagcatctttatttattattttaataaaacaaatcattcacataattatacctttagttacagtattctaaaaaaaataaataaccaaaccttaaataaaactaatatttacgtgtctcggcacgtaacttctacctagtggaatcaaatatatgtatatatatatattaatatgtttaatattttcaaagttgtattgggtaagtggatttaagatctgtcggaactttggtcaaaatgaactacttcacttcaaacctaaataaccatgttttttctgagaaagttctttgtattatactggatatgtgttgattatatcaatttgggactgatgatacaagcttccacaagacataacaacaactgcttattaaatttctgttaaatgctcgtttttggtattcttctactattactactatagtccaaattattgattgaaattatatttgtaagaaaattattataagacaaaaactttaaaatttttgcattagtaacccctatattttaatggtatgttcttctcttttctaattttttagtattgtacttgaatatttatgttttattaccattttttcaaaaaataatttcaaaagtatgttaaatcatggaaattatatgtgattgactatttttctgtgctgattattagggctttttaattcagaagggatttggtgtatagatccaatcgacatccaaagaataaaagaaagttactacacctttctttttatgtcctcttatccttctgaagcagaaattgagattgtcctttcggttgtgccctgtcgagtcacttcagagatgaacaattcatttttgcttccttttactgagaatgaagtgaaagaagcaatattttctatgccttctgttaattctatttttggcatatttaattgacaaaaatat

SEQ ID NO: 310074 - DNA, 1675 bp, Cannabis indica
atagtaaacgtagtttttttttttaaaaaagaaaagtttagagaactatacctgttatcaggaaaatttgatcccgaaactcccaactatggttccaaagcaatgaacccaataatggaggagaaaataaaaaagggctatttgcatagtaaacccaattacaagactgaaactccggacaacaaaacttttcaagaaattccaaccatttcaattacgtaaaattatgtttaaactgttctaaacaaatcaatatgtattcaagttaacaaaaaactgaaatatacattcagcaaagtgcaagaaagattaaagaaaatatccccaaattatcttgataacaatctttacactagacatatatcttcttacacaaaagttaagccattaaactccagacgtgtagatcaacgccgagcatcgtaatcgacgatctccgaatcgttgagcgcgagtgagttctggacaatcgatcgtccaattgagttgatccactcctccttctccttctcggtatcagcgaggaagtacatgggctcaagtgagttccctgatcccgagagctcaaaagcgcagggcttatggacgatatcctcagcgcccttcacagtctgacaggttcccatgcttataacgccgcgaggaaccgaggccgacgttacgttggagtccttgaaccagaggagcttgccttgcttgaggacgaaccatcggcggcgccaggtcttgatgtactcgccttgttttgtcaaccacccggtacgctccgggcgggaccagaattcgatgccgctgtactcttccgtgctcgggtcttgaccagtcacagatctccatagtccctccatagccggagaagtggagctctggtatgaaattcaagaaaaaagagagtgattttagagagagagagagagagagagagaagtgtgagattgggttgagctgttcttgtcctgagctgattaattcgcagtcggaaatcggcaaacggcttataatgcggcgtcgtttcttatttatttatttttatttcaagttttttttcactgcttcataaattttatatttttccttgcagaaaaaaaaaatggaaatatgtatttaattaagggtaatttttatttttttaaaacaatgaacaaattttcattgaaaaaaataaggttatatccaacagagaaagataaaaaaatttcaattcaaaatggttcactatctattttaagtgcatgcacaactaattcatgaacaactttattagttgattgacgaatctaaatcagagttgctttaggaaaattaaacggtaaactagaaatatcatctaaaagagaaccaagatcattagaaagaaaaaatctcttaacaaaagtagagattacaacaagacaatcaaattcaatcggttttgagttatttcatgttattgatttttattcattataacactgttacagaaccggttctattttaattataactggtttaagttattttgtgttatttattttattcattatgttacaaaatcggttatattttaattataaccggtttgagttacttatttttattcattatgttatagaactagttctatttttattatatccgagacatttggtcaccactttttttaaaaaagaaaaaattataacccgttttatgaggt

SEQ ID NO: 310075 - DNA, 726 bp, Cannabis indica
tgtctgcccgtttctttggtacttcttttcttttctttgttatgtgtataaaatgtggatttggaggatagaaataaatataatgtgattttatagggtggagatggcatgcaatacaagacgttctacctaaaaggccaactttttggtaagttaaaaggtcaacaaaccaactcataattaaattcaatatcatatataaatcaatctcatcacatgaaacaatatgcaaaaggaaatgtcactcatgaaacaatgtacataaaccaacttttaaggctctttaattagcaaccatgcatagtattactatcttttattttatccctttttctttttctttatcattaattattattattattaataataataataatatttaaatatataaaattaaaaacataaaatttttacaccataaattttctttaataatatgtcaataaatgatcttctattacataaatctccaattcgacaatatctaatcaccaaaattagcatatttttggcataacataaaggtaaggccactttcaatgggcctgcaaaacctcaaatacagtgtgatatcacaccaaaacctcttccaaccgaacgacaattgtatattcatttttgagtttgtctacagtgtcccactatatttaggtggacactgtagacaacactaaattgttttatttttttttaaattttttaataattatataatattttaaa

SEQ ID NO: 310076 - DNA, 1657 bp, Cannabis indica
tttgctagtatatatatatacacatatatagatataagggataagggatcatttattaattatgatgacgagatgggttcaaattacaagataagtaactacactgaaatcatggtatagtattttggcaatttttttcctacacgatgatagatctcatgggcttctgtaaaaaaagagtaagatacgatatcgactaataacccatgttggccgccgtatattattgcacgttcagttcatactatgcaacacatttatatatatatatatataaatatatatatattatttaataatattacgcatgtgtttactattaacattacacgtcgactcttaaaaatatagacacattatcataatgcacacacaccctcactctctcgtctctctcatctagttccctataaataccatccatatatctctctcaataatcatctcatcaacacaaacaacaagtcatttttgttgagatattattattatttgcatattggtccctcaacagttgataaattatatggagagtgggaagaaaatcaagggggtggtgatattgacgaagaagaatgtgttgcccaggggcaccaacgccacctctgattctgttgttgaacccgccgccgcagacatctcaggccaggaagtttctcttcagctcgttagtgctgttcatggtaataattaatatttttgctttgcttatataattcattatattgtttttattaataacaatgtctggtttgagtttcaagttttagctataagacccttatagttatatatgcgaccaacgtttttcttttatgaaaaataaatgaaattaagataaatttttaaaagttattctgcgtacgaaaacaaaataataatgaataatttagtattcatacttttgttatttttggatatttttgagaatatcttttcttcttttgttagataatataaaataggcttataataatggtgtacacatgttttaattaatagaattattataataaaagaccgtttcctgaaaaattaaaaattactgtatattcattaaaaaaaacaatatttgattattcattaaaataaacttacttattttgtccaaatttctgttaaattttgttgcaggcaatggagtgaaaggaaatgtaggagaaccagcttacctagagaaattggattcatatgatattagtaccttatctccacgcgacatagctttcaaggttgccttcgataagaacgagagtattggagttcctggagctttgatcatcaagaatagtggcagtgacgagttctatgtcaagaccatcaccctcgttgatgttcccggtgaaggtcacgttcacttcgtctgcaactcttgggtttacccttttacaaaatacgattatgatcgtgttttcttcaccaacaaggtaatggattaatggattattaattgttttctcttcattttatgaagtttaattgttcaaactacctatgaacccaattgaatatatatatggaaaacttcttaatggtaggttactaaacaaatttaactataaatattaactttaaaaaacatcaaactatcgaattttgatataataacgaataataatatcacaaatttgaatttttatgcttaatttaactactt

SEQ ID NO: 310077 - DNA, 950 bp, Cannabis indica
cctttgcaggagtctcggtggtcggcataatccaggccgattgcctactcctctcgcatcgtgttaaaagaatctttcattcccatgttgtgcttacttggcattcacattcatgcaagatgattctatattttttaggttgttcattctcacagtttgtatatccataggaagaacctagattgttgggtcgagtttcttcatttctagtgtttcttggatttttggggatctctttatccattaagatgtcccttgtgttctcaggttgatcctcctgagtattcgtgggatttctagggttattctccctaggggcatcctcatgtcttctggtcctagagcttttaggtcttccctgaggtcatctagtcgatgtttcaggttggtttggaggggcatcatctcgcacagcccttgcagttgctgcctcgcactctaattctacaattctttgatttgactaagccagttactgtcaaaatttcttattttccagttctactaatgaaacatatcataggcatccttgcttcgtctctcttggatttcatccccaatttgttcaaattctccaccatttcttctagaatggggagtttcagtggcatttgtccagtgagaagtctgatgctcttttctagggcgttgagttgtctctcctggctgattttcttcattttgaggagtatcgtctgccatgaatgaacaatttgaatttatcttcaacgagggtgttcttctgagtttttattacaaggatctcaatgaaagcaccaaactattaaatagtaatttttgttaactaataaacaagctttttcgtgtaattaatatacttaggaatcaatttgactataattaaaaataataagggtaaatagcggcataagtacccaaagttttaagtttgttataagcgacataaatctaatgtttatttttagcgg

SEQ ID NO: 310078 - DNA, 1336 bp, Cannabis indica
tttgcaaattcgaagtttcaatcaaatttaaccattaataatgtatacacttatatacacgtccatgtaattttaactatttaaatattataaaaaattattatttttttgaaatgggattataaatttttctaaaaattaaacatcaaaacaaaataaaatttcttcaaattaattttttccttcaattatttatttattttttgaaagggtcttcttcttcatccaccatcatcaacacagaccacctccattgccattaccaccagccacctccatgattatagccaccatgcacccctaccacaaccatcacccttgaaatcataactattgcaattcattcctcaaatccaaataacaccaaagaaaccaaaataactataaacttcaaacacaaaaaaggtttaattaaaagtctcaaatctaaatcaatacaaaaaaaaaatatctaaattaaaagtctcaaatataaatcaagacctgaaaaacccaaatcaaagtcccaacaaaaaaataaataaataaaaaggaatgaaagagatctcaaccaggggtattgcgaccatgaatgccggtgagccaaacaaaggcggcaaacgaccattctgctactcgaatttgagaaccagggccggtcctaaggtttatgggaactaagggaaaatcaaattttgaggcctctatatatagtttaactattatgaaaataatagttctaatgcttagtgtaatggtaaaagttttacgaacttttaagagctcaaaagttcaatcttttataactacacataaaatatttttttaaaaaattaaaaagtagagtttgggaattaatcccataatctcttaatttaaagtaaaaccttttaccactacaccaaacaatttttgttatatttacttcttatttaatattttatttatatattaatattttttttttcacaatttcggggccctgagctttgggggcccaaggcacacgcctagcccacctaccctaaaggtcggtcctgccgagaactcccaaaagctccattcttccttgcctttctctcctttgcgatttttcgtcagacatgaacgatgcactaaatctccaggcaggaactccgccattgcttccctcttcgacttccccctccgacgttcgctactgggggttccccatgaacttccgtgtaggcaaccatctacaagtaaaaggatagtgttcacgtgattttcataaacttaatttaagaaaattattaattcaagtaaagaagagacgaaaaataataaatgaactccatatatttttacgtaattttgtagttaaatctacatactc

SEQ ID NO: 310079 - DNA, 1658 bp, Cannabis indica
gaaggagattcagactcagatcttgttgatactctgctacagaaatgatacaagggttagagatctgagtggaatgagacattatattctgctgcaaccactgtaaggtttcttatactttatatgtgtttttttcatatcgttttagaagttcatattcaggatgttaataacatacttgttagtaaatctagatcctggtaaaataattccaacatccaatactgtcaaaaccagctgatggagaaccattgcttttgtacctggcattgtcaaataatgcctaagcattgcatttgtgcgagaagaaggaaaggtacaaattccagtatattacgtaagcaaaagactgctaggcacagagtctagatatcctatgatcgagaagctctccactactacaaaactaactttttgcttctgttgtaaaatgacacataaacattttgtgttggttgtctaaaccgacgtaataacggcagacgcaaatagtcaagttatttgcttcatttctaaactgacgcaaactgttttttgcttcagttgagaactgaagcaaaaagtatgatctattaatgccagttcttaaataaagcaagaaacttagcttcaaattgtaactgaggctaattagattattgcgtcggttacaatttgacacataattttacgcaattttttttttactttttgtgttaactataaaatgacgcattactgtaggtaggggaaaattacaaatttgtttgcaattttctccacctgcatttttaaatattagaattggcttgcataacaatatttatatgactaacaataacatttataatatattattataatatttttcatgtaactaagaaaatgatataattataaagtacatctaatataataaaagtaacgatcataaaatttgtatcttacatgtcataataaaaatttgatataactacgaagtatatcaataaaactaagtatcaccaaaagtaacgttcatatagctaaaagttttatatcctacatgtatcataataaaatataaaaagttgtgtactcattctttcaatatataagatttcataaaatcagcccattcatcccgtctatcgtttatctcctgcttgttgtaaggcttatcatctttgaactgtataaccagagatagataatattgaacgtatttgaaataaaaactaattatcaaataaaaatcatatttttttaaacaatctaatcatactttttgttatcccaatttttgcactatgacgtggcatcacatgctggtgacacgtggatctgattgcccacatctacccgagagagagatgcactgagcagggcatagcatacacctgcacgggcagtgtctttccagtcgagcagtggataagccgagcaacgaatcaacacttagccattccagaatttgcatcgtgaagcataagacaatccttataaatctgggatcgtatcacagagatatggcaagctgtccaaatcccacaatctttgtattataaatatgtaatatgtgttcttaccaataatagaaaagggaaaccttccctcaagcatgtagccctataaatagtgatccatttgttgggttttatgccctaaataaaactccatttcaatgtaatctattttat

SEQ ID NO: 310080 - DNA, 1840 bp, Cannabis indica
gcataaaacccaacattacactaggaagaatatcttaactaggtgcataatgaaaattgaccttagtaaggcttatgatacagttgactgggagtttgtggatgatttactcaagttgctctgctttccttctcgattcatcaagtggataatgacatgcttgaagggtacaaactatcatttgcttcttaatggtagaatccaaggtagcttcaaagggaagaaagggcttcgctaagaagatcccatgtcccctttactttttgttctgattatggattacctcacaaggttgctgcgtcaaagctcaaataaaaaagggtttggcttccaccctttatgtaagaatcttcaattgatgaattcgtgttttgtagatgatttagttatcttttgcaagggtgatctcaattcggtaaggcttactcatgatgctttcatgaagttctgcaatgacacaggtttgtctgctaacacctcgaagtctcatatctacttttgaggagttagtgaagaggttaaatcgaagattatggacattgtcaaaattgaagaaggaggatttccccttgagtatttaggggtcaatcttaggccaaccaaatggaaggtcaaagactgtggagttatcttggataaactgaacaagaatctcaattgctgggcgagtagaaacctctcctttgcgggtcgtgctcaattgatccactcggtaatgcttggtataataaatttttggatgagtatattcaccattccctctaagataacagctgccatcgataagagttgtcgagattttttatggggatcttcagggaatagtagtaagcttcaccaagcttcttaggagaaggtttgccttcctaaaaaccttggaggaattggttttcgagaggggaaaaagtggaacaaggcctttttggcaaaatatttgtgggctcttgctagtaagcagattgtttatgggttaaatggatcaactcaattttttttaggaatcatgacatatggaattatccaaagaagattgatgatagttggtacttcaagaagatattgaatataagagacaacatggatgaagcaagactttcccaagctgtcaaaggaaaaaaaaatcagtgctaaaaggttctataacttgattgtagaggaggtaaaggttgactatgctagtgctagttgggataaacttattgtgccaaaacataagtttattttttggcaaattttgaactcccaattgctaactcgggactacctaaaccgaattatagctattcaaagtgtcctctgtccagtttgtgaagctgaagtagaaactcacgatcactgattcttcaattgtatctactcaaaataggttttttctgtcatcaacaagtggttgggaaacttttgttggcctagtttgactttggagttgcttcactggtgcagcaatttgaaccagcagcctcaatgtcgtgtgttgaatgttgttgtggctgctaagctttacttgatttggaagaacatgaaaggttgtgtgtttgatctctattgtgcaacccctagaagtgtgagtttagaagttcagaaaattgtccagcttagattgttaagcaagggtccttttaaagaatgtaggaaaaatatgtattttcttaatgtaattaaaagttggtagtgttgtgggttgtggcagccttttttcggctgctgctttgttgtttggttggcctagtgcttttgtttgtattggcttgttttttgaataaagtttcccccttttcaaaaaaaaaaaaaaaccttctacacagcctcaagacttgatgcaatagaggttatatttgca

SEQ ID NO: 310081 - DNA, 1836 bp, Cannabis indica
ataaaatgtcaataaactatcgtgatgctaataaaatgacaaattttgcaatatcatcgagatagtatcgataaaccatcgacatacaattaataacaatatgaaaaatacaaaaaatcacaattatggatattatcaagaaagtatcgataagagtcatccctaaccttatacactttccgtcgataatatatcaacataatatcgataaattgtcgatataatgtaaaagtccaattctcgtttgaaaatctagatcctgccattttcacataaaaaatactaaaataacaccaatgcaaacaataaccatacagatcatggaaataaattacatactcttctaaatgtttaagaaattatttgaaaaatatcttacctattcttgcagtgaatgtgcatttaccctggtcaatgtgtgattcgtggccctaatagtcactccaacgtcggctgattgtcgacttcgtgcaaagagagagaaggggtaaaatgggaaaaatttataaactaaaatataattttgtataaattaattagaatcttaattttaattatatgcatattttaaaacatgcatattaaaatttctcttttgtaataggtatgtcatatttgtaaactttaacataacaccaaaaaaaaagtttagcatatgtaacacctagatacacaataattgttgctcagtttccaaagcatgtatgttttgggcgtcattgctaagtaccagtagtgcttagtacattctcgacatatcgcgttacaattaactaacgatattacttaaaagctattatattaaattatatggcacctaatacttatttgaaccaatagcgttactgacataagagggccgatgctaggcaccgataccttttagtatttctctttatttaaatgtgtccaaatgtttttcatagtgctaatttgtgctaatgtgtcggtaattaagaggttaatttaaaaataaaattgaaaaggaggagaacattaattgttcattttagttctataaatatatatatatatatgtatataaaatgggtcccctaagctacttattatatactaccaataagaaaaggcattatatactaccaaaaagaaaaggcaataccatcatgtcatatcatctcgatctgaaatgagcttatgattatgggtctaaacagttttaataactttaatgattatttcgtctaatatatttatggaaactaaactatagtatattatatctctagaagtagaagtgtacgaacaataatcgaaacccatgctagatcagtattaatggatcatcagcagagtaatatgtaagtgtagtagagagttattaaatataatcatgaccaatataatatagtattactagcactactacaaaaagtgtaattctcggtcctatagggctagtagtactacaagaattaacttagaccagtatagtttgctattgcgctggtaaaattaacttttaccagcacatttcaaaaactacgctggcaaagagatcaaagttttaccagcgtatatttccaggagctaaaatctaacttttaccagcacatttacgcgttaggaaaaatcttttttgccagcgttttttattttatgctggcaaaagttttaataccaacattgatatgccaacccccttttaccaacacatcataagtaaattctattttaccagtgcaatattaacttttgccagcacaaaaatgtgctggtaaaagtgccatttcttgtagtgcgtgcctagggcccacacttttcgtgggcctaaaataaaaaataaaaaaatttattaagcttttatttaagtaa

SEQ ID NO: 310082 - DNA, 938 bp, Cannabis indica
aaataataaaaatgggagggaaaatgagagggaagtttaagatagtgggatgggatttgaaattttttaaaatgaaaaaactacccactattacaaccgtctaagcaaactgaaaatggggaagaagatgaacagttgaggtgagagagaataccaattacaaaatttagattcgaaaataatataaaaaaaataaaagaaaaatacataaatacaacactttttgatcagaacacataaccgtcaaatcaaaacaattaattttttttttaaaaaaaaaaaaacgtggcaaaaccctatcgtgacaagtggcaatgaaaacaaacaccactcacatcaagcggctaaagttttaaaggcagtaaactgccaaaaaaaaaaaaaaaaacagtataaatgttgcaatttccgtgcaacagtaaaaatgaaataaattgggaaaaaacagtatagggtgtaaatttcccttataattagttaagtgccttaagcccaaaaatagcccatgagagcctcctcctcctcctcctccttcttcttcttctttgattcagtttcttcttcttctctcgtgtcctgtgctcttgtaatggctctcagctcgtcaaagtttctgaaatcgtacggctatgatctgctcttgggttctatagctgcattttatgtcttcaccgttccatacaccaaggttgaagaaagcttcaacgttcaggtagattccattttctcatacttctccattcatgtttggttggcaagaaactgttggaaaatgaaatattctaggaattgaagtactgggactgcttattttttaagtagtaacgattagctattgtgattcatgaaataaggcatttactctttttactgggattgcttagggaaaagtatgttgaggaaaaaaaataaaagaaggtttttctgggttttctttt

SEQ ID NO: 310083 - DNA, 711 bp, Cannabis indica
gaaaatttattattattaaacactacgtagagttggaataattatcctaaaaatcttagattaatttctcgatttgacaaagacttgctacttttagctaccttatattcattttttttaacaaatttaaaataggactgttaatagtgggatgttcagagtttagtcctcattattttttttaacgaattaaactattttgattatttttcgtaaatctctatcttttcattcttgtttttctcttagccaaattaaggcgtcttttcttcaatttttctctttctctatttattctctctctctctcacgaaattccatccccatttaaaattaggggggccatggtcacctcatagtctaatttttgtaatttgattctagctatttgttgttggttggatgtgattcttgagtgtgcatctcttgcaacttatttgcctagctcttgtgttgacgcggaaatttggccaattcgtatagacgagatgaaagttgtaagtaattatgtaaagtaaagagcacacacaaaaatttattgtagtttactctctgtgcaacgacagtaatagagttacgtttactttaaatttttattctcacgaacttgataaaaatagctaagtctgcaaactttacttttaaagagagatactctgactttataagtatttttggaatatgaaaaataaagctaaaaagaagctctcc

SEQ ID NO: 310084 - DNA, 727 bp, Cannabis indica
aatctgattatattgaaatagattttatttaggacacaaaacccaacacatcactcatcaaatgagagatatttgatgaaaaaccttgtactgaaacagcaatatacttgcaacaataagtccattttattgtcgaactactctgaaagccatcttaccttttgttgaagaaaaacatcaagcattcaatttaaattgttgaacagatggagaataccattaaactctctgtttatcctttaagatctagaggtatcaccttttacaatgtcttaataaagatatttgtttgtattatatacgcataattgcctttggatacgacaaagagcttaaagctcaaaagagagtatatacatttatgtaaatatatatacgtatatattgtgtgagaacaatacaaatacactttcacaataaaataaaacaactaattaataatatatgctctcatcactatacttgcatacaacttaatcaaataaaaaaaattaataatattacttctattatatatagagaatataaatgagtggtgagtgagagaagaaaatagagggttgtaattaaaattttattatcattattaggtataaaaaaactaagttccacgttacacaattataatcaatatcaatatctatatatttatataatgctgttgtttggacagatgatgtggcaacatatatgagctctcctcattatttttttattttctttattt

SEQ ID NO: 310085 - DNA, 1480 bp, Cannabis indica
tatatatagatattattatatttatttatttatttattatatatatatggtttgactcagtgaaacagaatcttcataaaaaaatttatgttgtaattaaaaaattgacactaaaaatagttattttttgtaatgattgtatagatatattcacctttcaatggtatgtacatgctcacagaaaatatttgaaaatcaaaacgacaacaatttcagaaaacaaatgcattcatcatactgtactgtgaaataattaataaaaagatatggatctcattcattctcattttattttttatttttgaaaagaaaaacaggatacagctagcagtcgtttaatttcgcgcttgtgagtagtgaccacatttttatatgtgtccatataatattgaaatattctgattttggttacacttgtgatctattaatataaaactttatattcaaatctgaataatgccatatatatttatatgttggccctgtcatatcagtttaataatttttatgataatttaagactatatattataaaaatgtcacgaggagcagtgccacataaattgcagatagactagtaattattttgtattgatgcatacagagtccgatcatataatttaattataacatatactccatacataccccaataaatatgtggtagctttattggctcaaatattacctaattaattatatttttatcgactaatagatatatggttttaattatacatgattattgattagagctacaatggtatttttttatttatttttatttttgacatatagctgtagcatttaagggaaggaaatgtgaaactcgtattatcgtaaaagaaaattcatttaaaaaataaagtgtgacctacgtaaagcatctccatgatatattatttaattaaatttatgtgaaatttttacaatattatactccaatgatacattaagttatgcaccaaattagtgtatactaaattctttaccattaatgatgttgaattttaaatttacactaatttggtgtacaactttatgtttttttttctcattctactcttattttattttattcaaaaatataatcttatattttagttctcaaattaaaatttatcataaaaatattaattaatttaaaacagtaacaaatttaaagatacaaaataacaataaaaaaattctaatataataaaataaaaatcacataacacgaagttataaaaataaaaggctagatatcattttagacccagtgttttaaaaaagttattaattggaccatctgttttgttaattgacaaaatggaccttgtattttctaaaattgtacaaataggttttgaactgatttttgttaaaataaaacttaataataatctgatctagagatgttatgacaaaacgtgttatattttctgtatttattcgtattaaaatttttcataaagttggttatattaaaaaataaaaa

SEQ ID NO: 310086 - DNA, 1509 bp, Cannabis indica
aactctcccatctaacggctgccatacaacacagaatatattctgtaaaaatacaatcacggaaaaaaatcgtttccctatattattatcaataaaaaaaatttcccttttttttcttttaaattaagatatcacataactttgaaatttttgaaaccatacctttgtttttcaaaaatccaaatatccataactctaaaatctttcaaacaacatgaatttattttcaaattatgtgtttttttatatattttttaattagttaagaaagaattatttttttatcacttactaaatttgatatatcttcttctctaataatatagtattcttttctcacagaggttttttttaaaaacaaagtaaagttctctataaatatttatcattttttaaaataaatatatttttaaaaaaaatattatacataaaaatatgtttaaaattatttgatataatttaattgttcaattaatattcataaatataatttaaaatttttataaacaatcacatgcgaagcacggcatgtttactagtacaaacatatagcaaatatggaagatatgagaaaaattccaaaagcattcatatctcaaaatttctaaagttttcaataaaaaaaattgtatacactgttccagtaggcaagagttaatccattaaatagtgtagtcaactcatctaaggatggacactatcgttagcaatcttttattcaatcaaaataagaattctaattagtctcctagtaggatagattcaaatcataatcttattttatgagcttcacctattgttttaatttttataaatctagctctaacagtcattgtaagagtgaatctactagaattccatttataaacatctatatgttgacgggatctatatccaactgacgtggagtcgtgataagtgagaaattaactaaaattgtaataactgctaataaagaacaaaaacaatttaaagacgtttgcctatagatatcggtaatagcgtaattcttttgtaatttattaatcgaagttgcaaagttaagattaagctcttaaatgcaagaatgaaattgggtagattttttgctctctaaattatcaatttcgaatctcattcccaggtcatgggtgaccccttataggggaagggtcagttcttttcgcttcaagagatgcgaccattataaaaatatctcaactattttggaggtgattgaagccatattattatggtaatatactactatttttgtgggtttgcaactactattgagctttttgtgagatttgaatgtggaatgtgatggttacgattagggtcctcctaggatatgactcaatcgtttaactcaattaggaggtgagagtcatttacttcagagttgtaccccgtgaccccttactctcgctcctcatgttatgtgtagtcttgtatactaggatgatatacttcctttcaactgtgccatgtgtagctagaatatgatagttagaccataaggatata

SEQ ID NO: 310087 - DNA, 1069 bp, Cannabis indica
catctttttttgacatcatgatacatttaatggttcatctagtgagagaagtaagattgtgtaggccagtatggacaagatggatgtatccatttgaaagaaatataaaggtacttgaaagttatgtgtgtaaccactatcgaccagaagtatctatggttgagtgctacttatttgatgaggttgtggaattttatttatagtacatggccggagttaattaaggaaattgaaattagtaaaccaaaaactgacccagatgatgttgatagaggattaagggggaaaggaactcgtgtccaagtttgaactagatcaatctcaattagtcgtgatgaacaataatccagaagttcaaccatatataacgtaagttataggtagttttctctttgattaacctttaattagtcacgatgaacaataacttaattaatattacatatttttcactgatcacatagagttattacaatcaatggttcaaagatatcataaaaataaacaaaaataggttgtagacgaacatcgtcaaacattcatcgggtggttaaggaatatcattctagcaaagttgaacaaaccgaatcttggagtatctgatgagttgagttgtattgctcttagactaaattttgtggtagcaaagcatgaagcgtatatgagcgagagttgttccattgactaaaaaatttaaaaaatatttttgttaataaaatattaaatttgacttaaatattttgtatataaatatatttttgatattatgtaaaaaaaatatgtttatttttttcaattaagtataaaaatttaaatttgacttttattattcgttattaaattaaaatttaataatttaatattaatatttataattaaatttatttattatgaataagtaatactcaagtgttctatatatacatatgatcatggcaattgaagcatctccaataattaattttggtataaaagttgttatttactttcttttcatcattatatatttatagggatatgattttgttctgttattgtactttcacattcacagattgtaatccgtgat

SEQ ID NO: 310088 - DNA, 1631 bp, Cannabis indica
aggtttgagttggagtcttgttcttagtctggttacggtttcgagtctaggtctaggtccggttacggttccaggtccatgtcctagtttcagtcccattctcgggtcccggtatacttcaagtttcggttctaattttgggtcacagggtacgagttcgggtctaggtttgggtctgggactgggttcaggtccaggtcttggttcgtgtcttggtcttggttcaggtctggagttggtcagcaaatgcagacaacggctatgggtttggtccaagcgctgggtccatatccgaatcacgatcttgggtcctagtttggttccatttcggatgccgagtcacaagctgggtcctaggttcaagtccatgtcggggtcgggtactaggtccctgtccttgttccggttcctaggtctctatcccaattctatgtcacagtcccagttctggtttgggtttttgtcctagtctaggttcggatttgagtcctagtctttgttcaggtttgggtctcggtctgggtttttatctaggttcgggttcgggtttaggtcctggtcttggtccgaatcctagtccgattctagttctagttgtgatttggagtttgagttaggattcgagttcaagtcgggcttcaatccctggtctgagtttgggttcgggtcgggattttctaggtctggatcaggctccgggtgtgggttcgggtccttggtgtgggtccaggtccaggttcaagtcccaagttttgaactcgttctatgtttaggttcaattctaggtgtaagtcctggttccaatctcggtctgtgttcgagttcaggtttaggtccaggtctatgtttgggtgttattctaggtctgggtctgagttcgggtcccgagttcaggtccgattttgggttcaagtatgggttcaggttttgtcctggtctgtgtctaggttcctgtccttgtttttgttcggggcaggttctgggtctgggtctgggtccgacttcggattacctgggtccaggtcaggtcctggtttgggtttgggtctacatttgggttctagtccaggtcctgtgtttcgatcccagtctgggtctgggtcggtattctattctaggtctaagtttgtgtctatgtctaggtcaaaattccagtctcgatcaagggcttggtctaggtccgagatcaagtcccgagttcaagtttgggttcgggttcgagtctcagtcctagtcaaggttcggtaccaggtccgggattgggtctaagctcgagttttggggcttggtaatggtttagtttgggtacgagtcctgaattccgatgtaggtctcggttccaaggcctcggtctaagtcccccatccaagttcgggtcctaggtcccggtctgggtccatgtttgggtttgggtcttagtcccagttttgattttgatttagtgtctcggttcgggtttgggtccgggtttgggtcggggtctaagtcctagtccgactctgggagtttgggtccaggttcagatcccagtctgggtctggggtcatttcaagtccgagtttgggtcccgggtgcgggcccaggtctgggtctggcgtcatttcaggtccgagtgtgggtctcggtttggg

SEQ ID NO: 310089 - DNA, 1367 bp, Cannabis indica
tcactgccatattcattatcttcataaatcacaactacctttcccaatgacaagaacagacaatatctgcaatgcacttaatctcagcagaagcatcattagccattgatatcaaataaggccatcggaacgctgcatcaatgaaggtgttatgcttggtgccactaatgaaataactgaaacttgagtttggtttcctacttcccctattataacagcttcttcccatctttccattccaacaatcacttctaatttcttttcttcaatcatatcttagctgaaacgaaattggagaaagctattagccatgacttaaacagataatgtttaaaggtaaaaaaaagtttcttgaagaacttaccagaagaagctgctttgaggggttcttttattgagtcctgaaaataaagtaacagcttgtggttcttgttctttgaattatggttgaagtttagagctgcaatttccatggcagctttttgctctttcccaattcgagaattaagatcaataataaatccaacgttaatgatattttcttcattagtaccttcagcttgagctccataataagttgtaataagaagaaagacaagtagtacgtgaaacatggaatgaagagttggaactttggtaaggaaaacaaaggaataagtcatctgttagctttaataatattctaaaactagaatttcattcactactttatggttcatgggaaaaaatttatgccttcgtataataaatatttatatatatgtgtatgtatacttgagccttattgcttgttagaaaaggttgtaaattgattccctcaaaataaaaaaaaaaacaaaaaacaaaagacgtgaatttgatacctttgactttacttggtctcaatgttgtacaaagggagtagaggaagatagataactggacaactatgaaattaaaaaacaaaaacagttttttcctttgaatgcttaaacgttattttcttgaaactttggggaaaaatatctatagctttagcggctccaaatttctttggggattttgaagtcaaatattgctgctatataacaatgaaatcttgcaagtggatttagtcttgatgcgcgctttctcattaatttattcattcaaatcatataaaaaatgctaattaagatttttcaaacttttgatatgtagcaaatcattttcacattaaaaattctaccaaattattcaatttaaaaatatttatttaattctattcaagtttattaattttgtgattgtttatatactaaagcctcgttcggtaaccattttaaaaatagttttttgtttttttaatcaaaaatttaaaaatataaataaaaatcatgttcggtaac

SEQ ID NO: 310090 - DNA, 733 bp, Cannabis indica
ttattatgagatgcaaaaggtaatttcatttgtttggaaagatggcaagtaggacacctattgctactgttgtaatcagtagaaaaattcagtttttatttattttatttgcaatgagtacagatggatggccaaggccagtgtgcaattggtctttaattggttgtacattgtaaaaaactaaattggaagcttgaatataggatgagtcctactggatgtagtatagtttgccaaatctttcagctgtctcaatcgtcaatgtgtgagaagggtcctagatgtggcaatagttagagggggtaattcaatgtcttaatgttctttgtctttcttggtggacaaccatggaaaagactttattaagggaaggacagggatcaagaagtaatatttgatcatgaattatatgataagattcatttaaaccctttatgaaattccacgacttaatcatggttgagattgtcttgagtttgagctgctgttgtacatgtgcaattgattcgatgcctgagttgattaattttgtcccacattactgttaacttggtgaagtaggaaataaaagattcatcaccttgatgaagatagatcaaggtttcatttaattcaaagatccaaggacctttgccttagttgaatctattgttaagaattgtctacatctcaatagcggtatatgacaaggtccccatgttgggtttttgtgccctaaataaaactatttcaa

SEQ ID NO: 310091 - DNA, 1733 bp, Cannabis indica
tccaagctcatcctgttggggtacataccgaccacccttacactaagttttgcaaaagcctgatgcttctggctatagagttgggacaatacgaaataatttttcaaccctccacattagtaaaagggtaggctttggcagattttgtggcagaatgcacggatgaagaaccagatagttcaaaagataatcccaagccaggaaaaagactagaacagtagtccctaccaaaagaaaatgaagacaaatctatctggaagttacatgtagacggatcagccaccgatcaactttctgatacaggaattgcgatcatcacacctatggggaaacctctgcacgaagcaattacatttgggttcaaagcctccaacaacaaagaaaaatatgaatcgctcatagctgggctaaagcttgctctggaggtacatgccgagtacattgaagtctacagtgactcacagtcggtggtaaatcatgtctcagggggatacatggctcgtggagaaaggatggtggcttatcttagtaagatcaatgacttgctcatgcaattcaagggttataccctcaagaaaattccaagggaagaaaatgaaactactaatgctttggcatggcttgtgagtagcacagtaatagataaggccaacctagttccaatccaatttttgaaagaacctagtatcacctctgaaaaagagatcgaaatgatagatactacaccgaattggatgactcccatggcagcttatctcaacattggagaacttccaaaaaatagaaatgaggctcgaaaaatgatgagataagatgcatggtgtatcatagtagaaggtgtaatgtatagaatagatttctccatgccactattaaggtatgtaacaaaagaagaagctacgtggctcctgtctgaggtacatgaaggattttgtggtaatcacgctgagggaaaaatctatctaagaaaatattaaggcaaggatatttattgcctacaatgattgaagatttaagggcccatgtgaagaagtgtgacaaatgacaaagattttcaaagattccctgagcacccccaaatgagctaatacagatgcaaagtccatgaatcttttccatatggggaatagacttgatcagaccgttacccaaaggaaaaggtagagtacaatatgcagtggtcgaagtggattacttcactaagtggacaaaagtcgagcctctggcaacaataacatccaaataggtattggattttgtggttaaaaacatcatatgccagtacggacttccacacaagattgtctcagggaatggtaaatagttcgataaccaaatgatcacagatttttgtacaccacttgggatcatcaaaagtttctcggcagtagcacaccctcaaacaaatgggcaagtcaaagcagtcaacaaaacactcaaagaaaccatgagaaaatggctcgaagaagctaaagggaactggttggaggaattactagaagtattgtggtcgtacagaaaaactaaaagaacaaaaaccggccaggcacctttttccatggcttatggttatgatgcaaagctgcccctggaattagaagccccatcccacaaaatactaacttatgactaggaaactaatcatgccctcctgacagaatcacttgatgaaatcgaagaaaaaagagcttcaacaaacctaaagcttgtggctcatcaacaaaaggtagctc

SEQ ID NO: 310092 - DNA, 2108 bp, Cannabis indica
attattattattattaattacttgagaaaatttattgtgatatcacttcaatcagttgaaggctaataaagtggtcattatgtgtgtagtatgaagcccttagggtttattttaggctgcttcacaatgatgaccgagcattgcgcatggtgaaagcaatagtcactgacgctctccaaaaccactctgtaataataatattattatatatagtttgatcaagattcaagaacaacttgatcgatatacagattatatagtcattaattaatttgaattacctctttataggcccatagtcatgagcgcccacaactaagacagatgcacggtttttctctacagcttcacagagaatattccggggatttccttcaataacatccatcgaaaattctttcatctaccaagaacatagaactaattataagatacatatagagtaataaacgtacttaattgtattaaagcaagattcttttcatttaatttttatatatttataatacctttttagtggcacaaatttttttagctttcccaacaatctgctcacctatcctcctcaaatcacgttcgatagaccgcaagacctcagcctcggcttaaccaagatcaatttatataaaaaaaaaatgcccatattaaaatcatacaaaataaatgatgggatttgaattacaagagtaattaatagggattatatatatggatgttaataagttatattactagggctaatgagattgagggaggaagatggacgcatggcgtggacaagaatgagattgaagggaaagttgggagcatagggaaggaagaaccggtccagagtccactctagagcatagcagctgttctggccttcgtcgaatccaaccaccattattggtttctcactcgtatccattgttatgatcttcttcttcttcttgcttttctttggtatgggagatgttctttagttattaattaatatagagtgtgagtgggtgtgtggagaagtaagtaactactagtgatcgatagatatatatactgatgataagctgtgttgagataagaatcgtgtaactgattgcagttagaaaacactactttattattagaggtagttattagttaacggttatatattaatttgaagttgtaatatatattacaaatgtgaccgagctgttattacagttcttgtaatgagtttaaatgctctatctacatgtatttatatatcaacagtactatgaagagtagtaaaattctcaacgtgttgaatcttggacgtacctaccttgaaaattattaattagttgttattgtcacatgatcgtgtttacgcattatgtaatattcataattcgagtgatctaaaataatgaattattaaaccatgagattgagtaaaataattgttatttgtatttaaattattttaattagtataaatgtgtggagtttgtataggatggatattaatagtagtgtagtatgttgatgagtttaccacaagaaagaggacttttgcctacccatatatatttactggtaaaagttggatattgcactatcaaaacagaatctctttttgctactggttttttgtgctggcaaaagagatcgacaaattggcatcaataatatggaacttttgctgtacggaaaataaaaagtactgacaaaaataactattactagcacatcaatgaaagatgaagatgtcggtgtgcgctttccactaattgacttaaacctaggaaatgatccaaatcctttcacatatataatagtgaaatacaacaaattcatctaagagagttagagtttggaagccagaatccctaaactaactttttaagttttttttttttttttttattttattttttgtatagattaaaaaactcgtatgagattaaagctcatagaatcaatagctagatatattttgatcatttctttgtattgcatattgtgtgctaatttattttgtatttcatacacgcttatatatgcttcatgttattcataccaagttctaacacaagattaagtttacgtaataatctaatattatttaaaagggatagtagatctttacatatgtatta

SEQ ID NO: 310093 - DNA, 1707 bp, Cannabis indica
gcttaaatttgtagctctcttggatgaattttggagtcgatagcttcagaattgcaattaagtgtgagatatgacttgatagcgcagcttcaaaaaacaagttgaatcgcgtcaatcggatcaatatattgagggagttatggctattttactgaaggttgttcaggacccaacgcctaggttgacatcctaacgcccaagttcacatccagcgcccaggttgacattgacgctggtgatgtattttttgatgcctaagtgatattttgacatcacttagtctatttttgtgttcaggcgaagctggtcaccagttctcagagatgttatgcggaaacgggagactcgaaactacctagtttctaagtaaatcaccttgtcagaaatgtgaaaatatgaagttgtgaatttgaatgttttgacttcattgctatcagttattgtgaaaactagacgaacggccgagatgaaatcagaatcaaataagcagaaccaaacataccaggccatatgtcaatctgggcgatgaatgctcattttggagctttcgagatgtcattttgatattttcaaggctctagaacttgaagacaagatctcctaccccgcttttgaccattttggagagaattctcatagcagaattggcatttaagtgatcgaaaccagcgttcatggttgatggtcaacatgggcactgggctccattttcatgcccttgtcattgtggttttctccccgagtttgtttgtgtcttcattatttctgatgatgaaaaaaatgtttgtaataattttttgagaaactgattggaaatggcccaggttgacaatatgtcaacttgggcgttgagccgagtgccaggtgtcaacctggttgctgggtctagttttaggtcacctggaagttccgtttggtccccagaaatagatgaatcttaatctttgctgaaaacagggaatatgcctataatacttctcggaaaaaattctcgaaagtggcttaggttgacaaaatgtcaacctgggcgttgggctagcctcaagtgtcaacatgagtgttgggcccttattctgcacccaggatgtgttgtttttccccaaaattacacatttccccatttttgatgaagacaaagaaggtgtgtgagccgaattttcgatctgatgcttggaagtggtccaggttggcagattgttaacctaggcgctgggttgcccatgcactgggtgtccgggtgctaaaaaatgagcattctctgaatatgtttctaatgcgtcaaatatgttcgtggtatgtctagttcatgtcccaatacaaattttgacccatttgcactaagacggtcccagaatttgaaaccatagttgaggccatcaacctgggtgcaaggtgaaaccctaggtgcccaagttaactttcgatgtgctgatttgtgtatttttagctcccaaacttggacttggttgctccatgtcttctttatagaatactgaaagatagtgagttaaaactatagggtagtgagttgaaaatgacttaacggaattcgaacttccattccagagttttcggagtcaacctaggcgcagggttagggacccctctcgggttgactgctatgattaggtgttaggttttatgccctaaataaaactccatttcaatgtaatctattttattcaacatcaataaagaaacagaagt

SEQ ID NO: 310094 - DNA, 1524 bp, Cannabis indica
agatcctggtaaaataaattccaacagtatccaataccattgccaaaacccctaggcatccatcttgtaacaaatctctagcttttaataccaagattattggaattttggatccctaaactgatcccacaaacacaaatggttcctctccctcgggttggaagataaccattatccgcttactatcaatactagcaaaatacttggacaagaaatccattccatgtatgatatcaagattcgttaagtccaattatactaaatcaacacttaactcctaatcctcaattctgaccggcatagacctaacccaccttttagagataactaattctccaccaggcagtagggttccaaaccccttatcataactatcaaatggtctacgcaatttatcaaaaattctggctgagagctaaatcaaatattacaaagaaataagagttgttgactgagagttgaactataacaattgaggggctagcttctgcatcaacctaagtaagagcaaacaccctggctgaagcgggttttgcttctatcttctgctcttctttctttagttgtgggcaatctctcttatagtgtccaggcaaaccacactggaaacatcctcaccctttaccctcacccagatgatgcttcttatagttgggacattttgggttagtgtattaggttttggaaccaccttgatagttgccacgactctggttccctcaaaacctcttgttccgatttaagccagcaggtgcaaatggttcctttctcctctaatcagtggtcgattcgctaccacccctaccataaccagaggtaggaggagcagtactccaccaacaatcggagtcccttgggactcttgaatgcacttagctatgcccttagctcatagtgcctttcccaccatgtcaacataggtggtgttatcatttgttatgatcatcagttcgtgtttaattttagagtttaatcaatccatatacttttctttcttactgaagtcatttagcacaattctcaaggccaacctatcgaactgggttgtatactttataacagtcatattctccttgcgctacaaactgcctcattgtaatactttacattaaatagattccgaaaatattcccaagtaatggtagtgacatcccgagaaagatccaccatatcccaccagaccgtggcatcctcctggaataggaatgttgcaaagttactctgccattgccagtgactcccataaaaatcaaaatttgagtaataacagtcagccactattcagctttcatcacatttggacctcccagaaagagtagaggttcttgcttgcggaatctttcgtacagtggttccatcgagttcatgatagcgactggctctgcctgcacagcaggggcaggagccacctacctcagacgtctgatctcatcgtcttgttcattaattctggcttgcattacagcaaaccatttttcaaaattctaggtagcctgcggtgggttaactgttggaaattatttt

SEQ ID NO: 310095 - DNA, 1317 bp, Cannabis indica
aaaaaaaaataagccgaaattgatttcagggtctaaattgtacctctcacaaacataaggtccaaacggtcacttttgctttacaaaaataggatctaaaatggtatctaggctctattaaaatccgataatgatagctaatggaaagccactagtaaatatcacaaactattttgaggtaagcccagaactaaataaatatttaagttaatatctacctttaattccaggaggtttgtcatcttctttcggaggctcgctagagtagaaaggattaccacgtggtaattggcaacgaaaaaccttcacactaataaccaaaacataatcaagaacatcatttcagtactgtagatatatatacatatcattatagttggatgagcaagagcaagcaataccttctacaaggtttatcgggatgacgcttccattgttcatgttgatctatgcgaagacaagccattgacgtacaaataaacacaaataacgtccgatgaaatgcatattccacatcctctggtgcatagacctaagcattaatttaagtaagaaagttcataaggaaatcaaccttgaataagtaaattttacgagaaagtaaaactcgaattccctaatacctgcagcatgaactgcaaaggttctccacatatgtcgcaaagaaaagatctgcctgatggtagattcacaggatccaaccaagcctacattacacaaatcgcacacttaattacaaaaccattccaataagtgtatacaaattttctcatagtacagaaaagagagggtttcgataacatacaggaacacctccagccttggatgggaaaaaatggcggagaagggaatgggggttcttcggcttttccacaaaacctaaaaccgcataatcagtttcttcatcttcatcatcttcttcatcaatatcaatttcttgatcttcttcgtcttcgtcatccaaggaggtaatacgaagacccctgaactcttccaccgaatcacccctcatactttcagccatttactttgaatcagcaatctgaccaacaaaattagcacttagtaaaataaagaataaattagagaaataaacattcacatatttccaattcaaacacaaactagaaccgaaactacccaacaaagaaaagaaatttttctgaattcagagctacattcaaagaaaattttccgaatgggccttagtaaaccaaattttagaaatgctgaaaaataatccacattaaactgtgaattacgaaaagaaagttaatggaaacgctggttagttgtaaatttggaaacatagtgaaa

SEQ ID NO: 310096 - DNA, 3498 bp, Cannabis indica
aaaaaaaaaacaaacaaacatcacctcttgcttctctttctctttcaatcggcctaaaaagaaactagagaaaaaccagtctcttttcatcaattttttgagtaatctaccgggattcaaggttgtttggtgaatcaaagtctaaggtaagccttttgtaacgccctgacttacagagacgctacgtgtgtacttttacaaacttattattaactaatctattagtttaggaaaaagtgtggtttaattgaaaacctttgattaaattaaaataagactttcatacaaaatactgtcataatacggggatctcctgtttataaaattcttttatatccagttactaaaattgttattacaaaagtaaagttacattttcaaacataggaaaagggttgatcctgcttctcggaagccaagacaccacagctaatatgtacatcgctgggagagctctgactcatggtcgaacacaacttctatcctccttacctgcaccataaagcacccgggagtcacaatgactcagcaaaaaaagctactaaatcgaatgcattgaaagtgcaagtattctcatcacaacatagtatacatactcgtggttcattacatattcagcatgcatatatattttaacgcctatacaaacacattcattacacattataagaaattcataccaactcataatcatcaatttcatcttttcactaaacatacattcattcaatacataatcacataattccagtgctttataaagcacccttaccactcgctatccatgagctatgtatgtcactatcgttgcttgataaagcgaactatatgtaagaaacctatccgcgatttcaacgagtaattactcataatggtaatgaccgtatctatattcatttacaataacggtaatgagcgtgtctttccctcgatcataatcgggtcacaaacgataataatcgtttctcactatttcctcgattatagtcgattcacaacaaatacaaatcattaatctcaatcttaatcgagatactaacgattataatcacttcttatttaaccacttagaggtgcataaaacttttcttacctcaaactagtatcgggtgtgcgggcagacctgagtggaaccatgctcgaaagttcggggtcctatgtcacgataacaaaactcgatcaataacttatccaatccccgaaacaaacctaattaacaactagataaaattctaactccccactggttcaaaaattagcttatacatctcaaaataccctaaactaggttctggaaaatgccccgagccaaaaatttagttcgagaaaaacccataattttcctcctgttggccaactggttaaccagttccccagtaacctgtagaaccggttgaccggttctggcaggttggggattttctggttttacaccttgaaaccaatcccaagctcctccaatcctactcaaacttctcagaacactccaacaacataaaatcaaagtacttaaacattgaaaactcagaaacaacctaaattaaccaaatcaccatgtttgactcaaaattaggttcttaaactcaattctttagtttccaacattaacagccatgaaaaccatccaattcacaattaaacaaacccaatttaattttaaaatcatactttgaaccccaacaactgcacagactcgaaaccataagaaaaaaccaaatttaaccataaacctagaaaatcaaagggatggaataacagacttacctccaagcttgggttacttctacacctcactaccacaatcaaatcctgcctgaaatggagtttaaaccctagtccaagttggttttctagggctgtcgagagagagagagaggagaaagcaatatatgtgtatccttagttatttatttttctttctttggttttatcttaatttcctaatcttattttacaaattaataaacttaaatatatttctaattcagccatcaataaaactgaaatccatataagacaaaactagggtaatacttagtaaaatgactattttacccctcccactaaacttaaactaaacacaacctaggggtattttggtcatttctaatttcctcgatcaaacctacttctcaacattctaacctagtctaatataattctaatgtaaagcaacttcaatcgccgtgacatttctgatcacttagtcgagtttccacggtcaccgaacccaaaaatcttttattttgaaaatggtatctacaatactcttataatcaaataaaatctctgtaattaataaattacgctttatttattcctttactcatatttcactaattaactcgtaattaacttatgtaagattataatcctactctgatacccacataatcacatatttaataaaatatgtttaattaaatatcattatattttttagaatattacaactatcccctccttatagaaattttgtcctcaaaatttatctaaacaattcgggatacaactcccgcaactgcgactctaactccccagttgcatttcaatctcgatgttcttccacatcaccttctcttttctattcaaattttttgtatcgactgttccttatacgataagtctgtttgaaattcaatattctcgtaactccatatatggatcgtatgtacctcgtacttctaaaacattgaaatagatgctgtaaactccagataaagcagggagtatggctagctgataagctacctcacctaccttttccaaaatttcaaatgggccaaagaatctgggactcaattttcccttcattccaaacctgtaattcccttcattggggacacccaaaggaggacaaaatcctaaatttgaaattcaatatctttacgctttggatcagcgtagctcttttatctactctgtgaggcaagcatacaagctcaaatcttctcaatggactcactcactctttggactccctcaagtccaacgtatctccgttcaccgacttcatcccaataaatgggtgaacgacactttctaccataaagcatctcatacggtactgtgccaacaataccctgaatatatctcaaaatgaactctaatttggtatacattgcttgttgtagactctcctagtaattggatgtaaacttcgaatcttgatcctaaacgattgaccttgggcaccatgaagtcgaaatatctccttgacaaaatcccttgtttgaagtaatcatttgtgatatttagaatattaggacttggtagggcgatagttttttatccattttattcctaagtccttaaattgcttaagtttgaagtaagggtaaaataagaattttacctagccttgtctttagtgagttggtgtcattttctatccatttctagctaaatctttgttaattaaaaacccttatttttgttaagtaattaatcaagaaagaaaagcaaaaaaaaaaaatcttgcttctctctctctctctc

SEQ ID NO: 310097 - DNA, 2022 bp, Cannabis indica
gataatttgacaagaagagggaagaagttgctcaggaggcaaagtacactgttagtggctatgtacctgcctttcaatactgggcatgtgaagtcattaagaaagtgggcaagaagtatgctcaatgtagcgggatcaagtttctcagaatggtaaattggaaaactctagagggccagtggaaacaagatgtcaaggcaaccgacattgcactattgttcaacactcgggtatgtttcttttctgttctgcaatatttttttttgttaattcagtaaaaatgcttgtttaaaagttgaattagttattcttgacttgcttcacgacgtttaacgattttattcacaattttttgatttatactttgtttttaaatgttgtgttaaattgcgacttatttcgcaatattttgcaatatcattttcgactaactcacgtattgctttttaattcacaacttgtattgcgataatttgcaattttatttgcaattcaggtatatatttcttgtttagacatgttatcgacatgtcgcgacatgctgtcgactatttgcgatatagtttgcaacattttttgaccgtatttaattcttgtttgtttttttttattttgcagttggtcgtaaagaactgcttgtttctccgacccagtgaagaagaatatttcaagaacattaatgagggtaaagcccctctttgttttgagatggacatcgaacaaacagtggagggtgatgctacacaggagtctgtgtttgaaagcgaagcgaagaccattaatgaggccatgacaaaggtaaatttagttccaccaccatcggcatcagaagtaaacgagccatctacttccgtcactccgtctgctccaaccaatacatccatggataatgacctggaaaagatgttggatagacttcaagccgtgcaagataaacttgaggcctagcaagctgccatcatattggcacaaacgaaattagtaaatagccatctcaatatgaggcggtccttcacggagagtcagaaagatctaaaggagactttgtcggctaagatggacatgttgatggcaatgttgaagccaaatgagggggaaccacagcccaccccagcaacgaaagattaccgaccaatgaagagcgataataaagatgtattcctagaagattgggaaccaaatgataatgagacaacgtcaactccattagaagcaattatcacagtcagtggtgatacacaatcatcggatgatgtcctacttctgactggacccttagaagatgtaccatttgtgaggaagaggaagccacctatgtacttgaaggactacactgagaaaaagaacaagaggcaagttcttccacagaacgtagattcggaaagaccaatagaccgtagattgttatgtatgttcaagaggtcattgattagagacattcccaatacccgacgtaggaatataaacactagcgtcggtgatgtgaagttcttcacaaagttgttgccgatgggggattggttggattatgatgtaagtattaattattttattcttttataatgtttttattattttttgttttttgtttttttatcgacatgtcgcaacactgttgcgatacaaaatgattaccatttatcaatatttttgcgacatttttgtgacatattttgacttaaggagatttaagttgcgatgaaatgcgatttaattcacgacatatcacgatgcagattgtgatatgatgtatttgatgcaatattcgtcctttagtttaatttgataattttttctcttattttcatgtagcacatagatgctatatcacacatgctgaggaagagatgctttcaatttctagaatcgtaccctcaactaggtgtgatttttaacacaacactcccacaattcttcacgagcatttgggtgtgtcactagggtgacaaaagtaccttttaatggccagaagcagtgactgagtactacaagggtacggagagtcattacctaccatgttgg

SEQ ID NO: 310098 - DNA, 975 bp, Cannabis indica
gagacaccttctatagtaatttttaagcctccattattcttcatacttgaccgtatagtgatagagtgtcatgtccacacatagcaagtcaagtactcaatcatagtgagtaagacgatgataaccaatcccaaaggagagaaagagatccaggctcagatcgtgataatactctgcgataaaaaggaacaagggttagagatctgagcggaaagagttatattattttgctgcaaccaacgtaaggttttctaaactcttatgtgtttaattttattattttagagatattcatatataggatgttaatcaacatacttgttagtaaatctagatcctggtaaaatattcccaacaattggcctcatagccatggtaatgatttactttcatgtaatatggatttaaaacgatgaatatgttatttgtgttgatttgtatgtgttcatattggtttacgttttatttgatgatgttatgtcatttatgaaatttttctatgaaaataatttatttggattcttcgtttttacgaaactcaattctgatgaaaaacaaagaagttatggctatttgaaatttcgggtgcatatggtcgaggaccatgtgaaccaggcgctcggacaaggcaatccgcgcgcggatttcagacacgcattgtctgaagcacatggtcagctcggcgtgcacttgtcttagacaagggcttgcgcgcgtgacatcctgaaattgtcgagattcctcgacgctgggaggatgcaacatttcacttgcgcgcacgtaggaggctgcacacagcgtcctcgtgggcagccaagtggttttcaacaaaaagtgcgacttttgtgatttttttttcacaaattcaaattttttgttttcaaaacccttaatatcaatttaaaatattattttttaatatttaaaattaaatatcaaatttacaaattaataatatttaatttatttaataga

SEQ ID NO: 310099 - DNA, 1965 bp, Cannabis indica
aaaagtccttaaatctaacaatgaatttttaacggtaaaaaaaattcagtataagtacatgtcgaagttcggggaaaaaatcctaatgagcctaaatataaatgagtctgtatcgtggtataaaaaagtatgagttgtatcgtgccgtgtcatgataaaatatgagttgtgttgtcatatcgtgctataaaaaatatgaggcgtgtcgtattatgctataaaaaaatacaaatcgtgttgtgttgtgcttaaattttgtatcatgcttaaatttgtatatattttactttgatcggtcagttttcttatatagcctcattttgtattcttctttttgatattttatttttacaattaatgaaataattacaaaagttatatattttttttatagctttaattatttttatataatttttcagtactttttttacataaagtcatataaaaaaattcattaggactattaattttttaaaaaattactaataaatattcatattattaacattactatttattattatcaaatataaagtttttaacatgtcgcgctttaagaatagaattgttgtcggaagaattaagataacactaaattctgcgagtattcaagcacaacaaaaacactcactagcagttaaacgagtattcacctaaaacagcgaatatttaaaatataaggtacgaaatagataaaaacaaaaacaaaaatataaagaagacaagagaattatagtggttcagttagagcttgatttgcttagtccactttagataatagtttttgtttagtttatttaaatttggatcaccctttatataaaaagcatgtgccctttagaattacataactagtcaaacaagactgttattacaataaattacagaattaaatcaagataaatgtttaaaaaataaatgaagagtagttttgcccgttcttggcttaattacagcaacgtatgcgacttgagaagtcgtagcttgtctatttgtattcctaacacacgagctcacgagctctatggtattatattcgcaggataggcctttaagcctatttcattgaatgtctacagtccattgagcgtattcagacattctatgcattgacaacttagaacatgtgagtttttcgaacataataatcattcagacaaaacctatgtaaagaagcggtctttacttatcgcatgagagatatcttgatcatcacatataattagtatatgtgcaattagtactatcttctctcggtcttgcttatcctttgactatgctgggcatagtatgcgactagactctgcctcggtcgcaccttctcacaagttcgtatcatgcgagattaattgactatcctttttctggttgcactagttattgtgtcccttgcttttcgattcgttttacaaaagaaactaaaataaattcaaatgaagaagattgcagcatcgcagttaaccttaagaacaactacattcagtttactccatcgctcagaagactaaacagtagatttgttgttcattcaacccattagctatgttgttcattcaaccccttagcttgagcattcaactattgtgcaaagtatgtaactggacaactccatttagctgtagaaaacttgttgttctcaacaactaacaacaatttgatggcgaattatcgaaaaataaaaagataaccaacaacaaaataaaataaaataaaactatgtcatagagacaagactaatcacagtaacttaaacaaaagatactcaaaatcatgtcacagagacaatactaatcttagtagtaaaataaccgaccctaaccaagacacgcctaagtccgaagagggccgaaaaacctggccataaaaataattttagagaaggataattttaaattagggattatttcacaactccacaaaaacaacaaaaaaaaattacaaaaatacggttgtacgaaattt

SEQ ID NO: 310100 - DNA, 580 bp, Cannabis indica
ataaaaatctaaaattcatgcaataaaaaacttgacacataaaaaagtttaaaattatacatatagtcatatataaaatatatataaattacttatttattataaacggttcggtctggtttaaccgttaactatttattacgaatcacaaccaaaccattacgtggtaaacggtccggattaaccaagccaccaaaaatgattttccctattacggtctacagtagttcagattgtcgcggtcgggatttaaaccgtgattttccagtttcgatgaatagccctaggttttgttgttttactatcattatgtttcaattcaagtaattttacttaattgtttgtttgttgttactaattttttgattattctattgatgagatcgataataatcaattatttattggagtttcgaaatataggtccatggtcccaaatcacctctatacaacactgtacaaagaaatattttatttgatgagtaaattttgagtgagaattaatttctatgagaaataaattcttaagtgcaaaaataatagtttatgaaattatcgttttgaataattatgacaatta

SEQ ID NO: 310101 - DNA, 856 bp, Cannabis indica
aaatgcatatttattggtctcaaacgttaaaataaattaaactttaattaatattttcaagtaaataatgaaatatatttttacaattgaaaatatttagtttgactttaatttggtttattttgcaagaattatgttgcactctagtacaagtgatttctatttattgatatttgtagctgtcaaaatgctattaacgatcatcaccccaatcatctcttacttaacgtatttgtaaatgaactgaaaagtgcgaagataactcttggttagagtattacttctcacatacttatgattaacttaaaattatagaaagcaacatgctaggaatttttatgtcaaaagaacaaagactcctatttgttctcaacagtttgtctcttgagtacagccaatttgttgtattcttcttgatcaataatcagaactcatctgacatagacaagcttgatgctgaattgtgtgcttatgaaaagacattgtcaaatgcaaggaggtcattctttaacactacaaaccatgaaaaaggaataagtgagaatattgagaaagaaccctctgacaatactgaaacttcaagctcagttaaaaagattgggaaaagttcttctactttctcattttatcttaaacaacagattgaactagcaataagaacaatcaaagaacaaataagcagacatattatccaatgttctcactgtggatagaagggacattataaatcaaaatttcccagacttctcaaccgtaagaacgaaggtagtgcttttgtttttgaatcgtgtgttttagagaatgacaaatctgtttggattgttgatcctagatctacttgttggaaattatttta

SEQ ID NO: 310102 - DNA, 697 bp, Cannabis indica
ttttgcgatatttagcaatatatttgtaataatagatcgaatctgtagttatacatgaagtttagtgataattaacaatgttttgcgtatttagtgatgttaagagatgattgtagcaatgtatttgtgatattagactaaaaaatgattggagttctgggttcgacagaggggattctggaaaggagttcaatgccaaaaagtgagagttaaagagagatttttttgaaatgtgaaattatttttgagagaaaaaaatattaaaagtataaatattttatttttaattagatggtatattaaaagaccacactttatatttaatgatcctaagctaaattttcttgttgtttcatgtacctccatcagtgggcgggtcatccaattaatggaatacaaagttcataaattggtagagaatgcaaccaaaggactactaatacaaagttcataaattggtagaggatgcaaccaaaggaccttagtagttagtagatgcaattggtcaaaattcatctttggtggaagaaagtgctgtacttttttgtttctttgaattccaagacagtagatttcgatcaagataaataatataacgagcattgctattagacatcagtggtgcctagcaccttctcgacatgtcgtattgtgattggctagcgatactctctataaactattatattaaattata

SEQ ID NO: 310103 - DNA, 1595 bp, Cannabis indica
atgtgaccccataaatagattaaatcaagtgggaacaaaaactgttcccttgttacaacagataccagtcatattgactgaaatattaaaacttttataccagtgattacttattctttaccgtcacaccaagctcgcctgcaatgataacagtggtggccatgtctaaaaacatcccatgctcaacaactccagctagccttaaaatggaatcactagcaaccttcaaatcaccaatatctttcttgaaatacaagtccacaatatagttcccattatctgtgacaaaaggctctaccttttcaccaaaagtcctcagctttgccacacaaccagcatcctcaaacaagttttgaagcctttgcgccgtgaatttccaacaaaaggggataatctccacgggcatagccaatccactaccccccaaatgcttaaccatctttgtctcatcaacaatgaccacaaacttcttgcaagcaccctcaaccattttttctctcaagagtgacccacctcggcctttaaccagattgagatacgggtcaacctcatcagccccatcaatggcgagatcaagaactggatgagaatcgagatcagataatggaattccaacggatacagcttgttcgtgggtcatctttgaagtgggtattcctacaatattcttaagcttcccctgatgcaaaagctcgccgattcgggccaccgcgtgcttggccgtggaccccagttccgaggccaagaaccatcccagactcaacatactcaacagccttgtaagccgctatcttcttcagctcatcctgggttagaattacaggagaaggcaaagaagaagaagaagatgaagatgagggagatgacgccaaaatccccttctccatgtgacaaaacccgaacagccacatcatcttttttattgccacatgtgacaaaacctgacagaaaaatcactttacaacatcataaatagtttggagattttttaacgggcaaaaattcagggagcacaataatgcataggtcactttacaacatcattttgtttatctctctttttttcggttctataccatgaaaaatgatctttcagtttgagcattgcaagagataaagctctaagttgaggagggagagagtaaagcaatttactcacctcaacatcatcttgaactctctttagagccttgccaaatattttatacctataaaaaaagaacatatttttgcatcaatattacactaaatgccaaaaaaaagctacaacaacagccagataaccactatgatacttactctttcggttcgaatatgaactccttcgaaacggcatatgctgaagctgcagtaacaccaagtcctgcaataatgagaagactgtaggaagaaccttccgtaaatgataatggcttctcgggaatattatatgttggagaatcaaagggatcctcaacggtagatatgtcctttttagtctgccaaaggacatgtagaacaaagttacgaatatactttaagggtttgaacaaccaaatgccataaaaactgataatagaagggaaaccaaatgccaaaataatgaaatcaagaaa

SEQ ID NO: 310104 - DNA, 2632 bp, Cannabis indica
tttatttatttggtgtttttggtctaggtatcaactattctagcagcaattcttactttcttggttagattaagatggactcaaggaagtttcactgttatttagacgaaagttgtagctttaataatagttgtattggattggttgttggaattagactttctctcttttttttaagccttaattgtttagattaaatctctacttttttttaagagatagtttttttttttggattagattcgatttttgttttcttgatatacagaagctatggtggattgtcttgtctattgacatggtgagattgttcgtttgatttttgtttggctgttttattgtggtctgtctctgtttttttggtggttttgttgagttctggttggaggtatattcagatggcaacgttgtatggtactgaggacgttgatgataggttgtcgatcatcccactcgaggaggaagaggagccaacggttcaatatgatcggcccttggtcgatgatgcagagcttgatacacgatggagtatagtcggtcggtttcttacggataacccgatcgattttatggcaatgcaaaacttgatggttgttctttggaagccaggtatgggcatgtttgtgaaagatttgggtggcaatagatatatttttcaattccatcatgagataaatattcagagggttattgatcggagcccttggacgttcaagaacgctcctttgatctttgagcgactgaaaactggtgatattccgcgggctttgcgattgcaccaacttgaaatctgggttcaattgcatgacatttaggcgggatttaagacggaaagggtggttttggatgctgcgaactacatcggaattttcattaaagccgatgagaataatttcaatggtgtttggagggagtatctaagggtatgggttcggatcgatattgagaagccattgaagaggcggatgaagctacaattgaccggcggtgagtggttttggataaattttcgttatgagtttgttcctgcattttgctttatttgtggtattataggccacaccgatcaatattgttctagattgtttatccaaccgattgcttctattgtcaaaccatatggtttgttcatgaaagcggtccctcggaggatatagtacgctgtgggctcgaagtggctccggtcggcttcggttggtgctccagtagtgccacagccgagaggagaaagggatgttgatatccctaatattcggggcagtcagcagattttgttttctaatattatgggtcaaagtttgttgcatgggaatagggattcggttggtggccatgcaagattagggggattgaatgtaatgaatagtggtggatatgatggagtagatataataggtagtaaaggacaaaatgaggtggctgatttggagattgatgaggaagggatgctctttcttgatactaaaaggaaaagaatgggtaaagaggtggctattgggccgaatgggcctaaggagcaaagtagtgggattttgggccaagagaagggtgctcaatcaaaaaactattcaatggcgggctcgtttgattgggttcgccaatcattatgagtatattgagctggaattgccatgggcttgggaacccttttcaattccttaaagatatggtttatcagaagaaacccacttttatttttctttgtgaaactttaagtttgaaacctcggttggagttaatttcttctcaacttgggtatgatggtatgttctcggtggatgcgcaaggtaggggtggtggtctaggtatgttgtggaaagaacaaactgacgctgaggtgagaggcttttcccagaatcataatgatttgattgttcatcataataatttatttgattggcggctcacgagtgtttatggtgaaccaaaccgggctcttcgaagaaatacttggaaccgtttgagaactttgaaagaagaatcagctcttccttggtgtgttattggtgatttgaacaatgtgttgagtcaagtggacaaacgtggtggaaatccctatccaaattggcttcttaaaggttttcaacaagcagttgccgattgtgatttagtggatttggagttggttggtcatcagttcacttgggagaagggtagggattcagaaagttttattgaggttcgtttggatagagctcttgctaactcggattggatggatttatttccgagttctcggttacttaatctcatgttcaccacttctaatcattgtcctttgcttcttgatccttcttctcggcttcaaactggctctactaaaggtttccgctttgagaatgcttggctccgtgaagagacttgtttctaatattcaggagcaatggggaggctgcgcttctaacaacattgttgacaagattgtggctgttcaggagcctcttgcatcttggggaaaggatttgacgggaaactttaaggagaggattcaaagctgcaaaataagaattggtgctcttaagaattgctctgatggtgcctctatttctgaatatcgtgaagcaaaagagcaacttgctgagatttatcatcgaaaaaaaaatttggcgtcaacgatctaagcagttttggt

SEQ ID NO: 310105 - DNA, 1506 bp, Cannabis indica
gacaatgacttttccgacactagtgtctgctccagtaacttttctgacgatatttcctattaaaatttttaccaactttatttatggtctattatttggttccttatattataatctgtgtttatttttatttccatatttttttacattatttaattatgttacataaaagtacattttattattttttctcatatttatgaaaaagaaactcctttaaactaatcaatcactataatatattttagggattttattatttacgtacaactagagtaaattaataattagggtcaatgataataacacatatcaatataattatactattgttacaaaagataccaacgaaaatttaagtttttatgtttaaatgtgacccaacaaccacttgaggctagctcaagtggctataggtaggtgtgtgtgtgttggaagtcctgagttctagtcccaagtaaaacatggttgtaatatataaacgcttaaataaaaaaaaaacaaaaaatgtgaccctacaaaataattccctcataataaacattaaaatttatgttagtattctaatttgttccaaaattacccctgacatttgaaacatcctccatttctctatctttctttttctcttaaaccctctctcattctctcgcacttgaagctcccccaaccagagagacaccaccacaaaacttgtagtcgccaccaccattgcagttcacgaaactcgccgcccctctgattctctccttctctcgcactcgaagccccattccccattcctgaccaacaaaaccccttcaccacgtgacccaaaccccaaaccccatttgcggaccagtcaccgtcgattccatgacagtccacacatactaagatttttcctcatttacaccgccacgtgaagtcacccgctcgcctccactgtcacctccaaagtcggcgacaagtaaggtaaggtcttatttttattttttgagtttttaatttggtaggttatttacaaacaattttaaggctatagaacaattttatgtgattgtttttagtgtgatgtgtatgattttcggttcaattcttgagtttctaggtgtgtttgggatagcttttaagagagctagaagtacttttttgaaaagctatgatccaaaatgtgtgtgttaaaattacaaaaatatatttttttaagaatttaagcaaaaatttcaactttttcctaaatttggctaacaccaactttggaaattaattagtaggagtgtcaatggagcgggtcggatctaatccgcctatgatcttacctgattcgaatcatgtaatgatccgccccgtcccgatagatcagttaaccggatcggatctgtaacgcccacatttgaaaatttactaaactaaaaaaaagctaattatattatactgtaattatttaaccatataggtcaggatcccgagttataaaacatagttaaaaattacatttactattacaaaatccattaacctttt

SEQ ID NO: 310106 - DNA, 653 bp, Cannabis indica
aatttttgaaactaaaattattttaaaacgatttgtttaagtatcattcattaacttactcgaggacgagcaagagtcaagtatgggagaatttgatgagtccatatttattttataaatatgataaatttgcatattaatattcttatatattgattctttaagttattgattagtgtgattttaatttcttaggctattttaaaggctattcatgcatttagagtctttcggaaggattttagcattttttggtggaaaatagtgaaagtcggtgagctcgattgtacaaggcggaacttaattgtaaattcacacaaccttagaggcagaacttgacttggagctcaacttgaaagctttagatctcgttgttagatttccagaacatcttgaatcgtctaattccaaatattatcgagagagttgtggtcaacatactatcagtcatcacagcaggaaatttctataaaatagataacgaagaaaaaaagataaattttcaagaagagttgcaattttttatctattgtttaaaagaggagttatctattcttttagtgagatatttcctaatattattataaattgaatcctaattctaaggggatttatctatccactataaatagaatcctaattctaataggatt

SEQ ID NO: 310107 - DNA, 872 bp, Cannabis indica
taaataaataaataaaagaatgaatacaaagcaaacttgaaaaaaaaacatcaataaggatcggttatataaatgctagaagcatatttaaattatatatttttttacacattatttaatttagtcgtaaataattttaagtgcagacaatattacttttaattagttttatgatttaatttagtttggctaattagatttttttttaaaaaaaaaaaaaattatatgtattaaatcatatttttttttaagttttttaggttgttaatatttctttgaattattagaatcgttagatttaaaattttgttgtctaattttaattatgtaagtttaatgttgatgaaagtttaggaatactatacggacatgttaaaaaatttgggggcactttttagcatatcaaagttcgggaggtacaatttagcacatagtaaaattgaacagaatttgacaaaaattcttaaatttaacagtctcaataattcaagaaaaaattttaacggtaatatattcattgacataatttatcacatattaaatttaaagagtaaaattcataattgtccaattaattatttaatattgtatgtaaaatatatataatttaagtataatattatatttattattcaaataaaataaaagtctttggatctctttggtcaatgtgatactaaaaaaatatattaatatgatatttttatatataataaaagaaaaatatctgtaagttgaaaactacacaatggattataatttatttatttttttattattttatttatgataaataactttataatattgtgggaagttcgaagcaagtagtagtaaaataaatatttttttattaaaaataatatttattt

SEQ ID NO: 310108 - DNA, 1577 bp, Cannabis indica
aaatgcattacattttatttttttcttttaaaatttaatattcttaataataaaaaagctaaatactatttattttttattattaatttttttaaaaaaaaaaaaaaagagagatgcaatactaaattaccatagctgagtgaaccagtgcagtatatggaacatgattatcgaattgaagtgtcaatatcatgtgaaaattgttatgagaacttggttttttttttttggaacaagtagcatttagtttctgatattaagaatattaagttttaaaataaaataaaaataaatgtaatgcatctgaaccctccacgtatctatatttatgagttaacggaaatagtagtaacggtgtaagagaattgtaacattatgtatttttgccttcaaaaataaacattagatatttaagtgtataaaaaatgaaacattaagttttatgccgtaatttacccaaattaaaatgattgttttgaagcttatatttttcataccataaattattcatatttctatatagtttattattcccatcttaattaaccctgtttttttctttgctttctacaagttcgaaaagtaaattcatgcaccaactttattactggatgatgaagattcctacacgtattaaattaataaattatttctgaattcaaaaaaaaataaaaattaataaattatttctagtggcctctatttaaatgtgtagacaaaattccaaattagaggcacaattatatttttagggacacgattttgtttattgtacttttacgaaatgtatttcgtgatgtacggcagccgttaaatgggagagttatttgatctgaaggctgcagttgatctaggagaaattaaagttaaaaaatggtaacgcaccttgagacccattattacgtaccctgagacgcatctaatgtatttcgtacatcacagaatacattctgtgaaagtacaataacagaactaaatggtatccctatatttttatttttaattttattaatatcactttcttaaatatatatatatatatgtgtattgatataacttttattcgtaaccaaatttaaaaaaaaacctacttataattaaataacatataacctattaataattacaaaatcaattataactaaaatataattttctttacattaacacaccaaattataattttctttttttagaaaaactaacattttagtgataacacaatattttctaattatatattaatttccttgtaactaaaaataaaaacagtacaatagtgggaataatgaaatatattttgtaccattttcattaggttgatgattatgtctcgtcaacctatcaaattcaagtaattgtatataactaatgaagatgatgttttgatttgaatgagttgttgaattttaattggttggggtaacagttagtcatcatttaaacatgcatctatttagaaaactcaacgatcactacaaaaattactatttttagtgacaattttttagtcacaacataattctttttgtgattaaatatgatttttagtcacaacaaaatattacttgtgacta

SEQ ID NO: 310109 - DNA, 2363 bp, Cannabis indica
cttattgatcatgaaagtcatggaaacctaaaaactatcaaaagtgataattagagttaagtttaacgtcaattcttcctcaagaacaacatctataataatcttatttttccctcaaactcaacatactcaaaataataataaacttttctcgtttcaaacttgaaccttatagtgtgggatcaaaaaatttgtagctctttaattactagagtatacagtaaagtatagttccttactgtttttgagtccatattccttttatgaggcttataagaccttatcttagttgaacatccacaaatagaatatatccttatgttagactataagtctaaccacaaccttagtttataaagagttttaaattatactttacttgatgcacagttcaggatttatgttgcaattttaagtgtttctccctaaaatgagtttcatgaagaagaaacacactcctagctatttccttatataaatgttaattgcatctctcaaatacccttcatgttaggtttgtctaacattttgtattggaaaactaaattacatttctttagtagttgtgcaaaataatcttacatgttacttgatttgtcatacctcctatggcaatttaaccccaatatagttagttttgacgactttaattttcttacctagttaatttgtcaactatggtcttgaaaattaaaaagaaacaacacctaaagattaatgtccttatcaacaaaataagtttcattagtctaaagacaagatactatttgttatcccaatttttgcactctgacgtggcatcatatgatggtgacacgtgaaatcaactccatgtatctgctcgcaagaaatatgccgaacaggggaccacctatattcgctcgtacgaagccctcctaacctggcagtgagcaatccacgcagcatgccaatacttagcaaattcagctctcgcatcgtgagtcaccgaagaaatccctacaactttgggattagatcacagggatatggcatgctgtttgaatcccttgatcagtgtattttgtatttaatacgcaatctttttgcttataaattagactcactgttgttggctaaaagcgaggttaacattttggtgctttcattgacagttgaactcaaggtcattctcaaatctaatcacaagtacaatggtggtacagactcgcagaggcgtggttgatctagcaaatccacgggcagtggatcctacactgcagaacatagggaatacgagggttccgccaaccataaatcccgaacagccatcaactgcgggtcacgctgtgacgactcctgtgagtgagatcgtgcctggtgtgcaagatactgggaataccagttcagcagccaaccacgacattcctagcactgtcgttctgcccgtagccaatgttcaaacaaccattggagattacactaaaatccaaaacctccgtgctgctcttgaaatcatgcaaggtcataccaacagcctgcatcatgatcaggaggaactccgcgctgcagtaaatctcgcatttgaagagcagaggcatatgttcgctgagtggagggacaaggagatggaaacgttaagggcttagcaagcagccattggcgatcgaacccggtaggccactgtgttgatacgaaaagcctatcaggctaccgaacaacagcctataaccatcatccccttgggcaaaactaacaaagatcccacggtgaacacttctcagactataaatggccagccgtccaatccccggtcacaggtcccacctgtgggccaagcagtaggcgagcaaaccttgtctagcaattcatcacgagaagtcatacctaacaattccaaccaagtaaatggtgccagccagctaattggccaaaccaaccagtcactgagacagccaggtgtctctatatttgacagattggggacagttcatgatctgcgagatgatttgaacaggaggagatggtcggacgaccaacaagatgcaccagtcatccaacccaggacccgtgctcaaaatctcgctcaaaaggatgctgacgcaactttggtcggccaaaaggccgaacagattagtccagctgtgcaggcacagttggatgaactaaaaatatgttccaaggcatggccgatcagaggaacaatgaccttgagttcgatcaggcacgtggatctcctttctccccaaaaaataatgtcttggaattgcctcacaagtttaagatgccaacctggaaaatgtacactggaaggaagatcgtgttgggttttgtgccctaaataaaactcatttcaatttaatcagatttactaatatagatcagaaatcacattttatgttgca

SEQ ID NO: 310110 - DNA, 902 bp, Cannabis indica
ttttttttagagaattgctaaagagaagtactggtgcttagtatcattctcggtgtcataccactattgatgtaattaagtgtcaggttatatataacttaataaaataacttttagggaatatcactcactaatgatgggacgctacttatagattgtactggataccactggtgtccaataataatgtttttttttttttaagaaaatatgacaaatcttatgtggataagagagaaaataaaaatatttatatattttaagatgatgtatgtaatttgaaaattataggtgttgcctccatagtcatgattccttgcacaattttcttaaataatgattggacaagatctagccatcgtttacggcaacgaagtagcccactttgttgagtcaatctgtgagaagtaaaatcgattcatattccataataatgtcaattgtgtccttttttttacaactgagaataatcattataaaacaaacaagtaacgattacaacaaaaaatgcaagtctctaatcatagcagcactagcaacatcggggagaccctgtttccacaaagcattaaaataccacaacttagagtatattttagtaaacaatgagctaaaacattataaattatttggtttgttagagcattttttatagtaacactatttaaagatactatatatcctcactgaacacttctcaatgggtattacccataaatggttactaaacaaatttaaactataaatattaatttcaaaaatattaaaccatcaaatgttgatttaatgacaaataatgaaaaagaaatttaaacttctatgcttaatttaactacttaattaaaaaatataaaaaaatatttatttttacactatatcaaatatgggtgcacttttaatgg

SEQ ID NO: 310111 - DNA, 819 bp, Cannabis indica
aaaatatacatatatataggaatatcaatcaggccgagtcaggctcgacccagcatcgattcggctcggcacgatatctctttagcatgattcggccaggcctgactatttgtttcagcctggggggtcaggcccgacccgagataaatgggtcgggcttgacccgacccccttcttttttttgaatagtaaaattttcaactttaaatatctctataaatttcatttctcataatacatctttagagacatttctgttaaatcgatattgtcttttaatgttcatatatttttttaaaaaaatattaaaggttatatatctctcttttactagaaaaaaaatataattttctaacaatgaccgacacaactattattgggccgagccagattgggtcaatgacctgaataaagcccgattgccaggggccaaagagacccgacccacaaaaaaaacacaaattaccattcctatatatgtacttgtcacaacaattaattataaatttaatttggtaataattttttcaagaatcattaatttaagcaacattaaaggtcaatcacttgttattgatttacaacaattaggatcaaaggctagagtgattgatgaaaagagacatttattccactgcacagatggtgtaataattaatctttgtctatgttaattagaaacatgttttatgtttttcttattttatttgatgatgaaataataaaaatatgttcattaattgcgatcctataataatattcccaacaactagtcattatcatagggtacagtaggccactgttggaaatattttacca

SEQ ID NO: 310112 - DNA, 2553 bp, Cannabis indica
aggcttgtcatatagcttttaccaacttatgaaaccattagctcgctcgaggaactctttcatagtgtttattgagatcctcctgatacttttccaaaatttactcaacggtgagatacctcccaatatggtcgtgtaacgaccttcttctgttaggcctttcaccttagtgacctcggccatgaacctttgaatgtagtctttcaaaggttcaccttgtctttattttatcttcacaaggtcttcaagctgtgagggtattttcctcgaggataagaattgggtaaagcattcttgagagaattcattccaagaattaaatcttcttggggctagcttaaaattgttgggctgtttcgtacaaggttgttgggaatacctggcatcgtacatttctagttactttttagagatctatttgtatctcaaagtactttatgcgtgtcaggagatcttccttcctggtgtacatcatccaaactagaatcttgaacttaggtaggggcagtgcattaatgtattctgaaaaatggtgatccccttgacctgtcgtgttctagatctaacagctttggtccagaaaggcccttgatcatgtctttgatttaatccaattgtgtttgcacagatggtgatccccttgacctaccatgttccagtgggttgttgcccgaacaacctttcttagttggaaaaatgtccttggtcggccagccttggccagccagccaagtttcccttggccagttagctctacatgattagtcacccttccttggccggccaaaccagccgtacttcttagccgaccaagctaatctatgggttgacaggaggtaggtcgtactaattacttgggttcagtgggtccacctgtccgaaattattgtttagaggtggaacaaagtcacttcggttctcgttccttaacttattgttgtcatgtgcatttttgcttatcctaggacccaacctatcaaagacaggccttagaatgacttgttcctaaatattctaatggagagcattattgtgttggccggccagggtttggccaattggtaatgtctcttctctagagttgttttgtcgttctctaaggccttttggttccaagaatcgactattcttatcatacgacttgtctggcaagatttaatcgtctacaggcaaaggaaggtcgatcctcatgctcgagggacctaattagactgttttctaatgtctacctgcctgtagaccctacctgacctatcgatgagccttccttgcaaaggatctcttatcatatcctggcctctttcgataactctctcattgaaccaccttatcaggttactggactccctattacagtagttcagctccgcctaatgggcccagaggatggccttctagttatccatccaccataaaaattaaaatatatgctggacaaaagcatcgaaactaacagcgtgtggttcttcttgtcatgtttgagtgacctggccttcagctcctctgagcctatccagctcaatatcatctccgagatccaagtgaggctcaccaatagatggttcaccaattcctgggcctatttctcttgcgtatgtagtaccgtggagcaatcctagttgtgttctaaggaggttgtttcatgttgatggggccttctgttcaaggcgttgctagtggatcagttctgggtggcaagggctaattattaagattcacaaggttaataggatcaaccgaattagcagtattggtagactttgtaaggtttgttggacttgctggagtggcaggattggcatgattagccggattgatggtattagtcagatcagtaagaccttctgtggtgggaggaactcaaacattgagatcaacgcatcatataatcttgaggaagacccgaggaggtggaggttgtggttcttctggttagaaccatggtgattgatcaggatgacaaacaattctctcaatgaaagtaccaaaatgttgaccttggacttgccaactgacagcgaagccttatttattactgataatcaccacgtgtaagtggtaatagcaaatagtaaaagtgacacgacgatttatagaggttcagtccccttgtttggcgggtaatgatctactcccctttttgttatattgatttttggagataataccatgcaaattacaagcttagaccttaaaaattctagctatggctctcttgaatattacaatggtgagaactgagtgttatagatccagaacaagtgagatttaacgagaggaatagattaatgttggaaataattttaccaggatcttagatctactcacaagtatgttgattaacaacctaaatatgaacttctaaaacgataataaataaacacatataaagtatgagaaaccttacagtgggtgcagcggaataatatgtctccttccactcagatctctaacccttgattcctttctgttgcagagtataatcaagatctgagcccgaatgtccttcagttggatgtgatccttcacagtcttccaatctatgattgaggt

SEQ ID NO: 310113 - DNA, 2883 bp, Cannabis indica
ttatttctaactcaccatccttcagtattttgaaccaagaagacaagaagaatccaagtccaaggcctagaaactgaaaagagatgaaacaacaccctagaaatcagcccgagtgcctaggacttttaccgagcactcaacttgacattcctaattagagtttcagtttttaggtttcttagtgcaaatggctcaaaattcgtacttagacatgaataagacatgtcacgaacatgttagaggcctcataatcagaatcaaaacacttcccatttggagcacctgatggccaggtcaccttatgatgcacctaacgtccaagttgatatattgtcaacctggggcgcttccaaccacaatattgaagaagtatcccgatcattttcttcatctccatcaaaaataaggaatcaagtgctttcaggaaagaagcaaattaacgtgggggccaaaactaggacccagcacgcaggttgacctggtgttaggtcccaacacctaggttgacatattgtcaacctgggtataacaccctacttgcttagggatgttgcagtgaatttctaattaatgtgcacacctttgctaatgaaaggatttctcaaaaattgtgtcaaatttaaacttttaattaagctttaaacttttataaataaataactgtacataaaagccgggattccattttaaaagtttacaacaatattcaaattacattttataaccatgtcgcttcgcgactacaaaataatagcccaagtcatctcgagaccgaactctccaggtctaaccatcctgatatgaacaatcatcctcaagtcctggactcactggtgctcatcctttgccttttttttacctatacatataaacaatatctatgagtcgacaaattcagtaagaaaagcacaaaatatataacataaagctgacttgtatctaggcgctcatacacctatttacaagacttcagatgcatcaaaaatgttcctagtaaatttacgacccctgtaccacctacactaagtacaagtcttgtactagtgttggtagggttgaactgtacctcgagtaccactgagtgctgtaccacatgcactacatactcatcccataatagtgttggtaacactgtgtcgtaaatcatatactgtactaatatactcagtaccgtaattgtactagtgttggtagtatacaaacaacataatacaacatgtatataatacacgtacacatatacgcatacacattttatactaatcttatctcgtttcctgattcaagtgtaccagtcaatctgaatgaaaattcacgcgttgcacggaggcccgatgtcacatttatgataaattgataagtgtttactctagggcactttttaaatatccgtataagtttttctaccaaaatatatggtaaaatcaaccttaaataaatacatatgtcatctctaagttatatccatacggtagaacttgtcacaagctttaaaccaaaatatagaacgtctaaaatggatatttgagtgaaaaattatggctaaaatacaaaaattgctctcctcggtaaagtcttaaatggaagccccccaattcggaagccctattccggaagctccaatctagaagctccattctggaagctcccccattccgaaaggtgaccaattccagaagctctccctatccgaaatctctcctatttcggaagctctcccattctggaaactcctactaggcaataagggctcaaaattttccaatttttcaggcccccaaaactagctccaaacctaaccaaaagctactaaacattccaaaactttattttgggatattctaaagataacccacaacccaaaagtgttaggtcctttttttggcaatttatttgccaaaatattttttaattaatgtgcatttttattgagcatttaaattgttttcattacattgattttgtgcattttattgctcttttctatcttaggaaagaatcatttttcagctggacttttctttgtttggaatcttcttgtaagagaagaaattctcttatggaaagttttctacttttgggaaacttgactttccctttttctaattgatgatttcgatttttcctttattagaacaaatcaaattatctttatttggcaggtttgaagtccaaattcgtgatcatggttcaatttgaaaagtttcctttctaaacctgatcgcaaaccacgtcttcttcgccgtggacgatcagcaacgacacctccacctcctcgaacctcccttgtagctccctgaaaaccctaaggagctccagtaccgtcgccgccctcgacctcgctgtaggtcgccgcggactcgcaagagccagccgccgcttccactcctccttggaagacaattccaggatcgacctgcgcgtgggaacaatacgccacgtggaaatgacggcggcgacgaggaagagtaggtgctctaacgatcaaggcagtttgaacttggcgcttataccgcacatggcaccgttaaggatgaccccgtcctaggatcctggataacggagagaaatgagaagagcgatggcgccgtcgagggactcgacatagaggaaagccagaagcgaaggggagtggagggatcgaaacttgtcgaagaagtcgatgcaatcgtcgactatggggttgatgtttggaatgtgagggatgagaccgtcagagaacctatgccctggtgatcgatgacacaaacggcaaaggcattcttcctcgatagaacagccttaaccgagtagagatactcaatttctactggtgtggggcatccccagttcagaattttatacaagaccttcaaactatcaagaatcctgtaggagatggga

SEQ ID NO: 310114 - DNA, 2378 bp, Cannabis indica
tttaatttttcttttaacaaaagtaattaactccttattattagtttcattaataattatataagtcattagcttttcacactataaaaataaagcacactcatcatcaagtttctacttcccctatttctctaccacatccttgttttagctttccatttaaacaaactcagttttttataagatttaagttttgcaatgattaaataagtctaggccaaatattagattaccccaacaagtttttcacttatatacagttttatcaagagcaaaaacaatatttattgttagagttttaatttgaccagtcactaatgcacaacaagataagaactccacaaagaatacagtgtacactaatagattgcatccggtatttacttttaattatcaaaaattataaattatattatttagatacacataataataattttacctaataactaattattatatttttctttaatttttaattgtatcacttttaaataacgtaaaaaaaatcctaacataaaatttagtatacgtgcctcgcacataactttttgctagtatatataaaatgtggctatgtcatagaatactatgtgtaatatgtttttaacgtttcttttttaaaataaaaattaacgggagattaacgtctccgttaactttcaaatcctcaatttatatcttcatctataatttttttttttcaaatctcaaatcctatatcttccagcaaacaattgaggggttaggatgcgtgaagactacctccactgaaagaaagaggagctcgtccaaattttgtcgtcgatggcgacatacaaaattctcaactacgtttgccggttctgttctagcaacctatctctctactctctctcatgcacatgtaaataccccattctcaccaatcctattccaaaccctaactcttgtaatgccactagcctgccactagccctctcccattttcttcccatcagcacagatccagcctcttgtcaagtagtccgtactcattattgggggctcctggtttgttatattttcgaactattttcactcgttctggagatgattcagagtacgaaagagccgaagattttgatatcaattttcatcactaagttgccccagtctactatgatggatgttgcctcagtaattggtaataatgatgaatcgatccttctagttcgagtggtcatttcaatatgacaggtttcatgaccttactgcaggcttaccttggtgaggtttaactgagtttcgttactgagaaagttttgatttttttcatcattgttctcattgtgaagcaaaactcttttggtttagttacgtatttctttgtatattaaatatgttatatacatatatatgtatgtatataacatttagagattcatggatccaaatagcagtggcacgaaatttataataaacagagtcaaagaacttcaaaaatcatgccaactagcagtctccgaagtgagttttttttcctctttttttttgtttccaaaattttatattcatatgtaaagatttatattataattatttgtattgttgcaggaaatcgatgaagagatatgagaaactactcgagttatgcatgtcaaaaaatgcagttccacaacgtactcttgctgacattattattaccaagattaaagagatagatgataatgtgtctttaggttaactcatttgtatttttttttctttccaaaatgcagaagtacgatagatgtaggatgtccggtcagtttgggattacttacctggtgacctataaggagactaagcaacaatttgcttgtaaatccatagcagcgaggaagctaatcaatctcgacgatatcgaggatctgcggcatgaggttcatattatgcatcatatgagtactggtcattggaatattgttgagcttagaggtgcttatgaggatcgacactctgtgaatttggttatgaagctttgtgctggaggtgagctttgtctttgttagtggtttcagattgcagaagcaaaattgttggaggtttcaatcatcaaattaattagagctcttttattattttgacaatgcttcatttttttttttttacttttgatcaattacattttgtgttggtggcaatgatcctttagtttgacccaacacatgaagcctttgtggcattttacgctgtagtgcatttcaactctgcataattttaataatttgaatttggctcaaaaaaattcaatctggttagtgctaaaaaatttgaattttgtcatggaaaattctgcccaactgatgaattcactgtagaggtgtagttttaaataaatgaaataattttacttgcctttcataagtagatttttt

SEQ ID NO: 310115 - DNA, 519 bp, Cannabis indica
caatgggagcagcaagatcaactcctatattattggcttctttcttctatgcttaaaggagttctcactcacgtggttggcaatgacacttcagctcaggtttggcacactcttgaggaatattttgcaacttagactagtgctaaggttgatcaatttactaatcaactacaaaacatcaagaaaggaactatgtttatcaatgaatatctttcacacattaaatctcttattgatcaccttggatcgatttgtcaccatgttatagttaaagaacacatcactctggctgcttcctggactgatgactggccctacataccaacacaagtctttccagcgtgctttatcctcactcgcccgcttcttgggaaacttcccactagatcacccatcctgaaattaccccgagctaagcacgcttaactgtagagttctttcatgatgggctagcagaaaagaagatgcatcttgttgatataggtagtaccaatcaatccatttaagccctcttcaact

SEQ ID NO: 310116 - DNA, 1056 bp, Cannabis indica
tcgctaaatattgtaaaaaagtggaaaactaaaagaaaaaaaaatgtaaaaaacgagcgatgggttgagaactctggcaatgggtggggattttggggtggttgagctcgtggattttagggctttagagtgcagacgacgaggcttagagagagactgtgagagaagacgacgggaggggcttgtgactggggttttaggtctgggttcgacgacgggcaggaccgaccttaggcataagcaggctaggctcgtgcctaggaccacacttttcgggtgttcaaaataaaaaatgaaagacttcattaggtttttatttaagtaaaattaagtatattgtaaataacaaatatttacaacttgattggttggagtgtacgcacattacgcgttggtgtgggtttgaatcccataacattttttgttttataagtaaaaacgaattttgtgtgagggcctcaaaatttaaatcgttttaggcccatatatttttaggaccaaccttgacaagaaggttttaggtcggggttagagaggtttttttaaaatgtaagggtatttttgagaatataatatattaaaagtataaatactctaattctaattggatggtataaacaatggactttaatttgtgggctttttatttgtgcttggtctctttagtttgggccttatctgtagggtccttttgtaaacttcactttggttattacataattagtaaagggtttctctcaactaataatgagaataaaatgaatgaaaaatcaataaataatttaatatgtgtattgaaggtttattgaatcacatttaatggatttggacttaaccaatctaatttaattatttattagatattaaattttgtcatctaatccaatctaatcgaattgagtcattcagtccgattcgatccaataaatatattggattgaatcggtttcaatcattggatgcattaactggtttctattcaattcattttagctactatttaagttggtttcattaaaaagaaagtatatatatatataaaatataatttaaaac

SEQ ID NO: 310117 - DNA, 1928 bp, Cannabis indica
gaaactaaaattaagtagcttccaaacctttctaaaaccccggcaccaaaagatagcatgcccattagactcaatactaaagccacaaataagacaattggagtggggaagaatagatcgtttttggagcccttttgaagtcggaagtatctcatgaaaacctctccaattacaatttaatactttgtttggtaaatgaagcttccaaaactttttctaccagattaaaaatacatccttagaaggagaagtagcagacaaatttaactgagaagccacataatatccacttttaacagaataagaaccatcttccgtatagtgccaaatccaagagtcttctttaggaaatttgcaaagaggtatggaaccaatacattgttgatcagcttcattaaacaaaactcgtaataaatccacattccaccctatccttgtctctgccataagttctttgaccaacaaattagaatgtgaatgattgaaagaggtaggcttaaatgaaaaaggtcggggcagccaaggatctttaaacacaagaatggtgtcaccagttccaacctttttacgtaacccttttataagaagttctcttccccaaatgatgctcttccaaatataactaggagatcttcctactgcaatcatataattcattgatgaaaaaataaaattattatagctcgaaaacaccaaaaaaataacaactataaaataaaaattattaaaatcaaaaggattacattaacaacttaatcaaaatcagtgaataagttagaaaaataacttataaagaaaaatggttcagaattgattactaaaaatgaaataatcgaatacctaaagcatccaaaaaggaggtatggtgaaaatatttggccttataaactttagctggaagcgaatcaggtgtattaagaattcgccaagcttgcgcagctaaaagagcatgattatgatggacaaaagatctaaaacctagcccacctttttgcttaggataacagagcttatgccaagctaaccaatgcatctttttttttatgaactgatgagctccaccaataccgggccattagtgattccaattcatcacagctttaattggaatttggaaacatgacattacatatgtaggtatagcttgaattactgctttaagtagtacctctttaccaccataagagaagagcttgttttcccaagaattaaggcgagaccatactttctcctttatattactgaacagtcgttgtttattctgtccacttagcattggtaaatatttctatataacctcagtcaattgcatttgaaaagttcaacataaagagatttcagatcgtctggagtatttggggagaaatacaatgtggacatagtgaaatttataatctgcaataggtaagaaataatctataataattatttattgaaaaatactagtgaattatcaatattaaaacaattattaaagctatgtaaatctagaaagtagatcttttaagtaattatacactaacaaaaccaaccatttcataaattatatatatataaaaattggaacatattttaaaataaattgatggtaactagattgttgagtactaagttacaataatttacagtttataaaagaaaggaatatacataagtaagggaaagaaagaacaagatttgtttatgtctaatttttagttctatatataatcttaataaactactatagtaaaattgtcgattatatacttacacttttaaataaataaattggataaagaattggtaatataatccttccatgttttgaaatcttcccaaattttaagacataaaatcagtataccattattgggcatagtataatttaatgaattcctacatcctaccacaatataaaataaaaaaaataaaacttagttgaatga

SEQ ID NO: 310118 - DNA, 568 bp, Cannabis indica
ttatttagggcataaagcccaacaaagttatcatcaataggacgcttagcatgatcagagaaaaggatatacctacaacaagaattattcgaggtaaccaagaaagggaatgtctcgcggacttggaaggtaatgaaaggcgatggcctctggtagtatcttctctttattaagaatccagaaggtgataaaggttttagagacgttggccaggtcagaaccttacaaatatcactccacagacgattacacctttttctgacataggatcaaatattgtcccccgcgcctgatcatggtaatgcgcgttcgcaccctcaaatgtactttttgcccaacggccttgttagagtgtattttgcaaaggagagacctttgtgcgatgcgtgtccagattcgtacagaagtccttgcaaacagctgtacaccacacgatgaagaaggttcttaccaaccgacaatcaaatcatcctttttcaataatgactttagtagcgtatggagtacgaagtgttggaaatattttaccaggatctagatttactaccaagtatgtttcattaacatc

SEQ ID NO: 310119 - DNA, 1161 bp, Cannabis indica
tgtttatttcattgttttaaaattcatattaggatgttaatgaaacatacattgtagtaaatctagatcctggtaaaatatttccaacaatttaatcttgagctttctagtgctgatcattatctaatatttttagtgcctaaaaatgaggtagctatctctaatgaaaagaaatttagatttgaaaatgcttggttaagggaacctctttgtttccaaattgttaaagatagttggatctttgtattggcaaggggatacaagagaaaattttgtattgtgggaaactgttgagtgagtggggtgaggattatactgacaattttaaagagaaaattaaaaggtgtaagtctaagattaataaatggaagtatggtcgagatgctctgtctgttcaaaaatttaaagaagcaagaaagaatctatttgaggtgtttacccaaagagagattttttggaggcagcgttccaagcaattatggctacaagcaacagacagaatagtaagtttttccataagtcaacttcttcccttcgtcgcaacaatttgattgccaaactcaaagattcgaatgggatttagcatgattgggacataagtctgactgagttaatgatgggttattttcaaggcttgttctcttccagcgactctgatttgtctcatatttatgactgtatttatccttgtatctcggctgctcaaaatgaggatttgcttaaacctattgaagaagatgaagttaggaaagctctttttcaaatggaccctgacaaggctccaggtgcagatggcatgacatctggattctaccaaatatgttgggacgtggttggcggggatgtcattgtacaagtacaaaatttctttctgacaagggttctccctgctgagctcaataatacaaatgtggtttttatccccaagaaaaagtagcctagcaaaatgggtgttttaagacctatttttctttgtaatgtgttactaaaggtcataagaaaagtcctagcaaataggttaaggttgtgcttccttcagtaatatcttaaactcagagtgcttttcttcaaggccgacttatctcagacaatatcatggtttctttcaaaatcatgcattatttaaaaaggaaaacccaggggaggaaaggcttgatggct

SEQ ID NO: 310120 - DNA, 3290 bp, Cannabis indica
aaatcaacttaaatattaatttcgtatttttattttggggccattaccggggattatagttttattttataattcatattgaatttttgttactaacttcttttactttgataatctcaggtgtacatgtctagtggagatgatactcaagagaaactttaaagggttaaacaatttcttcagtcatcatctgcttctcgatcatagaagactatcaccaacaaccaactctttcaacctcttggttttgtcaaatagccactatcaactgatcctgagtcagattttgatgacttgattacttctcacaagaccatggctcaaaataggacattaaagtagttcgtcgtgccaaatctggaccaaaaaccactgtgcatccattatcaacctttcgatgtcaattttgaactgaaatctggcttcataaacttactacaagcttttcatggattacccggcgaaggccccaacaagcacctaaaggagtttcatactgaatactctagtatgaaacctacttcagttactgaaaaacaaatcaagttatgggcctttcctttctcttttaaagatgctactaaggagtggttgtactatcttccaccaggcactattgagacatggaatgacatgaacactattttcttggatcgatgcttcccagtctctgaagatggaagcatatgaaaagcaatatgtggaattcagcaagttactggagagtcactttgagaggagtatgattgatggatgcagcatgtggaggagcattagtagacaagaccccaacagaagccaaaaatctaatctcaaacatggctaccaattcacaacagtttggcactcatgagactctcccttaacatcacgataggttaattaagttagtaaacccattgagaagcaacttagtaagaaaatagctcaattaacctctatggtacaacaacttgctttaggctaataggtgaggccatgtggaatttttgagattgtgagacatgctactgatacctgccctacattgtttgaagatgagactgaagatgtgaatccagtatgtaattttccttgttaattaagccagctttatgaaccacagtcccaatcttatagacctaattggcagaatcatccaaatctccgctacggcaatcaacaaaatctccagcaacctacaaaacctactttcaattataaatagtggaaacctgtcgacaaaatcaagcaccacaagcttccccaccatcacctcccaagcctaccaataaataactcattaatgccatggatgctagttctttaaggttccaacaacaatctgaagcagcaatataaatttaaagaatcaattgggtcaactctcaaaatcctgtaatgggatgcaatctcaaatgttcaatcaactaccatcccaacctgagaaaaatcctaaagagaatgctagtgcagtgaccttgagaagtgatgaacaatatgacccacctatcatcccaaaaccaaaaacgacacaacccaaaccacaagatgatagcccaaaagatgaaatagaggcaaccaagctaaacaatcctgccccaccaaagcctacctttgtcacaccaccacccttcccaagcatattgaagaagactaagaaggaagaggttgaaaaggaaattctttcaacattccgcaaggtggaagtgaacattcctcttcttgatgccattaaacaagtgccacgatatgccaagtttttgaagaagctttgcaccaataagcacaagttggagggtaatgaaatagtaagtgtgggggaaaatgtgtctgtagttctccaaaagaagcttcctccaaaatgtaaggatcctggaagtttcactattctttacactattggaaatactataattgagcggtgtatgttggatttgggggtctccatcaatgtcatgccattctctatctataacttcttgaatttgggtccacctgaagaaactaggataatcacttgccgataggtcgaatgcctacggaaaaggtgtccttgaagatgtgctagttcaagttaatgaattggtatttccagaaaatttctatgttgttgatatggaagatgattccagtccttgttctactccaattttgttgggaagatcattcatgaaaattgcaagaaccaagattgatgtccacgagagaaccttgactacggaattcgatagagagacaatctgattcaacatttttgaggccatgaggtatccaagtgatgtatatgttatttattatagatatgttggatgacctctcccaaagggtgctacatctgcatagtgaagatagtcttgaagttgctatacgagagaacttagtgttgaattctgaggagaacttttctgaagagatggtagatgtcataattgcccttaataacgacttcaaaaagctttacaagaaggtggcgtaagtggaattgccaatcttaattgataaattacccatccattgtagaagctcctattcttgaactgaagacactacctaatcatctcaaatattcttacttaggagaatgaaacattaccggtcgtaattgctaaagatctcgaccaagtgcaagaagaaaaactgataagcgtgttttgagctcacagaactgccattgcatggtccattggaaacatcaaaggaattagtcctactacatgtatgcacagaattctcttggaagaaggagctaaacaaacatgtgatgcacaacaaaggctaaacctccttatgatggaggtagtgaagaaggaaatgttgaagcttcttggtgtgggcattatttacccaatctcagacagcaaatgggtaagccttgtttaggtggttccaaagaaatttgggatcacattagtttaaaaagaagacaatgagctagtgccaacaagaacgcaaactgggtggggagtctgcatagattaccgcaagttgaatgcggcaacaagaaaagatcacttcccattgccattcactgatcagaagcttgagaggctagtaggtcatccttattatcgctttcttgatggatattcagggtataatatgattgctattgctctaaaagacaaggagtagacagcctttacatgcccttttggtacatttactttccaatgcatgttattcaggttattgttgggttttatgccttaaataaaactctatttcaatgtaatccagattattcaatatcaaaaaagtaacagaagtatttttcattcatttgtgtatgttttggttcacttaatcaa

SEQ ID NO: 310121 - DNA, 1066 bp, Cannabis indica
tctgctttcatgtgtaggtaaaggaaaggcaagagctgagcaggagtgagtctgagctgggatgaggttgtagatgtcgactcagcgcgacgtggagtgtttggtctcgagaaatctggggttatttttgtggtcgttgtgcgacctagaaattttgtattttggaatattatgtttaaaagtttgaaaacgggatcctggtatttgtatgtagttttgttaattataaaatttaacatctaatataaaatttttaatttgacacgttttttgagaaaaaatttttgttagcaaagatagcactgtaattgaaaaagcactatagcgtgccttagcattagggcgttacatttagagattaaggaaatattaagaaggaataaacacgagatttttattttgttgagatgttaatgaatatttgtccacaaatcaatagtattaagcttgtaacaatggtgtttttacaatatttctctcaagaacactatttttggaatcttaacttttgaacccccaatgatgattataaggtcccttttataggtaaccatacattatgggttagactaatctcagcccaactaaggttaaatttatacaaatagctcactataatgaagtaattacaattattcatgggaaatcatatttgggtgcattaagccttgtagataagatctaatccctaaaggtaactagcaactatagttaatagtactattgatgttgacaggtcacgcgtgagccttccgtttgtgcatgggaaaattcatttatatcatagtagttgtgtcaaccccaatgggagaaataccttttctccacaagcctttctaagagttggtagaagagttagtaaatcattagttggggttttttcaggtctgttaaactttattattgagctataattgtacctgattggaatataaatatagtggctaagctaaccgtgaatgtttgagcttcattttctatccttcatattcttcaccattttcatttccatgctctcttttctctctttgcattttttaacgaaaatctaaaattcagagttcac

SEQ ID NO: 310122 - DNA, 1906 bp, Cannabis indica
attggtaattgataatcaatcctagtgggaacgatactctattttatcattatgctacttgattcgattgcgtatacttgcgtatcaattttaccaaacaagtttttggtggcgtacgggggattgaaattatcaatatcagtttaattaatttttattctaatttgatttttattttctcttttttctaacctgtttggttgagattttttcctatctcatgtgaatctattatatgcgcagtagaattggtgcagagaaccttgttcctttgaatcctgagattgagaaatctcacaagcaaaacaaaaagaacaagagagaagcaaagaaatcatagagcatggcgcataatgaaggggatgatctaattcttggagttatgcaaggaggtcagactcactctaatgttgaaaagagcctgcatgattatgtactccttactcttacgagggtacagaacagtatcagaccaccagcagtggaggccaacaactttgagatcaagccagctatcttgcaaatggtgcagtccactctccaatttagtgggttgcctactggaagatcctcacactcactcggctaattttctagaattgtgtggtactttcaaatacaatggagtaagcgataatgctatcaaactgagattttttccattctccctaaaggaaagagcgaaaaactagctgaattctctacaaccaaattctatagtcacttggcaagatctgactctaaagtttttatctaaattcttccctccttcaaaagttgctaaactgaggggagaaataaataactattatgataaatagtcagctccatggctcctttaagggggaaaaggtcttcgacaaggtaaccctatttcttctttagtttgtgttgattatgaaatacttgacctagttgctccttcatgccattagaatcaaaggttttgggtttcatcctctttgcaaagatatgaagcttgtcaacctctgctttgctgacaatttagttatcttttgcaaagataatctaaagtctattcagatcattaaacagactattaactgcttttgtgaaacaacaggtcttacaatcaataaaacaaagtctcaagtttactttggtggtgttaaagttgattgtaaaaaccaactattgaacattgttattatggaagagggagtgtttcctttaaagtacttggcttgaggcaaacaaagtggtgaacaactaactgtggtggaattctcgatcaaattcaacgaatacttcacaattggtctagtaagaatctttcctttgcgtgaagagcccaacttatccattccatgttattgggcattagaaattattgaatgagtatatttattctccttcaaaaaattgttgctttaattgataaatactgcagagattttctttggggttcaaatgggaattgtagtaaatttcaccctgcttcttgggaaaaagtttgtttacctaagaagtttggtggaactgggttttctaaaggtcgaaaataaaatatttctttgatggctaagtatacttgggcaagcaagacaatctatgggttaaatggattaactccattcatctaaaaggtgaagacttttggctagggccgacaaaaccggtcagacacgataacacgactcgaaacctgcacgagagttaacgagtttgggttttccttaaatgggttcgggttgactcgtctagcctgtctaataaacggatcgtgttcaggttgacacggctaacacgatattgacccgttaataatctatttaaagttattttagtattttaacgtgtcataaataagttataaacgtgttgaatacttcataaacgtgttattggttgacatgtttaaacaaaatatgcttataaacgggtt

SEQ ID NO: 310123 - DNA, 1301 bp, Cannabis indica
attaagatcatttgatctaggatcaacaggtgatattgaattgaatagatattacggtaaattctaatatatctaatcaaagttcaatatcggtcccttccgatgtatactccatacatccgatgctggtaaactttgccaatgtcctggaaaggacataacacttatccaaggtgtaagaatacctatcgctgattataccatgtcagtctaaatccagtgttctgacaaatcagggaataaactttcgaacatataattaagattatattccactgtgttgacaacactataatcattaacaaattgatatgttctggacttaaatagaattcatacattatgtaaataatcatgaaataaatcatgtgaaccatgcaacattaaatgttatttctcatctttattaataagtaaatctgattatattgaaatgagttttatttaggggcataaaaccaacagtaggagcatcgagagcacttatatgtgtttatgtgtgtggatcgtcttttttttttttcttatcaaatttttgtgtgtggtgtgtgtttatgtgttcaatatattttcgatttggtttacagaacatcaaactgtatatttcattttttgtttctttgggtttccagtgctcccaaatgcgcacggccccccaacaccgaaaaaccaccaccgctcttgccactgctcgccagctttctgggtattaatctgctataaactttttcttttaaatttttaattcatgttttatgtttgcttatacttgttattgaattatagtttttttttattattagctcaaatagagaatatgggtttagaactcattcttttgaatttacaattcgtattttggtatagattttctggttactgtaatataggttgaaaactttagaaattgctatgagaaattattttatttgttagtctaatatgacttaactttgagattatgtggaattgttctaattcctaaagagttgatatcgtgtttaattattcgaaattatatatataattatgtataaattgagttatttttgttagattttcacattatatgtatttatatatatgcgtctctgtgtgttttgggttatgggtatagaagaatgtttattaacttggctagtgggttgattgtgttgtgagaagttgagtgaattcattttataagaaacaaactctccatttaatttttcttttcatatttctgtttggactaatgatcattattttgaaagggtttaattgtaggtaaagatacctatgtatgtagaattaagtgattg

SEQ ID NO: 310124 - DNA, 2233 bp, Cannabis indica
ttaatattagcttattagcttttacactacactgcaatgcaaaagaggtgcttattgtggtggttgtaaattgtttggtgattaacaaagattttttttctttttggtaaaagagaaaaaagctcttatccaacattgtatgtttgtaataagaattatccaattttattttaaaactaattagtgatgaattaaataattcaagtgaaataatattgtcttattggaaggataaaaagtaaaaagaataaattaacaatattttcatacgaaatagttgtggcaatcgaaaggttttctctctagctcctagttcgtggcttcttgcaactacctcagttggcgccatggcaaaaatgagatcgaaggttcaagggaggcaaccaacatctataaagacgtggaaagtttgaaagaggggccttgtatctactgctgatgtcaaaaaaaccaaatcaatggatgaggttattggcatcgaaccgattcatttcacggatgaggagagtgttgatgaaggggatggtcgatgctgatctgtttcaagcacctttatctcccaaatcctcactttgctcgatccgaaggcaagaagaaatcagatctgacttcgccactttcatggaggcaaatgctcaatgtaacagtaacatctcacaaggtaaatcctctattcctccaattctgcgatatggtaatattcaaagaaatttggataattcttttaagaacttggagaaagagaaggtgaagataacttatgaggatatagaagaggaggttaatttctagaactcagcagtagtttgctatgttcttggagctaaccctcatctgtatgttatcgatggatttgcaagaagggtgtggaaagataggattgataaggtaggaatgatttcatatggagtgtttttgatttgttttcacaccattgaagacaggtacaatgtattaaacggagggtatatatttttcaataatcgccctgtagtcatgaagccgtggaactcagatggaaactttaaaaaagagaatctcagtgtgattccagtctgggtgcagttggaaaacttggagttgaagtactgggtaagaggtcattattcaaaattatagggcaattgggaaagccaataatggtagactcaattaccaaagagagaggtaaactaatgtatccaagaattcttattgaagtctcgatacattaggatttacctaatctgattgagtttgaagatgaacacagcttcaacacttgggttggagtcaagtatgagtggaaaccagtgttttgtgagcactgtaagggaatggggcataaaacaagtgaatctaggaaaaagacagcaggcacacaagaatgggtgatgaagaagaggcctgaggagttaacagggacagacaagatgcaggcagcagactctgatggctttcagccagttcaaaaaggctggaaaccaaaggaggttcgacaacctgcaacaactgtaacggataatgcatatcagattttagaggaaactgatatggaggccaatattgagaacatgaacgagaaggatactttggggaagaagaaaatggctaatactggaggagggggagatcctcctctatccaatggatagaattttagtgtggaacgtccggggaatcaacaaccaacacaagcagcacatggttcgaccgtttattaataaggataaggttagtttggttggtcttctcgagacgagagtcaagtctcctaaattaggagatttgtacttaaatgtctttcaaggatgatgcttcactacaaatatatcatggcacaagggggcagaattgtgattgcgtggaataaaagtagctataatgtaagtattttaaagtgctcaagtcaactaattcatgtgggggtagaaacaattgatgggaactataagtttgtattaagctttgtgtatgcttataatgatgaagaggggaggaaagaattgtggaaagagttgcagcaggttacccaaactgattcttggttagtcatgggggactttaatgatatactaaccaaggaaaaaagaataggtaatagagttaaatatcatccttcccaggactttattgactgtgtttccaattgccttttggaggatgtcaagtcttgtggcaacttctacacttggagtaataagcaacaaggagatgatagaatcttttcaaagattgacagggccatggcaaa

SEQ ID NO: 310125 - DNA, 1359 bp, Cannabis indica
aaggaaataaatgattaggtcactttcagattacaagttatttattatttatttttatttaatttctaaattaatcacaaccatttaatagtaatccaatgacttaaaaaaatgtaaccatgatggttacaataaaaatgtaaccattgaaacctcttcctaataatgtaatattatttatgtaaaatgtattatttaataaaaaaaaaattatagtacatccctcaagaagtattttgattaaactttttatttattttggtatacataaaaattcttagtttatttttttttatttatgattccgtatgttgtagttatataagatcccttaaaattttttaaaaattttaaataattcacaatgtcaaaattgagattcaaacagttacttaccatgcttataaaaaaaaattgcgtgtgtaacaactttcaaatttattttggtattataaactacttaaatttttctaaaaatttacaaacagtcctagaatactataacatacataatcattaaaaaaaaaactaaaaagctattttaaatacttaaacatatagaggatctacttaaacatccatttcgaggatatactatatacttacccaatataatatattaaaatctgaagaaaaaaaaaaaaaaagcccaaacaatataatgttataagaaatttctgtagtgcaccctcttaaagaggtgttctggtaaattctcttatttattttggcatccagaaaaaaaatttagtttaattttttttgtgatcgtgtacgttgtagctatataggagcacttgtaaattttaaaaattctaaatgtgcataaaataaggttcaaatagttacttaccacacatataagaaaaataatcgcgcgtgcaaccaaatttttaaaccttatttttagcattgtaaacaattacaaattttctaaaattttataggtggtcttaattaactataatgaacaccatcatgaaaaaatttggattaaaaaagctcttttggataccaaaacaaataagggatctactaatatccctgtaggggggtgcactataaacttacccaatgttatatatgaaaattaagtatttaaaaattactaaaagctatctttttcagtaatttattttagaaattctacaatgcactctcctaaaagagttgtatcgatacacccctatcttgttcagcattcaaaaataaattatagtcaatttttttatggtcgtgtacgttgtagttatttaacacatcttgcaaaattttaaaaaatttaacatgctaaaaatagggttcaaataatctattgcacatgtgactcttttattttatacgcgtgtgaaatatatt

SEQ ID NO: 310126 - DNA, 975 bp, Cannabis indica
atttatgggcacataaaatggttattaccaggaatctattactcaaaaatcaaaaaagtccatgaagaacttgtagaaaatacattacaaacttaagaattatatctgaagagtaaatggaaacagtttgcaactaactaacctccttatctctgaagaagccctctccatggagcttaaaaatttcggccaccgaaattccatcagcttcctgctctattaaagtgtcgctggggcattaagaaagacaacagaaacagaacattcagcataaagtaatatgtactggatgttagacaaaggcagtagaaaagaaatatgcaaacatgcaagacaagttcaaccaaatttcacaattgaatctcagaaattcaatgggcaaaaaatttctaagatttctcaaggtcatagtctcacaaataccacgctagcttttctgaagaaattttattagcagttcaatgcaattaaaatttgttgctcaaacactgattaagctttaaaatgaaccttaggagtaaagatatatatagcaaacaagtaaaaattgaaaatctaatgatctaatcggaatgtgatgattttgcagtgataagcttactaaggtcaaaatacaaaccaatcggaaaatgaatatccaagcgcttgtgacaaaatctttcctacagttgttttcccagagcccatcattcctacatttgacaaatcacaatttttatcaaacaacaatgactactaaataaccttctcggagagaaaaaattgagagaaactcaccgactaaatatatacagcgcccctctaaatatggcttaatcttttctgacttaacctgcaatagtttcaattacacttaagtaagccaaatcaaatgccaaatgtcatttgtcaaaagctgtttatgatgagaaacaaaacatctacctcttcttctttaaataaaattttaataaataaataaataaaatagtgaac

SEQ ID NO: 310127 - DNA, 687 bp, Cannabis indica
gactttgtattttgtaaaagttaacttatcgaacccttagttttgtcaaatgacaattcaaacctgtacttttcgaaaaggtacgtaataatactctgatacaaattttagtcattattttaatataactaaaatataaccaacctgcaaacaatttaaagcacaaataagtacaaaaatataatcaacctagtcaaaacacgtcgaactcagactattgtaatgttccattttaagctcagggtaacattatattctataaaaaaaaataagggtttaaattttcattcaacaaaacagaaagtcaaatcggtaatttttgctaaacacgaggtctaatatggtctttacctaaaaaaataaataaaaacccagagcaagtacctaattagccaaaacccttacctctaactctctctttagccatagttttaaaatgtgtttgaggtgtacacttggagacgctaaaaaatagcctctaagacagcctcaatcactagtcgtaagcctccaaccatggccgaccttgaggtgagatgaaggaggcggccgccttaagccccccaccgctcaggactaggggtggcaaaacgtgtcatcgtgtcgtgttcgtgccatattttatgtgacccgctttttatttcgtgtcaagcgtgtcgacccgttttttagctcgtgtctaattat

SEQ ID NO: 310128 - DNA, 1486 bp, Cannabis indica
agagagagagagagcttacctttagcttcaatctaacaaaatctaagagtttcctagctaaaaccttatgaattggcaaaagaaaaatctagattccttaacttttgatgtagccgaccatagaaagagagagaaaagagcatgaagtttctgattctttatttatttgagtaaatgataagcttaaggcatagtaatgtattaatttagcttactagaatagcataaaatcttagggattttactagtaaatctactatccattaaaaacaaaaattagggtaaaattaccaatttagctattgtttaattatgaagtaaccttgaaatctaaaggtattttggtcaaacttaaaacttttaatcttctcgatattataaatgtctaactaaacccacctgctatttctaaaacactaaatcaaaataaaataactttattggccatacgtcacattctactgttaccagacataaaatatgaaaaacacgaaatttcacatataacataattagtacacctagaattcaaatatatctccacatttgcaaaataacaattaaaagtctaaattctaaattaaactctcattatttactaattctcatattaaaattaagtggtcattacacgttgattgataaaggttaacacagtattttaaaaaattcggtggcatgccttatctagtagagtgttacacagagaaaaaaaaaatcaaagtgaaaggaagtgaatgttctgtggtggtgtatcctttctagtgccctccctgttagagcggtgatcggaagaagattccaaattgaggactctagttgtcccttatgtggattgggggaggaatcctttgaacatcttttcctgtcctgtgatgtggcctttcatttttggcgctcctctccttggggcatctttccagtgtgtgacactggtattcgagtgtgggattgggtcaagtttatctgagatctcaacaatagaggggttcgagttgatgatgttttcttatatgcctcgattgttgtggatactatttggagggtgcgcaatgagaaggtccataataactgttctcctgatttaaaaaaatgtattgataatatttgtacttcttatgcagatttacatgttactttgcttcctaggcccactccacatctaaaggaagcttggtcccctcctcccccggattggattaagctgaattgtgatgtcaaggtgggatctagtagtatgtgtattgctgttgttgcaagggatcatgttggcagagtcattagagttcagacggctcgggaaaatttctcgaatgctctctgtggagaagctgcggcatgttgcttggcggtatcggtagccttagatattggatctaagtttgtgattgtggagaatgactcgagtgtggtgatcaatgctctcaacgggaaggattcttgctgggcgcttgataattcatctcattttgtactaagtcttctc

SEQ ID NO: 310129 - DNA, 1578 bp, Cannabis indica
ttatcaaaaatgagacggtcagataaaaatgcactatgagtaggagaaataatatcctccataatgggcttaatcctattagcaatagccttcgtaacaattttatacaaagttgtgcaaaggctaataggtctgaagtctttaagagaggaagcgttggattttttggggataagcacaatgagagtcttattaatagaagccatactgtcattattattaagaatatcaagaattgttgtgcacaaatcctctcctaaagtgttccagtatttttttggtaaaactaggcattaagttcatcagaaccaggtgctttatccccagaaagctgaaataaagccgacttgacttcctcagcagtgaaaggagcatcaagcagggtgaattgttgaacagttagccgggaattaacagcagataaaagcaaattagtagcatccctgctactgccttgagaatggaaaagggttgagaaaaaacgacagatttcagctcaatggcagcatgattagaaatagtgctaccatcatcaagagtgagctttctaatgaaattggttctttttcgagatgaggctttatgatggaaaaatttggtatttttgtcaccagcccgaagccagtggactttagatctttgcttccaaaagatctcttgtttataaagaaggctatcaagctgtgactgaagattagaagcctcaaacaagctctcattagaagcaggaagggaggaaaaggtgtcattaagctgcctatcaattttattaatcctattagataaactattaaaagattgattccaagctcggatagcatgaatacaactgctcagcttactaagaaaatttgacaaaggattattattagagccagagttagaggaagtccaggaattactaacagtagtaaaaaaggtgggttcagtaagccaatgattttaaaaaagaaacctcttattttttactttatgcatactatcatcacaaatgactaactttaacaccctatcatccgagccataaaaactgaggtgatgaagaagggcctggggataatgatgaaaccacttatcattagcaattccccaatccaaacgttcataagtggaaccatgtttccaagtaaatttattaccaacaaaatgaactggtactaaagaatacttattgacaaaagcttgaaaattaaccatagcataatgaggcaaagaaaaactactacttctatcattaacagaaagataatcattaaaatcccctagaacaagccaagggagttgaggagcattgtcaaaaagtctgtccaaaagaacccaagtatgaggtttatcacgaacataaggggagccatagtaacaggaaatatgatcagttacattatcctcaaaagtgacaatacaatcaatatgattagaggaatagttcaaaatagtaacattaacatcatttttccaaaacaacaaaagaccaccactaagaccattcctaggtacttcaaaagcattatcaaaagagagtctagttctaaaaatatcacaatgtccagctaacaacttagactccataacaaaaag

SEQ ID NO: 310130 - DNA, 1505 bp, Cannabis indica
tttagtttgttttacagttgtttttccatgattatttatttgatgttaatttcactgcagttcctttgtaatttgcatgttgttaggagttaatcgtcctttcgtgctatttgaaggattcataaagaaaaatttgggcatatttagatattactcaagtggtgagaattatatcaagatatacgataatgaaatttaatgatgacgctactcatgatcatgttcttgaaaacgtaattgttcagtttgattgaatgtcattcattgtgaggccttggaccacttatctgaatattgttcgcttacagttcgatttgttccagtgtgaatctgattgcatgatcttggattacaatattgggacaaaaaatgcttaagtgctcttgtaagtataattggtaagccactaatggtagataaattgcaaaagagcattctcaaattcaaattgtcaaagttttggtagagatggatattaaggatgatcatcctcatctaatttattattaattacagtgaatttaggtaattggtggaccaagaggtcgattatgaatggctttctgtgtagtgtaaatcttgtcaaggcattgcccataaaatagttgagtgtcgaaagggtgagaaacttcattgagttagaaaggaggctaagaaatccaggatagaggagacacatatggttcttgactctgctgctagtggaaatgatgttccaaagcctactttggagaaggatgtggatgagcaatatattaagagtggggagaatggtatgcaatggaagactcgtaaaagattaactcaaaaaaaagaaagatatcgagagtaacaactcaaaagttcctattcttgcatagaataaccagtcccaaactagcacaaatactttttaggtactccaagtgtttggatcttattttacctagatcttaatttactaacatcctaaaatacaagtcaggccatccctatgccagttagagaagggaagatcaatatacctcccaagattgctctgtgagtaacttcatcaaaaaatacaagtcttgaagagaacctagtcgagtcatcaacatgctgatcaggataaatgatgccaagaatgtcgagcaaggctacacaagtcttgatttcttctacaacaacatccacaaatatctctaactttatcctacagatacgaatttgactgatctatccaatatagggatatttactttctggtcactccttttacggaactaattgtaacaacctttcttccataaatagtgaatggattcacaaggggaaaggacctaaaatcataatcttacacttaagagcactttgttgaatattctctgtaaacatcttgataactatagctagaattcactctatctaccttagtgatctacaggacattatctcataattaatacaaaagagagtaggccattaccaatatttaaggaggctgaacctctataattccatattcttgttatttatttattatc

SEQ ID NO: 310131 - DNA, 825 bp, Cannabis indica
aaacagaaagatcgtgtgatcaatgttgaatgcaaggatcgtgggattgaggctgagtacattgatagtgggatatcgtgtgtatgccatatccacgtaagttgatccctgagttgtagggattgagctgatgactcatgatgcgaatgctaaattcgctaagtgctgagtgctctgcacggcttgttgaatatgtcattctcgatgtgccagcgaggcttcctgctcggtctatcgttccgagtagatgctccaagtggactccacgtgtcaccattctcgtgatgccacgtcagagtgcaaaatttgggataacaatgttatttgaggttagtttaggtatttcggaaagtttggtatggattggacacgatttagaattgtttggggaaacctggtgcaaatcggttaacgagtttgacaggtcttgtagaactggttaactggatcagaggcaggtttcccaaataggctgccttgttgattcatgttacttttagagccttggttggttaattccttgatacttagggtattgttaaattagttacaatagcagaacccttgttgggggtttgagtttcccgaattagggttttggcatgttgtttacccgtttatgttatgtgactaaggcatccatccagcacgaagtttttccgttcaggtcagccgactcacttgaattcagagatgaggtaagaatagcgtaaaacatattatatatgcaaatgagtatatgtgtgatatatatgcatgcttgttgtgattcgtacactaccagcactagtacggtagtggtactgagtgcattggtataatgta

SEQ ID NO: 310132 - DNA, 1231 bp, Cannabis indica
atttaatatacatttaactcatgaaattaaaaaaaaaaaactaatggttggaaccgatccaatccaatacatctattggatcggatcggataacacaattcgattagattgaatcagatgacaaaattaaatatccaataaataattgaattggatcggttgagtccaaatctattgaatgtgatccaacaaacacccgcattctaaagtattcaaaaaaattcgaagaaaatgtaactacaatatacaatatcatttaaaaaatggaatatataatttcttaaggtgcgaaagaaaaaacactcccaccaaaaaaaggatacctccacttaaaaagtttcctatatttatatataggatttatgtaagctagcgagtgaccatactacaaaacacaattacttttaataataatttttccgtcacaatataaattttttgtgactaaatatgaattttagtttaaaattcacttgtgactaaatcataatgtttggatataagttgtcactaatttagttttagtcacttgttgttgactaaaaatacatttagtcacaataatttataaattttgtgaataatacctttagttattgactttttagtcacaacaaaagaataataatttataattagttataacttttgtacttttaattataaattttgttgtaactactaaaaataaaaattttataatacgacttatacagacaattaaatttttagtttcttcaaacacataatataattcatgtatatatgataatgattgcaaattattagtacttaacgtttattatcaatgtgaatctcaatttataaatttggcaattttattattcatttttttgagttagagctagtccaagagttccataaataagaaacttgagcaattaggttgaagaaaaaaaataataaatatatgggaaaattttaccatagggatattacttttgtctccacgtgcttatatttttagtacttagagaaattataatgtttatatttttatatataattttgtatattatagtttgaaataaaaataaaaataatttatagtattaaaaacaagattcagccattcaactgcactcctacaaaaaaaaaaaaattgtaagtacaattgaatgtttaaattttgtttttaatattgtaaattatttagaatttttcaaaaaaataaaatacctactataattataaagttaattagtaattt

SEQ ID NO: 310133 - DNA, 1720 bp, Cannabis indica
aaaaaagtgagatttaaagagttacccactgaagaaaactgctgtggacactctggcaacgatcaattcgtcaaaaaaattgaaaatcagagagaatggtggtctttgggcgtcggccgtgaagagaaagaagaaaagacttttttctttcttttcttacaaagagaaaacaagagaaagagatagagagtgaagtgaagtgtaaaaaatgaaatgaagaggcaaatgaaccttatataggttctggaatattttcccctaaataatgggtggttatttttctacaaaatagacgtgcatgggaaaagaagacgaagagttcaaatatgggaaagtgtgtatcccttacacaaatccccatagcgattgataataaagttattttttggcataaagacaagtcatctgaagagtccaatacctagctagacaaagttgtctggtaaaggctcttacagtcaagataatagcttaaaagtctatatctgtacagatgtctaaacagagacttgggggaaaatattatcccaatattttcccacctagcgtggcatatccacatagtcaaaattgaagccacgtggaatacaacctatcgataatcagacaaggttatcttgcacgattcatcaattgtcgagatttcaagactgtcaagtaggatcaaacaagaagaaagtgacaagccagggaaccctagctggaccatacttggtcagccaatgaagcctcacatgctggttaggccctaaaaatagggttggtcggccaactcgtgtagataacttcaaataggatgaatgaattgcagggtccataacaaccttctagaagattcttaagccaaactacaattttgggataggtttaacatgccttgaagattgggatattccctcaaagatattatcctaaattctagggattttatctatcatttcttgtactttaaattaaagataaaaaaagatgttatttttcctattttagagggagatatttttctatttgaattatgatcttttataagctctacactatataaagggcattagattacataaaaaaagactccaaatcctaagctacatgcatcatctctctaaggtccatacgcacctaaggcttcctagactctaagtctactttcttcataagttcttaccaattcttcatctatagcacttatttttcacgattgtaatattgaagagaactattattagaaattacaaagtcttaacctgtaatttgcatggtattatttcaagagtcaaatacaagtaaacatggagtaggtcattatccattcattaaggaagccgaacatctataaattcgtgtgttattttgattatttattagttttatttacacgttgtgattatcaacaattaatatagttccattatcagttggttaaatttcaagtcaacaaacttaaaaagttgtagtaagataattttgagaccttttgagaatatcataatctcatctaagtaataattttagattgttttgcccagaagatatttaattataactttcataagaaaaggagtaacttttgtaactttttggggctaggaagttaataaataaaaagttggaaattttacgggaaatttacatggtatactaacttttgctaattttttaacaaaaatactgtcaggcgttattttttacttttttacttgtgttttttaataagtttcat

SEQ ID NO: 310134 - DNA, 1083 bp, Cannabis indica
aatctttaagcttgaccagctaaaacctcttcttggatcttcattagttaactaagcggctttaattctatctaatagatcagattgcaatgtcaatttatggagtttgtctaccacaaactcaatgcctgatttgaccatgtcatctgccaactaagttgaaatctgaatcatacttgttacatgcttgggaccttttttgctcaggacatctgccagcacattggcgtttccaggatggtaaatgattttatagttgtaatccttaaccaattccaaccaacttctctgcctcatattcaaatctttccgagtaaagaaatatttgaggcttttatggtcggtataaatttcacacttttctccgtaggggtaatgtcgccaaatcttcaaagcaaaaaccaccattgcaagttctaaatcatgcgttgggtatcactgttcatattcctttaactgacgggaggcataagcaatgacccgatcgacctgcatcaatacactccccagaccctgtcaggatgcatcgcagtaaactacaaacttttctttatcagatggcagggctaatactggagatgtgatcaatcttcgtatcaactcctagaaacttgcttcacacttgtctttccaaaaaaaactactggttctttttagtgagttcggttatgggcgttgagattctagaaaatcactcaacaaaccgacagtaataaccagccgaactcagaaaacttttgaaatctgtaactgtctttggtctcagccaatcctaatggattcaatcttcgttgggtccaccttgattacatcgttactaacaatgtgcccaagaaaagacacctaagatagccaaaacttgccctttttgaacttggcatacaatttatgttctcgtagttactgcagaaccatctaaagatgttgctcaggctcctcttctgattgagattacacaaagatgtcgttgataaatacaataacaaagatatcaaggaaatccttgaataccctattcattagctccataaaagctattggagcgttggttagtccaaaagacataaccaagaattcatagtg

SEQ ID NO: 310135 - DNA, 2098 bp, Cannabis indica
caacgttcgaagcaattgtggctaaaaaatggcgatcaaaatagtaagttctttcattcaaaggcttcatctcttagacgtaataataatattgtttgtcttaaagatgaaatggggactcctaagtactgggacaccgatttgggggagcttatgcttgactatttttcaaaaatctttactgctgaacctggaaattgtagtgaagttctaagttgtgtcagccccagagttactaatgatgaaaatgcaatcttaatccgccccattgaagaccaagaggttaaagatgctttgtttcagatgcacccggataaatcaccgggaccggatggaatgaacccgaagttttttcaaaaatattggcacatcgttggtccggatgtcattgcttgtgttaaagattttttcacgaatgaggggatgccagaaggattgaatgatactaatattgtgctaattccaaaaaagaaaaaaccaaatcaaatgagtgagttaagacctatttccctatgcaatgttgttgaaaaagtcatcactaaagttttggctaataggctaaaaggtttactctctcgtattatctctttaaatcagagtgcgtttattcctggaaggttgattacggataatattatggtgtcatttgaggtgcttcattacctcaaacggaagcagattgggaaagaaggttgtatggcgctaaagctggatcttagcaaggcatatgatagagtggattgacatttcttgacagcaatgttatctagattgggtttttgtgacaaatgggttcggctaatatatggaagcctttgttcggtccaatatcatatcgttagtagtggttatactatgggtccaattcttccaagtcgaggacttcgtcaaggtgacccaatttcaccatatcttttccttatttgtgcggaggggttgtcgactctaattcaacactatgaggaaagaaagtttttacatgggtgcagagtggctaatggcgctcctattgtatcacacttgctttttgcggatgatagtttcttgtattgcaaggctacagatagagaagtttctaatgttcaaaggatgcttgaagtctttgctaatgcatcggggcaaagagtaaactttgaaaagtcctctgtgtttttcagtaccaatacaaccatccaaatgagacagactatttgcaatagactgagcattcgagaggcagaagagagaagcaaatactttgggctcccaagttccataggcaggaataagatggcggcttttagctatgtggtagacaaggtgcagaagaggattcagacttgggataacaaatttctttctcgagtaggtaaggaagttctaataaagctgtggttcaggcgttacctgcttatactatgaatttgttccttcttcttatgggcttttgtcgccaattagaaagtgcagttagtagattttggtggaagtcaagcaattccaaaggaatccattggttgagttgggtgaagctcacagatcataaggtgcacggaggtatgggctttagagactttcgagatttcaatctttctttactagctaaacaaggttggaggttgttgtcttgtgaggatacactagctactaaagtttttaaagctagatattttgcatcggggaattttctcaatgccactctcggaagtaatccgagttacgtttggcggagtatcttggaagctcaggacttggttcgggctggtgcgaggcgcctggtgggagatggttccagaatttctattctgcatgaaccgtggctgctagatgtggttaatccatacattgagacttcaagccgaagtcttcaggggcaaatggttcaagctttgatgcaagttgacaaacttgagtgggacaatgaggttatctctgatgtgctgaatgacagagatagagaattggtttggcgcattcctctctcgtctgcaaggagaaatgataactggttttggttgcaagatagctcaggtattttctcggtgcggagtgcttatagactacaacatgaggctaatgtaaagtccgcttagttaatttggaaattagcagttgttta

SEQ ID NO: 310136 - DNA, 922 bp, Cannabis indica
gtttaggaaaattgtttaaatgggcattatatttattaccaattttaataacttttgcatttaggggaaaattttttgggaaatataagcatattaattcaaattttcccaatataaatatgttgctataataatactaatactgtaaataataaaaaaaaattctattttgtaatgggtcttacatcatttgatgtggtctacatgcaatttatgtatgccacatctcatccatttaatgaatgtactgatttttttttaaaagaaaaacaagaatatttgttctttgtccattctatatttttggattatgaaattgagcttgaggcttaagttggtgcagaaaatatcagtagaataagaatatatatcattccaatattggaagtgaagcaaatatatgaaaaaaaaaagaaagaaaaatcaactctttactttcttaacaagtaagcccacctcattcttatagtccctatcaatatttttgtatcaatgacaagaacattactatattaaacaagcccacaatcctaaaacaagcaatattgtcctcttatagtaatcactacaagtacatcctagtaatatttacatttttattacatgaaaagatgatgtccatctctcctttttgagccatattaagaagagagttcattgtgcatggatttctcaatccaattaaaatgaacaacatgtggatttttttttattaaggatgttaattcttctattgttccaagccacccaattgagcactccaatcagttcctttaaaagaattaaatccttaaaaaaataaagaatgaactttaaagtgacttctaccggctgctatattttacctcaaaatttagaaaaattacaataaattcttcacatgtataatattatttacgatatgtattaattaactcattct

SEQ ID NO: 310137 - DNA, 574 bp, Cannabis indica
aattaagtgtaataatttaaaattaagattacacgtataataaaatttaaattatgaaattatatgtgtataattttataaaatgtcataaatgtcataatttatgaaatttaaattatttataaaatgtcataaattatctcaatgtcaccaaaatgattcagcacataaatataattccatggtcccctggaagtagaagctcattaattattaaaaatcaacaattacatctccatcaaattaacatatataattgagcttgttatatatgtagatgaaagaaaatccataagacttcaaactttaagcagtgcaaactcaaatataatgaattgagtaaaattttgtttagaagctctgatattttaagttaaaattatgaatatagtgcatgaatgagaaatatgctctgtagaacttcacatgtcctcatgcaaaatttaacataatactatatcttgagctaaattactagggctgtacatgtaacgtccccgcttcaagtctccattgggcccttacacccacggagtgatggctcttatacacgagtacgccactctggctgctt

SEQ ID NO: 310138 - DNA, 1381 bp, Cannabis indica
tagtttgctatttggaatagattgaacaatcttttttgtttttttatttgcataagatattgtcttgctatcagttttggtttctgaattattttatattggtattatcattataaatagatctgacatgctctgttaattgagcaacgataataaatagatcattattggagctgctcttaagattgattccctcctacttagcctgatgacatatatagttgatgatttgatgtaatatatttgcattaatagtagttatgactatgattacgtttttggttgttgagttatatatatacagttgtgattaatttattggggtcctataactcatcagttgatgtgctttgcatgtgaaaacctaagtgacagaaccgagttatgttatgcataatgtgacaaaccccatttgtagggttggcaagtggttcatgtctttcaacaacacttttttcagttctttgttttcttttaagaacttatgttttgcttcaagaaggaaaaaaaaaacccttctgttttcccaacattacttttctgcaagacgttttgttttctattgtttaggattccaacttttgcattaaagacaattttattttcggcaaaattatctcttttcagttattacacttttaactcgtaattcaattttcataatagttaacttttaaatgtcgttgaccattcaaaatttggagtgaaattttcatagggccaaaaaattaactacacaatattcttactgctaattctaagaaaattctgtagtgcatgcttaaaaagggtacactaatgcttccctatttattttgatatctaggagaaatttatagtcaaattattaatttatggtaatagtattgggatttgttgaagtaaattccacttataaccaagtccctttacacacaaatatccacatcagcacacttacaatagatataaaacaaaggactcaatcttaagtggatttgcttctactggatcaataaataggagttagttacaataacagttgtaactaacttctagatctgtgatcaaccgactcaatacaagtatataaacatcaaattaaagcaaatacaacacagtacatacagatcagagaaaagagagaagagagaaggagtaaacccttgttttgaagacttccgctccaagatctagagatgagaaactaagttctcgtcgtgaggaggtagaagggggaagtacatgcacaaacaacgtagaaacagagttagatcgagaacacatcagtgaaggacaaaatcaaaagtgtacacaaagagaatcgagcttacctgatcgtttttctgtgacaggaagctccaaaaccttgtaaatctgacattattgatagtggatatca

SEQ ID NO: 310139 - DNA, 718 bp, Cannabis indica
aacatcagctgtaaccagctgcgaaagtggcctcctggatcaaaacaaaggtgactccaacctttctccagcaggcgagagcgatattgcagaaaatcagtgcatgggatgtagtttcgggttgagatttgcacacaggacacacagtcggcacttccacatgacggaaaaccagatttacgcatgtggggaggttgtttgttgcagctcgccacaagaaattcttgactttgggaggtatacacaacccccaaagcttatcccagaaactagtatcagtgttaaggcgctgggattgtttctgtttttgaaggagaccgtaggcgcttttcacagagaaatcttcattattctcatacatccaagaccaggagtcatgtgtagcatttaagctaagtgggattcctagtattgcagcagcgtccgaagcgcaaaacatgtccataacaacatcaatgtcccatgctctataatctgttgtgaaaagcgagtcaacggattgattcactagcccaggatgatgcacagagacatacggatttgccaaatttgggagccaaggatgttggaggatgttaacatttgtacccgtgccaatggttcttcgaatgccagagcgtaaaagatcttgagaactccaaatgcttcgccaaacgaagctaggattattacccaattccgcagtaaggaagtccgaatgagggtaatatctagcttt

SEQ ID NO: 310140 - DNA, 1627 bp, Cannabis indica
tgtagagtttgagagtggagtaaatcgacaagggatgctaatctgtctatgaatgggtctctctttaccacatggagcttcatatgaatgccacatattttggttaaaaaatgggtctaacactaccatgaccaaccaataaagtccaatgacaagcttaaaaaaatgagataactttgcaggtggttggagccgacatggtaccccacacaaccaagaccctatagtggaagatgaaaactatgtgtgtgtgatgattacaaggaacatgatgctcactaatatgaccaagaaggatatgaagaagaagatttaaatcttcatactatttgcggtcatcatggacacgtcgaaggtggtctaactaaggccacaagctgcaagctaccatattaaaatggttacctaaagagacactttccctagaaaacaagaatttgttctaattatgaaaattctaatggccaccaaaggacttaaagtaggcctagttgtcatttatccaactattaatcctttattaggaattgtaccccatgtgatactcacttcaggtacagaactttcgggcgagcaactcatgggtgctgctgtaaacagacatgaacaagtcccaacacacaacatgaaccgacatgctctcctaaatgagacctttacaaaattcatgggttcttctaaaacactacatcaatggaatatgaacaaggcctgcggtgacagatacccgtggggaagacaccaacatggctcgtagttacctcagggaaatctaagattatgggcccatagggaacatcaaagaaacttaagtatgcttgaacaatgaattaatagagttctagggttaagacaaaaaaggtttacttcagatataaaattatagatcctaggcaatttgaattgtgggaggcttcaatgcacgtcagaataagaccaaggtacaagattttgtcacttcagcaagaaggatccttcaaaataatctaaattcttgaagaaggggtaaacatcacactcaaggatagtataattaagatgttatgacacggtatcatccttaaggaagaaaatggccttagtggccagaagacgaggtaatgtcaaaattcaactgtcttatgtatgtacacaaggtggcccttaacatgagatgtatgttattcttgctgactttgattggagcaatgaacaagtggttcaaaaatcataatccaggatctatcacttcttggtcacaattattcagaacttataaggtagttcgttgatgtcttggaagttaaaattttaggtgaatgcattggctaacatcacacaatgacctttcaaaactttaaatgcatatatcaagcgtgttactaaagaagccaactagaaaaagatggtagatgagggaaataattaatggctatccaagttggaataaccatccaagaacctatatgggaggatctcaaacatagagggggttataagggtgatgttatcaccctaagatcctaatagcttattaactaggaggatgccaatattggagctattagtgagctttcatccgtaatgactctaaatttagtgcccattccaccaataaattacagtttacagctctctaaaatccaat

SEQ ID NO: 310141 - DNA, 964 bp, Cannabis indica
aaaataaaaaaaaaaaataaaaaaggaaagaaagggaaaactttgagtgagatagtgacatcaccttgcatgtatgatgtgtgtgtaagaggtattttagtaaataaaacaataataagggtaaaaatgttgttcaagccgtgtttgggtaaaagtataataaaagaatcattttttacttttcatataaattttccaatactgaaagaaaattttgaatttttgagcttaattcagctccttaattaaaacaaaaaaatcaaaaaatatctcattttacattatataaaacatatatttgtaaactaaatatttaaatcaaatttaattattttttacatattttcttcctatcgaaaaactttttttcttaatttttttagtcgatgcaacagcctcaactcatttaatgtaaaaaaataagagatttttctttttagatagacactacaacaaatataacttttaagagcgaccaatttcaaggcgacataaagtcgcctctaataataaggatattaggggtgataaatgaatgttgcccctaaagaaacttgatttttttaatctgtctaatattaaaagcgacaaaataatattagtcactcctaaaaagttgaaaaccaatagttgcaaatagccgggaattttcccactcatactatttggggcgactttccactaacacggccaaggcattaggggtgactttgttgcccctattgtcacctctaatagtctattaaaatctcaaatctcctccttccccgggctattttactccattaacaccttcaatacaagaaatcgagcaagaaggaaaaaataatagacctatcataattttattatattaagataggggtaaatgattcaaggtaaggagaattttcataaatatgggaattcagggtatagtttacttttgtatggcataaaaaaataacaccatagggttatgggt

SEQ ID NO: 310142 - DNA, 2131 bp, Cannabis indica
tacctctattcttttctgtttttagcattgtaattcaacactattattaccattcaatgaagataatattcttagttattctctctctctctctctctctctctctctctcaagtgtttgtgttctggtgtatgtgtgtgtgagttgtctttggtttcgagctgaagttgaacaagatcaatatgctttgatctccaacagttattctagtagattctatctgtttctgtatttaagaaaattttttaatctatttttttttttaacaatcacatattgtagttatttaagaccatttgtatatttttagaaatttacaaatagtttaccgtattaaaaataagatttaagcagttacttaccactcgtataagaaaaatagtcacgtgtgcaacaaaatatataaatcttatttttagcattgtaaactattcataactttttaaaaatttacacgtggttctaaatagctacaacttatgtaattatgaaaaaaaattagactaaaaactctctcaaatgctgaaatagatagggaatctatcgaaacacttatttaagaggtacattgtaggcttaccctatattagttaatgtgtgtaagtggttataatataaagcataaaaaatagtaggggtgtatgtcggtcggtttggtcgggttatagcatatttttaccaatctaatataaatatcgggttgcaaatatttaattgtaacccgcccaattaaaaattagaaaaagttcaacccgcccaatgatatctttcactactataaaataatgaattcgcgacggtcccaaaaacgatttttttcgaggaccgtcgttaaaaaaattaagcaactatttaaaaccgtcaggaaaaattggtattcccgacggtttacaactgtgcctaaaaaattaggcaacggttttttaggaaataaaaaatacgggattatacttgatggttttaaaccgttgggcaaagccccactaaatttttttccccttttatttccacaaccgtacagcagcccttcaaccccatttatgcgcctccaacctctattcccataacctctctctctctctcttgctcgagctaacaccaccggccctctagaaattaccacatctccgaccctcttgaaatcacatctcccaccctctcgaccccatcgcacttccgtcctccatcaaagcgcctccgtcctccctctctctctctcttgctcgagcaccaccgcacaagaacttcaaagcaccactgcaccacctaccatgagaactctggagctccaccgcacgatctccctccacactacggcgatgtcggagcaccaccaccaccatcgcaggtcttctagaagaaggtgtaaatttatatttatttatttatttataatctaaatatatagttatatatttatttataaatctattaatttataataaattttattttttttaaaactgaatgtatatatttatttgtgaaaatatttaggaaagaaaaaattaaaattttaatttaaagttagttcctattgtataaattaaatgggtgaaaatttgatgtgttttaaaaatataatgtgttataaattaggtgttgttgtaaagatttaatgtgtatgtataaaatatttggagaaaagttttttgaaaagaaaagtttttgatataggtaaaaaaattattcatttaattagtttagttataattataaattattattaggtaaaacaaaaatttagttaaaaatttaactattttttatgcattaagtttaagtttaattagttttatttaatcatttaattaattattaattaataattttgtgtatgtatttatttgtaggtttttggttctttgtgttaattgaagattgcgcaattgtagctctatttactagagaaaggtataatctctaaaaatttataattctttgtttagtggagcttgaatatgttagatattcatgcatagtgaagtaggttctgtgattaattgtactgcggtcggatgggtggaatatgcatgttagaagagtttgaatatcttaaatattcatctatagtgaagtaggttctgcaaatacatgtactgcggtcggatgggtggatgattttatatta

SEQ ID NO: 310143 - DNA, 474 bp, Cannabis indica
tctctctctctctctacctctcattcaaaactctctctcaatcgtattcttagtcttactttacaaatgatgataatggtagtatttataggacgaggatatctaatcctaaaggcagtggttgtaaagactaagtagttaatttggttacgacttaaccgactaagacttaactagctccttacagtgagatctccaagtcagctctagcaaagagctctctagatatgaactacgcttcctgctttctagaagaatgtctcaagctgacaaagcatattctggaaggacgtctcggataagcacaaagcaaactggaacaagctattcgagacccccttctggaagggacaactatagtcctctagaactcctttttgaaggacaactagcttccctgaagactttatctggatggaaaagctagcctttcggaactcctttctgattgataaatatgttgggttttgtgcc

SEQ ID NO: 310144 - DNA, 1093 bp, Cannabis indica
taaataaaaaaaaagaatcgttaaaccaagaatcgttaaaccaagaattaccgttagataggcacttttaatatataaagatatatggaacattttttaatgggtattatccattgaaaggtattacccatatatattttatcttgtaatgtacaattatttgcttaaatataattgccattattttatattatcttgtttacatgagttaattttcttagtaagtatattaattacattgattttgaatattcatattacatatttcttaattttttattatgttattttaatacttaaaataatgaattatatataaatatacatatttaattttatttatttcaaatttcttgaaatatataatattatttatcaagatgtttttacagctagaattattaaaataagtaggaaaatatttaattatatttacagtaaatatttagtaaaaaaaatatggagtttatttatttttatactttaaagtagtttttttttacatttttatggaaatccacatagtaacaaatggagcaacttaaatcgcaacccaaatttatataacaactcacataaaaattactagcagaaagtgaattgctagcagaaagaatgacatccagaattaaaacttagagttccaagaatctctcttttgctggaagaatcacgctaataaattctgtgttattatacaggcttattggagtcaaatgatgatattgccaaagaaggttctgagatccattgaaggcatttgtagggcttttcttcggaaagggcatgctatttttcatggagcaaggtcgatttcttggagcaatatatgccaacctaaagcttcaggaggtttgggaatcaagaacttggagtaatggaacaaagctgccatgtgcaaatacatatgggccatatatcgaataagcaatagagtttatggttaaggtgggttcataatgtgtatatctgggaccaagagtggtggagctgctcagcttcaatacactctagctggtattagaaaaagatgacaaccctcaaagatcaaattcgagttgtaacagatgctgaagctttttcagagacaaaa

SEQ ID NO: 310145 - DNA, 854 bp, Cannabis indica
tatatttaattaacattaaaaaactctagattagtgtatatatctaattaaatgtttggtaaatcaagtctttaaatttgaccaaacaatataattcaataaaataaaataatattattttacttactatcagcagtgggtggttgtttaaacttgatgacattatcaacaaggctctcagcaaccaaaacagatgagtggagtttagttccaacatgtaacaacaacatttctttgagtgacttatctcccgaaattgatttatcagtaatttcgtagccttctttgaacatcttgtcaatatctgtgaaatttgggaatttttcatcgaacatgttgttttctaagaatggaagtagggtttttaacgctaattgcattctcctcgacccgaaatcactttgtttcacttcagcaaatgtttcatctcgaggaacatagaacgccttatcactccttgactccgatgataagtctgtacatatatatatatatatatacatgcattaattttatgaagctaataattaacaaatgttcaatcaacctaattattaattcaacgataacgaaatgagtgaaataatgtaaatttcttataaaaaaaagttgtcctagtatatatacttttatccgttttgacatctagccttttagtttatttttttaatgattaattgagtacattaatcatgttatttaaaacaccacatctacattttagaaaaaatgtgaatattttgagcactaatagttattaatattccctaaacgttattttttaagttaatacaagactatacttaattcaccaaagacagtataacaccaataaagatagttaaacactatat

SEQ ID NO: 310146 - DNA, 812 bp, Cannabis indica
gaatttatacattaaatataatcatgaactaaatcatgtgaaccatgaaatataaaagtgatttctgatctttattaattagtaaatctgattatattgaaatgggttttatttagggcacaaaacccaacacatggttggccagccctaagcctggcagctggctttggccagcaagccctatgctggatagggcctagtcgcccgttcttccttgactggctattgtagcctatgcgttgataggggtagatcacatcaattgctggagttaggtcgacccaagtatctagagtgattggtctcacttagcaagttattgttgtcttgggtatttccacctatttttggaccttatcgattaaagattggcctttgggttactccctcccgaatgctccaagacgggagttcaccttgttggccagccagaggtgcaccactaagatgttggccagccaaaggttggccaagcgaggtgttattgtgttagtaatccctggccatcgccctaggacactagttgtcagagttgttctcaccactagatatttgtggaaagacttgtcctccttcggcctggggaaggtttgtcctagttctcgaggaacatggttatactatctacctatagaccttccccaatctatcgattagcctcctttggagaggatctctaatgagatcctgacctcttctgactattctttcattcaatcaccttatcagactgctagcttctttgttgcagtggtctagctccacctgatgagatcagaggatgtactcttggtcatccatccatctcaaaa

SEQ ID NO: 310147 - DNA, 2092 bp, Cannabis indica
tatcaacactgtagttgcaatgcgggcccggtacaatgttcgtgccgctatgatagcatcaataatacctaaaagtacaattgtccataatatcactcttaaccaatactatacccgtactgccgactcggtactatgttcgtaccgctatgatagcgccaattaatactctgtgcaattaagtatcagtcaaacccagtaccatgctcgtactactgacccgacacgatagttgtgctgctatgatatcaattcaatatttaatgtaatttacatacatacgcatattcacatatatagcatgttctatgctaatcttatctcgtttccgaatttacatgagttggccgacctgaacgaaaaacctcatgctggatgatgccctaagtcacatttacgtaaacgggtaaataacacactaaaaacctaattcgggaacccaaattcagtactaaaggttctgctattggtagttataataacaataccctaaatatcaaggaaattaccaactaaggccctaaaaaccacacgaaccgacaaaataaaaaatttcaggagagctggccctaatctggttaaaccggtttgcactaggtaacccaaacaagttcaaaacttgtccaatttgtgtccaaatcatgccaaaccttccaaaacacctacatcaacctcaaacaatagattccaaccaatagaagcaagaaaaatacactcaatctaaaaatgccattaatgacccaatttgagtttcaaagtcaaacttgttcattcaccacccaaaacaccataaccagccgcaaatcattaatttcaactaaaaataaactctaaaatcaaaccataatcaattataacactaacaaccattgattcacaaaattgctagataaaacctaattaaaagcttaaataacacaaaagttagatttctagggtttacctccacttgaaaactccttgattccttgttgaatttcctaaaatagtgagggttagggctggttccttctggttcttggtgatcgagcaaaagggagagagaaggagaaattctaaggttttcttaaattttttattttttcttcttaattcactaatccactaatccttatatgctgaaaactattaattggccagctttcaaactctcaaacaaccacctaatcctcaagtgtaaaacactaaaaaagcccctcttacttgtatctcaagcaataataatcctaagggtaaaatggtctaaaatcataactccgcttaacccggaatacataatatctcaaacgtttattcccactaagaaataggttctaaacttacccatgtgacacgaacggccatccatcgcattttccgtcaccgccgggcaaaaatcataaaattgtgtaattcatatttaacataaataatactcttaaagtttaataaaatctctagaattgagaaattataactctaatgtccatttctaaaaatagagcccacaacctaatgaaatcataaataattattaaaatatcaataattaatgttaattttctttactaatctatattctaacatgcggtcattccatctatgattagcgctcccacttaattacactatcatgtttgcaagatgtaagtatttggccgatcgagatttaatgaacaaacctaagaacatagataatacatgtaatcagaacctaaccatgtcaatattaagatctattggcctaaaatcaaataactaatattgacttagatagatataacggtaagtttatgatatcttatccaagttcaatatcagtctagtccgatgtgtactacatacatctgatcgtagcatacttttccaatgccctggaaaggacataacacttatccaaggtgtaagtaaactctatcgctgattatcatgtcagtctaaatctagtgtactgacaaatcatgagactttaactttgaaacatataatcatgattatgttcaactgtgttggcaacactataatcatgaataactatatgttatgaatttaatagaatttatacattaaacatataatcatgaaataaatcaagtgaaccatgcaacataaa

SEQ ID NO: 310148 - DNA, 1377 bp, Cannabis indica
cccaagcggcgctgccccttttgccactgttagtccataattgcaagtcaatgtttagaggttaaaactctgaacgaattttctagccacttctggtatcgatttgatgagtcttctacaccactagactcatctcattgaggagaacaatcaacactaagccattttcgccagcctgctactttttccagtgaaatttttgtagctccacctctttctagaaaatttcaagtgatatcgtgtaccattttgaaaaaaattggcatgggtgtgatctactcgttgaggtggtcatttgatatatactacccctattttcggtgacgtttctagtacaccaatgtctaccaccaccgataatttatgtgcactgtttaggtaagattttgaaactcaaaactttaaatatagtaatattatatgtcgttgaactcaattttcaatgtagaatacaaggatattaattatttagcaatttgatggtataggtgagagcgatatctaagattgaactaaacaattggagctcaagacttgagagcttaggatcatctttttagataaagtttaatagcttaggagagatagggacttaacttgatttttggacttatttttatatgtgttgaataacattagacatattctaatttttatgatttgcaaattatttgaataattaaaaacttaatctgcatatttttttggtctattctggggcactgagtgccaaatatatttttgtataaataattatgcatgttatgatttttagatttattcaaaatacagtcgctatacttctagattttctagaaaataaaagagaatatgttcttttgttattcttattatttaccttcttttagttatacttgtaaagaccgcttaactttaatttggaaattagcagataaatagagtttaattatgaaacttgcgtattagttatggattatcattttacggatatttatttgaattcataatgcattttatatgccatatataaaattttatattttagcatattttgtgcccgacaacattagaacgcaacgtttggctattagaatcacattgtagtatttttaatatagcgttgcaatatagtgagacattagaaatgtcagaattagtcgagattttagatttgaccaaactacccctaggtgtaagggttgcttttggggtaagcaagggaaaattagtcttttttccctaagatacttttgtcttctagagggactttatgtgtattctaatctgaatattattttagttaaattagataaacgttgttttattatactttaaccaaaaattagaaaattaagaagaaatagcttctctcttttcactcactctctttctctc

SEQ ID NO: 310149 - DNA, 1874 bp, Cannabis indica
gggaaaaatcaagggcaacatttaccccccaagtctcatttaggaagggtaaatgaggcttgcttggtgcctccggttggcttattggtccaatggcacgtgcttcaagcgcgtgggctgcatttatgatggtcatcattaatatttatttcttttcgcaggcaacaatttgctttccgtccattgagaaaccagcgcatttaatcagtgtcagaaaagtactcaaacgttttcaaccgccctgatgtgcatttatctcaaccgttggattggtagaatacgaattgattatgattcccactgtacgatggtgtctgatcacagctgccttgcaccctttctagtctataaaagccaacatttttcctttactgggctactttccccacttcgccatttcgtcccaagaactccgttgagaaaattttagaaaccatagatttcttactgttatttctccgtcgttgccaatctgcattctaccgtcgatcatcatcagcttccagttcacaacctttgtgtaagttttctgggtaccttatacttttgttgttttcttgcatgttagggtagagcttttggtaaagtactggatttctatggagtgatttttggcgaagactgtcgtattgcgtatatctccctttttttatgttctactgctttctttctctttcgttgagcaatcaacctttctgctgagagactgctcagagcatggaatggttttcatactcatgttccctttctcttatttttcctttcttttttcctctgttttcactgcctttgagatatttgcatctgatgtttgcctagaagaatccctagattttccattttaggcaaacgtccggagggggcctctttccagcagttaggagacccccattccctcttttcacattagggttttgtttgggggctaactgttggattttcctttttcagaatcttactatattcaagaaatgtctgtctttaccttcggagctaaatcctccaacaaaggagcagttaccttagccaccttggaagaggtgatgaaggggcccgtaatccaggagaagtacacgtgtcgatccaacggttgggaggcagacaagctacactcaaccttaacctgcgcccaccagttggagaagattgtaactgtggccgggatcaagccttccgcttctggagtctttcatcgcctgccccgggatgaggaaatgcccaaccgtaactacggtggttttggagcttggagccagactcatatcatgtttggggccatgctaccgcttcaagattacttcattaattttttggtttttgttccttttgggccgcgatctcagcttcatgatcaacagccttttgccttaagagtagcaactctgtataactgccttcgtcgtaggtgtcatactcgttaaaatttccctcgtactcatcgttgttggcctcatctcgttcctcggagtccacattcactcttgaggccacttcttcgtcctcgaggttctgagcatcctgaggaggacggggttgacgtgtattgttacgagtttccaccattggtgattcaacttcttagattgttgtctgtttaaagacgcttccttcagctctcaatgaaagcaccaaaatgtggaccgaggttttcggcaaccagttaaataatgtataagaagagctgtagaaagcttaatgcatgggatttttacgtggttggggcattaatgagccttagtccacgagtcttttttattaatgagaggatttattacagagaatgttgttggtggatttttctcctattttctctctttgattccttaaaaccaaaaatgttcgacccctttccagtctatttgtggggtatttat

SEQ ID NO: 310150 - DNA, 1594 bp, Cannabis indica
gacgaggtgaattagtattagaacacttagcgtataatatacattataataactaagtgtaataacttgaaggacatgattgtcaagtgttcatggccttatggtcaaagagcaattcttaagtttgctcaatacactggtgctcatgccattgttggaataaaagtaaattaagtcactcacttatgtacaaggtgacacgcctcagcaaggtacatttggtagcgtgtcctaatcaatgtcagcgttgacctccttaaagacggtttaaatcacagctgtgtgatttttaaatattaattgcacgtatttgagtggagcataattataacccataatttcggagaatattgttgtgggatttgaatttaaatgtaattaactgcctacgtatattactataaataggggcaaattatacagagaaaggggacgaaaaatcttagagagaaaatggcatatactaattgtaaaaccttaatattgtatccaaaaatatctgaataagatagactcgtggactatgcagagttaactgcaagaaatgtaaaaacctggtgttatttttgtttctattagttttctcaaatttcttataatttttgtgccatatctgttacgaaaatgggtaacaaaaatctgcattaacaaaaaatattcaagtcagatttcttgactcgcgagactagatccttaaatgaaaatggttcattcactcggttattatcaaccaaatatgtctcgcttccttcaacatccccctcatcctgagaattgcgatctggtacctcgaaatccttgcccatttcttcagcttcagtgttttggagcatgtctcaagtgaacgagataacactgggctaacaccgtggactcactattgcatacttcgatcgttactggttcagcaagttcttgaaccatcctatctatctcgtcagtggatagcaagccctgacgcatcctggctgcaggagccttatcctcaaatattgaggtgggtatgaagttatcgcttctttatgttttgtcaacggaagtccctcttctagaatcgagtctctgactatcttacaagtcgctcatctaaaagatagaagatcttatcagtgtggtgaaagtgcaaatttaataaagtgccctcacccgcatagaattcaaaaacaaaaaacatcaaagaactgactaagcatctccacaaatggctgggtgtatcacagtgacataagggtcatgttgctacatgaaaattaagacacggagacacacccaccatttcaagaatatagtcagttctagcgatgagtaaaatgcgagataaagttaatcgtgtgtctccagaaatggttgggtgtatctcagtatcccaagtgacatgcgactaccgcatgaacattgagttaatgagacacaaccaacattttgaagaacctagttagttccaatagcaaatataagacgaggaaaatgaaaactagctacacatctcaataaatggttgggcgcttcatagtgacccaaggggcatgtgatgattgcatgcacattaagttactgtgacacacccaccattttgagaactcaggtagttttc

SEQ ID NO: 310151 - DNA, 1914 bp, Cannabis indica
aggtccgcctatggctgcaccaaacagaattcagtgtcaactctgtcatagacttggtcatgttgtcattgactgtttttacagatttgacaagagcttcactggtgttttctctgcagcagatccatctcaaccacaagccaatatagctcacacaactcaggatcaagatgacaattggtaccccgactctagagctacaaatcattgcactcccaatggccaaaacatagtgaaacaagcttagcatgaaggccctcaacaattgtatgttggcaatggagctgccttgcctatctcccaaactggtaacacatatctgcatcccaatacttgtcaaaaacctttaattctaaataacttacttcatgttcttgaaatcacaaagaaccttcttagtgtctctaagtttgctgcagataataatgtttactttgttttccatcctgatgtctgttatttcaaggatcaggtgagcaattccatattgctaattgggagacatcacaatggcctataaacttttgactctagccaactccagttttctgcgtccccatccccatgtaccacatccagttttactaagcaaccatgtgtcaacatagccactgcttcttctcaacaacattctagttcttctgtttgtgtcaattgtaataaatctttcatgagtatgagttgtggcataattgccttggtcacccttctaaaagggttgttaaaaccgtgtactctctcattttaagatctctaatattaataaaatgacacattttgtttgcacagcttgttgcttaggcaaaatccacaaactgtcctttcccaaattctctaaaactagttatacagcaccattacaacttgttcactcagacctatggggtccctcatttacaccttctcataatgactataaatactacattcactttgtacatgcctactctaggttcacatggctctatttgcttaaaaataaatttgatgccatcaaaacctttcatattttcaaagttgaagtagagttgcagctaggcactagaattaagatgtttcaatctgattggggaggggaatataggtctttcacgagaaaccttacaagctgctggcatattgcacagaaaaccatgtccaactactcatgaacaaaatgacatagttgaaagaaaacaaagacacattgtggaaaatggtctcacactcctagctcaagctaatacctttaaaatattgggatgaggcattcagaacaactgtatatcttcacaatagacttcccacacctgttctatcctttaagtcacctatagaagtgttattcaataatatcccagatttctctacgcttaaagtgtttggatgtacttattttcccaatattacgccttacaacaaacacaaacttaagtttagattctctccttgtgtgttcataggttatagcctcaatcataagggcttcaagagcttggatcaatctcgtagactatacatttcaagagatgtctgctacatccaacacaattcccactgttcgtgttccctatactattgagtcattatttcctaatgatattgatatgtcccatgctcacacacatgttattggtgtttttgatccacctgtgcctgtaagtgatgaagaacatgattcacagggtaccagatctactccctcaccacaattgttggccccaatggttccaacaactccacaactaagtccacttccaaggtcatctcttgatcttgagcctccttaagaacctgcagacaaccaaggtcaaatttctacacattgtgctgctacaccagcaatttagacccctgccattaggggtgagcataaaatccagaaaactgaaaaaactgttcaaattgacctaccgaacaccgttggaaccgaaa

SEQ ID NO: 310152 - DNA, 724 bp, Cannabis indica
caaacttcaaatggctgctaccctatttttcgtttgagggaggatattagcacctaaactatcactttctttgttaagtatattttattagttggtagttagttactgaagttacttaagtttgtttcttttccttgcttttctataatgtaatcttgttttggacttcttataaataaagatgctctcactaattgtgagctagcttttggttcaatatttttctttgcctttctctcaaattgtgctatgtactactattgttctttacactgagaacccgaagccaatttcatcccacacccacaagttcgcacaccacctgacaaggcaaaaatttgtgggaatcggaacccaaaacctcacctgcatgaaccccacaaccattcgctccaagccctgccgacaaaagcaaacccctcccaccaacaaagaagatgttatagagtttcggagacgaaaagaaaacaacttgcgagccctgttctgtccaaaacagaccatgccaagacaaggctaggtgataacaatgaccaccctagccgagatagaaggggatattgcctcaggaacctagcaacgacactagggtttacgagagaaagagaatacctagggttgaaatgatagacttgaatcttgacttttttttttcttccaattagttaaaagggattttttcagttttaaccaaaaaaaaagtaacaatattaccaaaatactt

SEQ ID NO: 310153 - DNA, 1199 bp, Cannabis indica
agtcatcgtttagacaaaattgttgataatcggcttgccgcccgagaggtcatccaacgccctgcctccaccgtgacagagttagtcaagaacagtcatcacacccactcctctgtaaatgtttcgttaaggacggccgcctgtagctcatacaagtcactgcctaagagggatttaaattatttatttattttcttatatctatttgattatagttatctattgagatatattggtattaattgagatccacgatttgggctttagtttttagtcttatttttcttttttttatgttgcaatgtattaacctcaatatgttaattaaaaaaattttgtgtatattattgtttctataaataaatatgtatattattgttttactttatctatggaatatatgtatattattgttgtggaatatcaagaaagtattttttatgtttattaatttatttatataattcatgatataaatttatttacagcatatattgttattgtgtaatataaaaaatgtactaataaaatttaattttcatatgattcacgtccagcatacttggactaaaaaggggttctcattgtgtgtcctaatataaagtccatcaactttggactagtaatgtttttctagtctaattttgttggactagataaagaccccttttatgtccctggatactatgtccaacatcaaatggactagaaagatttatctagtccaactttaatggacttaaaatgaagtttttgtagtagtggatatactgtgcagctttccttctcatcttccgagcgtcatttcggttacgtgggagttcgccagagttgaggtaggctgctattggcgtcatccagtttggggatgtatcaatcatttcgatttcttccgtgctagtgatgctaggctcttcgaggaactgggtagggaccaagttcaccttgtcacttacattgttgcttgccaattgagctaacgcgtctacagttgtattttcttctcttggaatttttctgagactgtagcttttgaattgtgcgagtagatcgtctattttgctcagatatgctatcatcttttctctccgagcctcgtattctccggatacatgatttaccacaagttgtgaatcactgcagatttcaatgtgttcggccttcatctcctgggctagttttagtccagcgattagagc

SEQ ID NO: 310154 - DNA, 2191 bp, Cannabis indica
aaaattatttattaattatcatacattaattttcaaatataaaattatttaaataaataaattctataaacttttttttttcttttttttcttctatcatttccccattcttcttcttctttcttcaacgagatggtggtgtggtgagggcaaggtggaggttggcgatggcaagacgtcgacaatgtcatatctgggtttgagtggtcgtcgtgcgatggcgagttggaggtggctttcgttaacgtgtttggtgttctggacttttgggttatctgcctcgatgacgagagtgaatggagaacccaaattttggattgttgacaatggggacggggacaagaatggttgtgtagctggatagattccagatctaagtttttaaggtcagatgagatttgggggttactcaccacattgagtttagatttgtatttttattgaggtgttgttcttgtgttcagatctacaattcaaattttatttgtgagtttaatgttcaattggtttgggaatatggattttggaatgattttttgattgtttgaatttattgagtttaatgtttggcatttgaatatagtttgggttctggaatatactttttggtttgatatgaggttctgttaatagttaaaattgagttaatgaaaattttgaatgatttaattatttaattttagttttatcattggcctttagtttgaatgtttggtttctatgacatgaattagatgttccaattgatttttgtttttgacaaaaaatgttctaattgattttgattcaagtattacagaaatacacttggactagccttttatggggtcgggaccttctctctaaaggtctcatttccaaaattggcaatggtctttccactgacattctccatcactactgggttccaggattcaaatctcttacttacaaaacccatgtttcccccctatctcaactgtttccttctttatcactgactctgggagttgggatatttctaagctgcacacttatttctctcatgacattatcaaggccattctcactatccctatcgacatctctcaacctgataccctgatttggagctcccaccgttcaggaaatctcacagttaacactgcttatcactttgctgtttcttctgcctctttttctaattctgctccctcaacctccaatcgggatcttttcaaaagttggtggaaaaccctctggcatctcccccctcctaaaattaaacactttatttggcgtgcttatcatcacattcttcccacttcttctaaccttttctgcagaaaaataattccttcccctcattgctctttctgttctcatggccaagacactgtcacccattctctcctaggatgttccagagctagaaaaatttggaaaaacacaagtctagctggtctctttactgctcatcaatctcaggacattaaagatttcctcctttcaggttacgaaactctatcaaaggatcagttgtctctctgttttgccttgctgtggaccatttggaacaggcgcaaccagactctcttccaatccaaatcccctcccctcgatgatgttgaagaatatgctgtcaattacttgaaggagtacacaactagccagcagcatcttgccacttcgattccaactccatcagctgaaggatctcaacctccacttcccctaacgggcatgtacaccttatactctgatgcaactatttctacatcacgttcaacaatgggttttggtgtagtgattcaagactccactggtcaaaccattgccgctattagtactcctcatacaggtgctctttctccaattttggctgaggctcaagctcttcttcaagcaattcagtggtgtatcatagttgacccgcctttacattcaatctattcagactgtttggatctggtgaacaaaatcaacaagcgttccaaagatagatcacccacttctgacctagtctggaaaatcattgactctttatcaactttttcttgtgccaaaatttcatatgtctctcgcaaccacaatgtaaatgcacacactttagcacaaatggcactaggaacggataaagatcttatctggaattgtagtagtttcaattcctttttcatctgattttgtaactaaactctttttctcatcctttaatgttacaaatcagttt

SEQ ID NO: 310155 - DNA, 795 bp, Cannabis indica
ttccaaacgaaccctaaagtatttaattaacaagtgattaccacgttgtgaacacaaacatatataaaaaataatttataacaactatttcatacaccgacgaaagatacgcatatcaatatttttcttttacaatattatatatttgtactagattattatatgtatatattttttttaatgaaatcacatctgttgtattgcataaaacttcatttgcaaactattcagcgcccaaaataaggcccgatgagacaaataattaaatacaatcacaaagtatcaaactgaaaaattatttagagattagagaggcttagaaaaattacaataattcagcaaaagaagcttgatcatacaacttgatcaaggtaaaagtttgatacaataatttgttacacacattgagagagacactacacatgtaacataactaacaaattaaaacaaaaaactgacactaaaactaactgtatgtgttagttatcagtcctcctcaaacaaaaaggtgttgagaacacttgagtttatatttgaggtagtgaaaccggttagtagaaagaggtttggtggatatccgccacttgatcgagagaggggacatagcgaactgatagtgtctgagcaatgatctaatctttaacaaaatgcatgtctatttcaatgtgtttgcatcgagcatggaaaataaggttggctgcaagcgaggcagcacattgattgtcaatccagcactagaaatcgcgacggtctaaaaatgctttttttgggagaccgtcgctaaaaaaattaagt

SEQ ID NO: 310156 - DNA, 1606 bp, Cannabis indica
acataatgatcatgattagcctgcaaatgtatattacataattaaagaaacattacccaagaatataataagtaaaaaaaacaactaatgaaatggaaaggaaaaaagtaaaatcgagattttgtggtatgtattgaagaatgaagtcgattgtctcaaaccagagaaacaacaaagagtcaaaggactttagaaacactgaatggccaagaaaacaaaaacatataataatgacttctcatcaccatcaaaaacatgaacaaatctccttacacttgagaaggacctctccaaatgttggatacagaacccaatccgcacaaaaagtagaaagagaagtctatatggcgtaattctgaagcatatgccattgcttcgaaggtttattccatgtactcatctaggccaatttttttttttttttttaattttaaggcttagtaagtggaggctgaaaccaaaacccaaagagatgtaagctcaaaattgagaggtacgtcatccataagcaaacaagctacatggcttctcttttttggcaagtattcgacctaaatatacatatccttcattcttgtcaaaaatagagtatattcttgctaaaagggagctacgcaaccactttttcagctttggtagtttactttatatgacattgccaaaggagagtgaccctagcttctcaagctcttgctatatatatgaaagtgactagttattttgattattataagctcttcgtaatctgttttcaaaaaaaataaataaaaaatagagaaaaaaattaatcctccatttacacctttttatttttctaaaatttttgtattagaaattgctacacatttctacaatactcaattaagtttagaattttttacacatttatagaaaaacttactctaaatttttttataattgtagaatattttagaattttctagacatttaaaaaatgcaatagaacataagcatttctagaaaactttagtctttctagttatgcatgcttaagaaatatgtagaaatgtatcgctaaaatacatgaacagagaaaataattctaggcccaaatacttgaatgctcgcaactataaataaccattaagggttccaaattgtaaccaacacccaaaagctaaagtttcaaactatcaataagagcttactactttacatacaattctctcttctaagccaaactaattcatatactaattcaacaactactcaccaacatcactgcttcactacattacaacaacaaacaattaaccacatatccacttattctaaacaaaactaatacaaatttattctcaaacgaccatcagtggtattagagctctgtttgatcatatcactgggcataatcttttccactcatcaacatgagtttggagtccaaccgctcttctctacctgttctaattttctatggagaaaactatgttttttagtccatcaaaatgaggacctattttcgatcaaaaaatctatgaaaaattgttgaagaaggaatcactattccaaaagatattacatctctttcagaggatcaaaaaaaggcactagaggataatcaacaaaaggattctcatgcatt

SEQ ID NO: 310157 - DNA, 1797 bp, Cannabis indica
attttcccaagataccacatcattagactcttcggggtttgtgcagacgtatttcatgatgtctgttggattaagtgacttttgatttctaattgtcgtgtgtccaaatcccaacaaatggcgttaattcgtatataaacccctaagatatgaattgacctcacttcatttccttcccattcttagtctttattgaaatttttctctctaaaattccaacagaaattttttcaaaagatttgaatcttcttttgctagaggttgtttcgaagttcaagggatttttcaaagtgataatcgagttcaaaagaacaagcgtttggatcaaaagttggtattttttatcactttttttgtttaatgtgttttatttgaataatcgtgtactttctgggtatttaggggtagaagttgcataaaaattgaagtgtaggttatgggtaatgaaattttaagaaggaataaggccaaagaggagatttttcctggaaaatttctatccgtgatttgaatactcacacctcctttgcatgaacttcaaatatttgaacttttcgctataatactttgattattcgtgtatctaagtcaaaccatgatcttggactaacagagtttgaagtggttgggtgtttcacagtgatttaatgttcatatacctatataaaccttaagacactgtgaaatatgaaaccacttttagctcaagtgttagtttcgttgtttttgttgaatttgaattttttattcatgtgaggacactcctcttttaaatggcactcataacacgttgaatttgaattttggatcttatttttgtaaagttatcaattagacttttttttttgttaagtgacaaatcaggccttgtattttttaaaatagtaaaaaatagtaccttaagttcaatttttgtcatttttttaacataaccaatatgaaactagttcctagcacgaacaaatataaaaaaaatttaatcaatgtagtcataatatctcccgatcagactattattaattttattttgataaaaattggagctcaagatattatttgtattgctttaaaaattacagggttcaaattgttatttaataaaataaccaatctaattaataatttttataaaatacatgatccaaaatagtataaacctttcactaattaaacattgatgagaagaaaccatattattatttaaaaaaaaataataaattagagtattacttttttgttggtctttcaaatggttaaaggttacaagtttcctaaattcaccaatgaatgaaacataacaattttggaaattttttcttttaaaaaaataaaaatagaatgttacccatagttgcattaataagtagatctttactcaaaaatcgaatacatacaccacaaatatattttgggataattacataaggcactattttttatacaaaaaaattacattttcataattttacaaacacgaaaacaacaagaaaattacataaaaataacaggaaaataacatctaaataacatcaaaacattaacaaaaaataacacacatataacaaaaaatcaacaacaaatttacaaaagtataacataaaaagatcatactttttgtaaataaaatcataaaaatcgtaaaaatatttaaaatctcgtataatcatatttttgtaatttctttattatttttacgtatttgtgaaataatcccatatatttttatcattttcttaaaagtaaatactattttggactttgtgttttacaaaaattaccgattggatcatgtgtttt

SEQ ID NO: 310158 - DNA, 1169 bp, Cannabis indica
atatattttttagtttttttattttattttaaatttttctaattaaaattattatttggaccaataaaaaaattgacacgtggcactttatttgggttcaacggatccgttagaaaaaggaccaacggacaaacaaaaattgggaccttaggtattttcaccgccaatttttgaggttgaggactaatcggcatcaacttcaagtttttggggacttttgccgcaattatccctattttttattaaaaaatgaacaatcttactattggacatgtgtacgtatatcttacaattaattaataatatttcttaaaaattattatgttaaactatataaggcttaatacttaattaaataaattgctaaataatattggtgccttttattagaattctcttttctttgtcattttataaaggattttttcaaccttaaaaattggtcttttattttgatgttcaaaaatttggattaaaaagaattattgaactttagagcctctggtaggccttggtgcacgcatggcccaccttaactcagatctaagtctagccctcgcgataaatgtcaaggaggtgctcaagcgattctccaacaaatggtgcttaagtgatgtaccaacaaccatggcgtcaaagactatgctctagtcttatagtgtgtgaactgtgataacaacatatatgttaagcactaggttcaagttatatactgaagggactcagttagttggttattcatcaaaacacaaataacttatgcataaaaattgcaacacatattttatcatttaaattttacctttttttctttttaataaagatttcattaacagagcaaaaactcaaacaggattgggaaggtcagcacacaccgctgcccttacctcagagggacaaaacctcttccaaatagcattagctttagactttaaagctgatttagctagaacatgtgccactttgttagtttccctaacagcaaaacattaattcacacaaccagaaatagaagacaacacactaacatgcgctactaaagggtcaaggtcaaagcaatgagcatccttgctatccaccatgttaattgcttgtctacaatctgattccaagagacagttagagaaacccgactccaaggccagtttgatcccagtcttcatcgctag

SEQ ID NO: 310159 - DNA, 695 bp, Cannabis indica
aaaaaacaaaaatgtgttttgtaaccatttttatttttctattttaaaagaaaaaacataaattttgatttttttgcttttttttaattaataaattaagaatatcatttatttttatttttaaataaatatataaaattataataacaaaatcaaataaaaaatacttattagtattttaaaaaaattgaagtaatttgaaattataaaactcattattatctataaacacaaaccgacaaagtcataataaaatatgaatgaataattgtccaatcttgaataaaaatattaaaaaagttctaattgttaataaacttcactcactatcttcatcgtcaatttgttctccatatatgattagtaattttcatcacggacattagccattttatgaatttgatctcttgaaatgctaaactgatcaacactatcattcaaagtttcgtaggtgatttatatagtagtgtcttgtacttaaggaatattttcatctccattaaaatataatgtctttttctgtatttatccttataaaattgcaaaatcccacaataggcaattacaatgtatttctgtattctcagtttatacgaagatatttgttttaaaatgtgaaaacgagccttcaatatgctaaagcaccactcgatgacatttctcaaagacgaatgtcgataattgaacaacttcct

SEQ ID NO: 310160 - DNA, 1097 bp, Cannabis indica
aaagagttttatttagggcataaaacccaacaaaaatagggcctcaccgcggcgagcatggccacgacgtggtggcggcgagcaactacaagttgcccacgccaggacaagcccagccgtggccgcgacaaggggccctgtaatccaaaaaaataccatttttcctacttcgaatttttacccaaaaaatcatattaaacctattcaaaacatgcataaggcctatttcaatccaacaacaattcatcctacacttggaactcaaaagagtgcctcatcaaactcaaaataacaaactaaactcaaaataactaaatataaaattcaatccataccattacacataaatcaagcttaaacttcaaggcttcaatctaacaaaaggaacccaaaaattcaagctccaaaaccaaaaaattcaagtggaacaaccctagaatctctctaaaatcatataaaacaatcaagatgaaaataacacacatccataagctcaaatataccaaaatcatactaaacctcaaaattacaacagcatgcatcacaactcttaggaacaccaaaacatattcaaagaatttcaattaaaatcaaaattaacataattaaaagagataagagttttaccacaagttctcccaagcttcaaccaccaaaaatcacacaaaatccttagctttcttcaagattcaaagaattagaaaaaactagaggtggaagagagagggtgttatattattttataatataataataaagtagattaaaatgtgataaatatatgtgaataatatatattaagtgtatggtaaataaatgtgtaacctatgattttataacctacacttttgtaacctacatgttgtaacttggagaggagttacaatttgttgtcacttgtaactcatgtgttgatcacacattattagtgtaataaaagggttgttacataatttgatgataggattcaaatggtatgaaatatagttgttacaaactatattaatactcatttatatgagagaaatgagtgttgtgtattttgaattctaagtgatcacctatacattataaaaggaggtctttggtgctcattt

SEQ ID NO: 310161 - DNA, 776 bp, Cannabis indica
gatgttaatgaaacatacttggtagtaaatctggatcctggtaaaatatttccaacaccatgaacttgactgatgcaacaaatcctactaactcggcagaaccaatatactcagccaataaatttgatccaattgcccttactaatcaacctaatcccgatgaacaaccttttctgcccaaagcagatttgccgacaacacctcaaatagaggatcttatcaattcagagtaacccttatggagcaaaattaagattagtccccagtattatgaaggagaaatagggctaggaattggcaaaccagctatgtgaacctgtgagaggacatcgaactggccaggctcagagaagtcgtgggccaagtcacctaaactaaagaaccacatagtgttggtttcgatgctttcgcccaatagagacgtgaattcttgaggtggatggatgactaggacgccatcctttgggcccatcaggcagagctagaacgatgtaacaggaaggccagtaaccaaataaggtggtttaatgagcgaattgtcgtaagaagacatgatctaattatagatcctttacaaggaaggctcatcaatagtttgggcaaaacctataggcaggtggacggtgtgcaaactatccaaccaagtccctcgagcacaaggacggaccttcacctgcctgaagatggtgaatgatgtttagctacttgtaaatgatgtttagtgatctaagaattagtcacttaaacaagagctcatccatttacttctatttagc

SEQ ID NO: 310162 - DNA, 2108 bp, Cannabis indica
atatagacgacttggacgaatgcttcaaagtcctcaggaaatacaacatgaaactcaatcccctaaagtgcttctttggagtcagcttggataagtttctaggctttatcgttaatgcccgaggacttgaacctaataaagagaaaattcaagccctcctggatatgaaattgcctacaaaaaccaaggatgtttaaagtttaactggtcagatcgctgcactctgtaaatttgtttcaaagtgagcagacaagtgtgttccattctttaacatcttgtgacgaaataagcaatttgaattgattgaggaatgcaaaaagcctttcaagagcaaaaaacactacttgcaaaacctcatgtactctcaaaacctctagacggataagaactgggaatagacttgggtgtcggggatcatgcagtaagtgtcgtactgatatgagaagagaacaatatcaaacatctgatctactacgtttgtaaaagactcattaaggctgaaggctagtgcccattgatagaatagctcacctattgcctaatcttagcaacaagaaagctacgacctaacttttaatctcatcttgttcaggtgtacactgaccaaccattacgtcaagtgctacaaaaactgaatgcctctacatagttactcaaatgggcggtagagttgggtcagtatgaaatcatctttcagccctgaacaacgattaaaggataagccttagcagattttctgttttaatgtatgggtaaagaatagagcactcagaagacaacccaaagtcagtacagaaacctcaaccgagcagcagtaaaggcgaacccacctggaaactacatggggatgggttagctacagatcaactattcggcacaagaattgctcttgtcacacctgggggcaacatctgcacggagcaatcaaatttgggttgaaagcatctaacaaggaagtggaatatgaagcccttattgctggtctaaaagttgctcaagaattgtatgccgaacacattgagatctacagtgactcacaattagtggtaaatcatgtatctggggaatatgaggctcggggataaagaatgatagctaatctaagtaaaatacatgatttgctcgtgcaattcaaaagctatgctcttaagaaaattccaagagaagaaaacacaactgcagatgcatttgcccggctcgcgagcagcagcataaatgaaatacctaagtttagaaatggattagcaaaccttaattagtaattatgaatagttgagaaattatattattatataattcaatatatgagaatttattttattaatgacatgttaagaccccgttggtgagccaggggcattttagtaattatgaactgagaagggtaaaatgatgaaattcatttaattacgtgcttcatggaactatattattatatattatgtctgtgttgtcttttcaggtgtattctgacagggtggcacggtatagtcacaaccgggtaattcgggccgaacggggttcgggcccgaaatgcgatttgggattaaatgtttgcattttatttaataatgtgaaatctgaaatttaattggaattaaatatgcttgaaatggaaattatgcccttatgagtgtaaatacatgttatatcgccctaagggcaaattggtctttgacctaatctgatttatttaggtaaaagtgaattttgaggaaatgaattaaaaatttctggtgtttatccctctctcacctgacccctctccctctctctagctctctttcatttctcttgaaatttgttggtgatattgcttgagtttggattaaagtgaagcttggttttggggaaatctttgtttttgcctttggtatgattttaaggtagtttcttcaactttgatcactttaattcaagctgaattatgttggaaaaatatggattaagtgatgttattcttgagcttgcatgttttgtgaattggggttgattttgatgattttaagtgtgatattgctaaatgttgtacggattatgttgttatttgttaagatgagttttcaaagtatttttctagtggaaaatataatttaattggtgttttt

SEQ ID NO: 310163 - DNA, 1304 bp, Cannabis indica
ttgagggatatgtagttgtgagcatttctgtaattgatgccaaaaggaatatgtaattttgcgtataagaagtaatggaatgaaagaaaggaatatatgtttggtgtttcaatattgcgtgaaatttttggaggaagtgttaggatcaagtttcttttccttttttcgagtcctcagaaaaaaaaaattgccgcttggaacataaaaggtgagacacgacacgatgcgaaaattcacagctggcaggcttaaaaacgctctcacccgttatcttaataaccataccaatctttcttcttcccaatcacgcttcctctcattcaaaactgtacttgattctgctactgccatggcaaacccttcttcctctcctgtcactctccaaactatcaatcccaaggtttattcttaaccctttgatcgattttgtgtttttcaattgtttgattaacacccagttgacctttttaatggatcattgttttctagttgatgtttctccatgtggttctgttttaatttttcttaaaacatctgttatttgtaggatttcgtttgattcttttgtacttcaaaaaataaataaatagagaagaatagttttttatgtccttaaatgatccttcctagctttattgaatcaaattataattgaaaaaaataaaaagtaaaactttagatttaatagttccaatgtcgtgatgggtttaattgatgttgtttttgttgggtattgcatccttttagttctctctattgtgttcttaggtcataaatcataatgaaaagatccttgttttgattttgctccatgaaaagacattttattttaagtgaaaaggcatctcttttctagttgggctactgttattgtatacttgctttacctttgtagagtaagattgtgtagtttcttctgattccacataagccctcgaattgtttggtgctagttatatgataccatgaactgaaacaatctattggtaaatacaaaagtgaaaataaataaatttttaatacatcgcctaaacatatggaagtcttgcagtgtgaaaagggttaattataattaacagatactctttgatgctcctctatatatttattaaggtgctgttaaaatttgttgttagcagttttgaatggccacattcgtacagaataaaatacagaacattaataaaatgtggagccatggcttagtagtatatacaatactcctctttgtcttctatgccagaacatatattcaatgattgaatgataggaatagggatgtaaacggggcggggcgggtgcgg

SEQ ID NO: 310164 - DNA, 958 bp, Cannabis indica
atttccaaattaaactaagcggcctttacaaagcagctcatgtaacttcttcagttcaggaggaaagaaaagacgatttttcccattaattcttctactgtaagggattcgcataaggggaaagagaagattatcgaaattgaagacaagccttctacttctctgatggttactactccagaagttatggatgtggtcgagttgaactcttaagattcagagctcatggtcagcctgtgtgctcaaggcaccatgttgctggcatcaagggaatttatgattaactccaaggccaaatgcaaacactcgcgaaggttggtatccaccaagcctcctcatgttatttctcaaggaggtttcggtgacatctgcgagatgagttgtttaatctgctttttcttgtctttgaactttttatcaaagtcttatcgtgacctttttttgtcacttataggcttgtgttggcttggcttatgctatggataattagcatatgagggttgttgagctggctaagaaattggctgttgctgagcaaagagcttctgatgcggaggccaaggtcactaaattagagaatgcagtcaatgaacttgagactggtgtttcaaattttttaggtactgtggatagtgccaaggattctgagaagagcttaaagaaacaactttctactacgagaagaaaaattataatgatcacaaacttagaacatggattagtggagtaattagcattaatttttatatttttcatgattatatatgattaaatatgttatgggccttatatttaagaaataggcattaaagttattattatacccaaaatttggctggtacttcagagaaggacacgtgtcaaattgggagaatatgaatcagaaaatataatagtaattatattaaatgatattaaaatggaaaaactcattaaatgctaaactggtagagtatat

SEQ ID NO: 310165 - DNA, 1971 bp, Cannabis indica
actactgactgtcacacaaagtcactcggcctcatgataaccaaggtcactcgacttcatggtgacttaggtcactcgctaaccaacaagagaaaagagaagaaagttagacgaggttcaaacctgagacctcttagacaaggtgagaagaatttttcgatactccaaggtgcagattgtgaagtgaaacccaagtaagggaggcccattatgtatagtgggcacatcctcaaaaaacatggagaaggtaaggctcacactccattcgagaaaacccccaattcatctagtcaataagaacacttaaaataattattgtagactgggggcaagtgttaacccttaaaattgatagagttgattttcgagattagtcaacaataagtctcgatggtcgagagacatagactgtaagagtcatttggggaatgactgaatcaacacgtatggctctgggctcgttaatctcaataatcaatgcttgcaaatctcggagtatatccttgcaaattggaggtcaaccctataacaactcatgagtagagtaattaagatcaacttactaagttaaattgttggaggatttttataatggtccgttcaaaattagatcttgccataagcatagaatccatagatctctatctcatctatccaacaaattttgaatcgttgaattctgatatatatcgagagagttatggccgaaatcttaagatcattgaaatgtgacaactggtgtgcgagcccatgtgcaagtgtgggagcccatgagacactgtgcgagcccatgagccactgggcaagccagtgagcatttgggtgagtcgtggagcatttatgtgggccgtggagactttacacaagtggtggagcatatgtgcaagttgtggaggagcatccctgtgagccatgctaacgtccgtataaggggctcgcctgcgaggctgcgagggctcacgtgcaaggctgcaatggcttgtgtgcaaggctatgaggagctcgtgtgcgaggctgtaagggctcatgtgcgaggctgtgagggctcacgtacgaggctacgagggcttgtgtgcgaggctgtgagggctcacgtgcgaggctacgagagcctcgcatacaatcatgcctgcatgcacgtatctatgagcatgcatgtgatcacgtgtgtacgtgcgtgcatgcaagcccataagcgtgaaagtgtcgtgtattgccaaatgtgttgtttccgtgaaagggagtgtaaggtgagagatgaatgcatatcaacaaggatgacgttggaggaggaatcaaaggacaagacatgtaagggaaaagcgtacaaccacgcctcctgctagctctgagagcgaggaggtacgagtagtggaatcaacacaccagcaaggtctaaggacctgaccaagggagattgcaggcatcattcctccaactggggaccaccattatgactagagatcacctagacaaaggtacgaagcgcaaggccacctcctacacttgcgacggtagcctgaaagtgacacattattcccttaggacaaccttgtactttaagcccttagagcatataaatacctctttcttagatgtgggaagggattgaaaaatcattctcgtaacttgaccttgagagcagtagaaagcttatcactttctctccatttggagatagtaaattgaatttatatttcatctttcttttcgtcttagaatcatagtttgattttctagccaacaagttagttgatgagttctcaccgtcaacaataactatatcacaaaaaataaataataaaaaaatccaaaatatacatagaaaaaataaataataaaaagaaccaaaatatacatagcttatatcttcacaaacataaacaatattcaactttatcataataaaattcaaatacttaacatattcaattaaactaacaaatatacctctaatttaaaataaaaata

SEQ ID NO: 310166 - DNA, 2402 bp, Cannabis indica
gtcgagagtcttcctaacttctgctagtttttgtggcccatatggatcatacctacaatcgatgttcccaaatattttgcttcgttgtgaccaattttcccctcccctccccatttttagaataccgtgacactcttcgtgcttcggcgcaatcccactataaaaacgaatccccttggaaatatcccaatgctactcctttttgaggaactctttcctcctccctcttcaccagcccatagcctgcagcatgccgtaaaccagtttcttcgagttcactccccacctcgtactgccaccatcgctacttccaatactgccatccctacttcccctccttctcagactttaccctccaccattccaccccccatcatgactacttccactatcccccacactgcaaaaggaaaaggtattgctttccccacttccagtccccctcgcactggtctggttattaatgaaccttccacacagtcttctcctacttcctctgttggcaccaggaagcatttcactcgacagtccactcaggtgggggattctattaggagcatgctcaagcgcgctcgtgcagcccccagtgaagatgctgttgtccctctctctctctgatgatgaaccaacggcgggtgtcgcatcgcgaccccgccgagaaaaatgagtttctgcagctggaacgctcgaggtttggggagttctcgagcgttccgtcacctctccctgttggtcaagcagcatcagccaactctgctttttgttatggagaccaagttgcctgccggtcgtggactttctttgaagtacaagcttcattttgataatgttttaaaggtccctaggcaaggtttaggggggtcttttgcttttttggaacaactgtattgatgttactgttgtctcttactctctcaatcatgtggactgttatataaataattctaatgatataaactggcattttactggttattatggttctccttatattgattcaaaagtttttacttggacccttcttaatcgcttatatgacactactccccttttaccgtggttagtaattggtgactttaatgattatttatctcttaatgatcgtaattccacttcctcccctcccccccatgccatgcaccattttcacagttttctgcatactcgtaatatgaccccccccctcccttactctgggaacaagttcacttggcgccatagctctattcttgagcgccttgattggtgtacgatttcctcttcttggacaagtcttttccctcatgcctctcttactcatttggggttttatggatatgatcacagagccctgaaactccaattagaagacacttcttttaggcatcaaaaacaatctcgcttccatcttgagaacttttttctcaatgatccttcctttccaattttggtccgtgactcatggtgccttccttcttcttcatctctccaccctttacaacattttcttaacaaacaatccacctgcctctccaccattaagacctggcaagcttctcaaccttctcttaagctccaaattgccagaactcaggctgagcttgatcatttgttaaataacaatcagccaaatcctcattctactcaacaaatctctcacctccaatctgagcttaacagacttctcctaaaagatgaaatctattggaaagaacgatcaagggctgcttggcttcgagctggggataagaacactaggtttttccatcaaaaagcctctaaccgtaaacacaataactacattcgtggattaacccttcctgatggttccatcactcatgatacccaaaccatcttcactcaattccattcctactatactgaacttttttgctctcaaggaacctcttcatctgccatttcctccattcttcagggggtaaccaactctctctctctcctgctcaatgtgcttttcttgctgatgagtttactgcagaggagataaaaacagccatgtttagcctctctggtgacaaatctcccggtcctgatggtttgaattctttcttttatcagaaaaattgggatactcttggatctgacctcagttagggtctccttcatatccttaataatcagggggacatcactcaaatcaacaacactattttggtccttatccccaaaaagaagaaccctaaaactgttcgtgattttcgacccattagtctttgtaacactctgtacaaatgtctttcaaaagtcctggctaatcggcttaaattggtgcttcactctgttattagccccaatcaaagtgcctttctcactggcaggcaaattactgataatatagttatagccaatgaaatcattcatgccattcattctagaaaatctggcaaattaggttgggctgc

SEQ ID NO: 310167 - DNA, 629 bp, Cannabis indica
atttcttttttaaataatttgataaacgacatgtcgtatatgcattaataaaaaaataagaatggtagttggataatgattgaagatattttgtattttctttcttaaaggaagactattataatggctccatctcttaaaattcattctcaagtcttctcttttcttttcataaaatggtccctccttcctagttttgctatactaatattacaagttaactcaattaaattaaacgtaacaaaacagcaaaataaataaataaaatcaaatcaaatgaaattggtcatgaatttttattttttattttttgaaagcaactggccatgaaattgaaaattatgtactacaatttttagttcaagcctttataatttctctgacaagtttatctgagtgagtaaatttagtaaagaaatgttatataatatttaacagatgtcagtgatgtaagagccaagaaagaaggaaaatggagtttgccccagaccaaaaggagagattttgatcttagtttttccatctttggagtttgaaatactgaaaattcagaatacccatatcaccaaaaaggtcaattttttataatttttttttatttctttgttcttcttatgtttattgtttcg

SEQ ID NO: 310168 - DNA, 1817 bp, Cannabis indica
aaaaacacaagtcttttgtcttactcttaagtattgacaggtaaacaggatggttgtacaaacctgtaagggagggctcgctgatcaaggcaatccaatggtgacagattccatgtgcaaactcctggaaacacgacaggaccaccagggacaaaccccgaacaggttaatacacaacctcctactgtaggccacagagtgacttcccctctaattgggatcaggcgtacaagattttggaaacaccagtacaacagctgatcaatctactcccagcactagagtcttgtccactactaatgcttaaaggccatttagagatgatattgaactccaaaatttacgagccgcactcgggctcatgcaaaaatactctccatcatgatcaggaggatctctgagcggctataaaccttgcatttgatgagcaaaaatgtcaattcatagaatagaaggaccaggagatggaaattatgagggctgatcagcaggcaaccattggcgatcgaactaggcaggccaccgtactaatgagaagggcctaccaagtcactaatcaacaaccggctactgtatccagtattgcctttggcagatcagaagggtatgcagctaggcataccacacaaactgatcacagcggtcccgtccaatccaaggccacaggtccaaattgtgagccaaacggtagacggccagatcctgcaagactgtcctttgggaggagttacacataccaataacttcactgctactgaagtttcaggccaacctatcggccaaataagtcagacaccaatgccacctagtatctcagtgtttgataggttgggtgtcgcacatgacctcaagaccaacctaaattgcagaaggggcctagatgaacaatacgttccaccaattgtccaactaagtatccgcacccaaggtccagttcaaagagatccaaatgtgacacaggctggtcaacaggtcgaacaagttcatccacttgtgcaagcacaaatcgatcaacttaaaaatatagtgcaaggcttgaccgacccaaaactcactggtctcgaactcgaccgggcacgaggatcacctttctcccctgaaattgaagttcttgagttactcccaaagtttaaaatgcctacctagaagatgtatataggaaaagaagatcctttatcacacctaaaatattttatgatgcagatggacctgtagggttaagaggtgatgtacggtgcataatttttcctgccacactcgcagaggccgccggacaatggtatttcaaactgcctctaagaaggtttaacttatagaatgtcttctcatcataattccatgcacagttttcctcctctcgtcaacttccctcgcaccttgaagatcttgtcgaagtaaggcaaatgccaggagaacctctcaaagcttatattagcaggtttatgacagatgctacaaaggtcaaggggctaactaaagaagggagactggttgcaatactggggggcattgaacctcttggagagttgtggaaggacataatctgtgggatcaatgactgaatttctatcgggcaaatgggttcataaactcgaagaagctgttcgccgtgtggatattgtcgggcaaaagaaaaatcaaccacatgccacttcgacagggatgtccgtccagaattcacaatatcccagcagttcaaattcgaataggaagaggtctaacaacggaaataagaaaggtaatggaaagaaaggcaaattcactggcaatgttgagaagcaccccaaagaaaatgcctctaaatttactgctttctc

SEQ ID NO: 310169 - DNA, 1079 bp, Cannabis indica
tacccttttgatacccataacataattggtcacttaattttgcatcacactttataatagcatatacattatacatatgtgcccacatcggatattaatccaacactgtccagtcttaatcttgtaaattgctctatttagcgagcttaattagggattaaatctgcattaggtccaattaatccaatcaattatcaggtagcctatatataggaccaattttcacatgtaacacaatctaaatttttgtttacaaacaaaaaagctgccaaaattgtaactaaccttcattacttttaaaatccggtcataatacaggtgactcgtgaactaaggtcccattaacagcctaacccatgcaaaatctatgtgttctttatagtttacttattttctctcttagtatcttctatcttataagttgatgaaaaatcaaattaacaataataatattatagtaattgcaaaaaaaataaattacttttcgctagctaaagcactctttaaaaccaagaattaatttggaagtcgttgaaccacattttttcaaaagaactccctaaaaaggtagccacttttacgagccttggagataccctatgtttcgtaaaattgggaatgcaaaatgcaacggttaaatctaatgtgaatggtttcagtctagggcagtagcctgtgatccaaatgggatggccattggtacaaaaatgtgtttttggaagggtaaggcacgtgtacccttggcgctgcaacttgctacgaatttctccatctccaacttcatggtggcctctagctgtagtgtaacaccctaactagcataggcgtattacgtaatttttaaacatactgtgcagctcgttgctaatcaacgaggtttatggaaatcatgattaattaatactgtgggatcccatttacaaaaagctttacaaaagtttactgtctaatataaaatacttgtcgcctagagactaattacaaaagcactgttgtcccgaggatcgtacgctccaggcctaaccgccccgacatgtacaatcttcattggctcgctctcacggttcctcagccttggc

SEQ ID NO: 310170 - DNA, 1577 bp, Cannabis indica
tatccaatcaactttggacttctactgcaagaatgagttgtagtctccttggactttaatcattttttcccgagcctctttctctaatatgtgcaaattgctatccagggggctcttttgtagctggttctgaatgctgtctagatcaattttagctcttgtaactgaagtctgcaagtccataaaaccctccttattgatttctttaagcctcactttgaactgcttcatctttgtcacaacgtgaaacatttttgagccattacccgactgcctccatatctccttcagatcagattcatagctaggatgtgtcttccacatcttaaaatatttgaatggctttttcccacttattacattagggtacagagtcaacaaaccaagtgtcactactacaaaaactagtttcagtgactcgtattgaatgactctaaaaccatttagtgacacttcaccgtgcgtcactaatgagggtgactggaaaagcagtatttagtgacccttcagggtaggtcactaaacccttttagcttcactccaagcgcgtcactataaggttttagagtcaaacattgtcagactataaaagtaacagctactctcaaaaagtgtcactatatctataaagtgtcactatatcttattttttaattatataaaaataataatttaataataattcatattatttttataaatattatttttttaaggtataaatattatttattatttatataaaaatattattgtttttaattcatattatatattataaatttaaaatatttaatgatacaatttaaaaatacattaacataaacaaaaatatgaaatacaatatttgtataagaatgatttccataaatcaattactcaagagacaacatacaaaactttactttgaaactaaaaatattcacattaattaacaaatacaaacaatggaatggaaatgggtataaacacacttaggaacaaattaaaaaaagaaacctaaaagttaaaaaaaaacaaatcagatccagtatatgaaatcgcccactatcgtccataactccccaccctccatcatcggccacaaaccccagaccaccatcgtcggccataaacccaataccaccaccttccgtcactaaccccaaaccgtcgctgcacacctgcacaaagaagagagagagaaagagagaaacagtagagacaataaaaaaaaattaatatagaaggttagatttaaaatgactacacacatagacaaacgaggaagactgtcgtcctccgttggtggatctcgcctgtcatctgacgtcgccgtggctgagaaaagatgaagaaaaatgtgtttgtggttgttggaaagagaagagagcagaaaacttgaacccataaaaatcctagaacccaactcgtgaaggagaaaggaagaagaagatatgtgaaaccctaactttgtgcagctgtgactgtgagagaggagaagaagtttgaaaagtttagatattttgagagaggttgccgtgtattaagttgtgtagggtttggaataatttattttatattttattatttatttt

SEQ ID NO: 310171 - DNA, 3159 bp, Cannabis indica
cactttgtcttaaaaaaaggccttatggccgaacagatagaaaaaataagcattcaaacggttggagtcccaggctctttgtacaggtcaactgggtcagctggagctggaggatcgtttgtctgagcggggggcacttgtatagttggatcgattggagaggtgaaagtggtcgcctcaaattccccgtaggccgcctaagcaacatagtactcgagaaacatgtctttggtgtcgcccaagtaatcaaagtttgcctagggattggccttctagaagtcatagaaaatctcgagaccagctgtctctagagcattcactttccctcagagcctctccacttcggatctctgctgcccgacctctgatttatacttctcgacctcagctttaagttcctcctccttggtcttcttcttttcttccaacctgcggaggatagcccgcaaaacctcccttttttcttgaaggctggtcactaccttagataaggaagcaatggcagtttcaagctgattggtggcttgtagttctttggtcagttcggccaccttcttctcagcagtaagaagcttcttattgacctctcccagctccatccagacagccccaagttgaacccttgcttcatcggcatccttcctggccaagtccacttccgcccgcatagtgttggaaatggcggcattcttagagccagccgacttagctcgggaataagcataagccatcttcagtactcctcccatcaccaactccagagaaaggtcactgtctaccccagccagctgctcgttcacctcagggaccaactgagtcacatagtgagtgagcatttccttgcctcttttggtctctgggtgcagtaccggaggtggagctggggctctgatcagctcagatctgcccctcgtctactttggcctatccgagctacctccttgagaatccttggacttagtcatttttgggttaggaggatctacaataatttgttcctcgaagagatcaatgactgctttagctggtgccttctctctggacggggtagtctcaccatccttggacttcttagccagaggagataagcccgagcttcctcccactctcttcttcgtagcctcaagcattttctgagacatgtctgcatgaaatgaaagtcacatggttagaaaaaagcatgagaaatatgaaagcataataattaagaaggttaaaagcaagatggagtatcctacactttagcaggagcagctgcctaaacaagacctgatggggcatcgtcatacgacgagtcttcacgctcttccaggacagctttcccctttcctaccatagggttggatgaccgagcaggtagactgggctctctgatctggattgaatgttcaatgggcctataaccggccagatgtttcttcttgcttttgagcggtctttcctgctcttcctcagcctcatcctcctactcagaatattcttgagcatgttgtttggccccagctcctcccttcaacttagcctcacgcttaagttgaataagctccttctcctgctcagaatgctcttgagcatacttcttggctctcgcacctcccttcaacttagcctcacgcttcagttgagggagctccttctcttactcagctccctcagcccggctagcactggacttcctcttcttctccttcataggctgaggtacgaaatctgttggataaagtttgtactctacaaagttggcctcggaggtcaacagggtgatattctgagcatcatccgatagttgaacaagcctttgagctctgtccctaagagctagtgtgaggggtggatggcaatatatagggatctgctgaaaccgagtataagtggtgcccatgccttccaccatgtaatactcgtcaacaaaattcccaattttgctcacgaccttgtttgtggtgtcggtcaagcacttgaagtctgactgagagaagtagaagtaccctgacctgccttgtttgggggtagacttcaggtcaaaaaaccaactaacctcgtgcggagaaggcacgcccacttctaggtggcgtagaggacgaattgggcagacagatacttaatgccctttggagtaaactgggtcggacaaaggcggaagtaatctgccaccttcctgaagtacgggtgcaaaggcagcattgcccctcttttggtgtgagaacccaatcaggcacacatccctttcttggaaattgaagcttggtgatttgaggcaaggacataacattcaagcccgcccagatggccagacttgtccaaatccctcaaacgtgcctcagtgaccttggacggagggctcacccatctggcacctaaggcatcttacctcttaagaggaactgtaggggtaagctcctcagtgacatagtccactcctttgactaggacttcgctgtccgcatacactggctatccggcctcgttgtatcctccaaaatttggaggttcagcctcctcctctttctcagcctcagaagggctaccaggacggagatcgccctgttcctcaatttgctggacttcagcgtccccctcatgatccccctctttctggataggtgaatcctgttcggtgttgggtaatgcggcaagctgggccacgtgaggatcggatgcgttgaccttacgcattgtttgctttgttcgagccatcatcttatggctggacagatactgtggtgaataccgagcaactgtggcgacagggacaacaatgggaatgcctaagttccccgaacttggacagccagtaggaaaagtctcagcaacacctagctgaacaacgtatgtccagttggatggtagatagcgcctccaacctttatttaaatccaaaatgaagcggtcgtatgcctcttcagcgatctgctcggagtagcagtggtgttgtatttcgggttctggagtagaagagtgttcactactcacctcccaatcttcagagcttgacttgaagagtccgttacttaaagaggacgaattggcacgaagacgagggtgatcctcatatagaagttgaagcaagtcctgttcaatttggtgttcgcttccccaaaactcactagggttcatctacaaaagacaacatgcgagatgagtgtttggtcgagatat

SEQ ID NO: 310172 - DNA, 1858 bp, Cannabis indica
caacaggaccttccctcctcctcttccttttttgattccaaaaagttttggaccaaaatttggacttctaaaacccccaaaagttaaaatttttgtttggagaatgtgtctaatgctcttcctatagcttcctctctattcaaaaaatgtgtaattgattctccagtttgtccccttggcaaacttggcccaaaaactaccaagcatgccctgctagattgctacagatcgagaaaagcttggcgatcatccaggtttgctatatactataataattataaacatctagatataaataaattttttataggttttgtttaggatttggataaagactatattagtattttatatattttttgtgggcactttggaaccaaagaaataatatctttttaatcagtatactcttcctcctacggaagtgtataatttgagtgttaactttttcttcaagtatttggatgtgcagcaggttcaaacatcaaataacaactcttctgctcctcatgttcttgtgaaatcagctaaattgggtaatcttaggatatttactgatgccgccattgatccacaatgcaaaaaacatagtgttggcgtggttgttttggataattgcaatcgggttaaagcaggtttttccaaaccaattgttgggcttgttccccctgctgtagcagaagctaaggccatctttcaagctatctaatgcgctcaaatgcttcgacttcctgtggatgtgctcataaccgattgtaaatctattgttgacaaactattgtatttggaataatagtatactggatgatattttaattagcattaagaacttgttatccttcagtccgaacctagcaataactcatgttcatagagagtctaatatatttgctcataatattgctaaattaggtcttagattagataatgagttggtgtggaatggttctctaccttctttgtaacttgcatgcgtactcctttttcctattcaatgaagcataagctttatttaaaaaaaagtgtaagtatataatatataaaataatttatattaacttttttatttatatttatttgtgatggtaataatagttatatttttatagctatatctctattacaaaataatatatatttatgtgtacatatatatatatatgtaatcaatactaattattaattataatttattattgttaatagttttggttatttatatataatagtatgtaattgtataacaaaatttataataaggtaaaattaatttgtacaataaataatatttgtagaagaaatgagttataaaaaaataattcttaaagttttcaaagtatgtaacttatgtgtttaataatgattaataaactatattcaaaaataaactattttactgtttttagtgcattaaaataatcagagttataaatggaaagttaaaaaaatattttgaacaaaaaatgtgatattcatcgttcaattttttattttttttggtttatatttttctatattttcagtttatatattaacattcattctatgtcaataacaatttattttattatatttcaatttttataatattaataataataagtgtaattattaattaataaaaaatcaatcatcctatctaatttttttacacttataaacaaaacataatcattcaaattaaatttttaaatcaagatttgagaaatttaaatttatatattgtatatatatggggctaatacaataggtgttgctccaaaattcgcccaaaatacgtggaccagtcaagaggggacacgtggatcagataacttggaaagatttgctaagtctttttatgccaccaggaagcgct

SEQ ID NO: 310173 - DNA, 646 bp, Cannabis indica
atgaaagtaccaaattattaactcaaaaattcgttaacaataatgagaccagataattaatgtttcaaattcagtaaggaataataaatgttggaatgtaaatgaattaaataagaaagacatgacttttatgtagttcgatagttaaaatttatctaatctacgagtcaattttattccctaagtatatttttgtgtaccaattttgacaagaattcggtatacagaacttcactgtccatttaccattgatttcactgttattcatagaaatagaatagtggttatttaattttatctcaatggcagttaagggtcatttgtacatactaatttgtatattattggattgtattcatatcttcctcttatcaagtccgacccagaccataattttgaacctgtaaacaaaaaattctgtaataggacataaagataattgtgttcaagtgaacttgaatttgatggtgccaagtccatgccttttgcctaacttaatttaaataagattaattatgtcttttgaacacataacactgacatgcatacatggaaactaattgcacatttaaatagacaataaaacccctagtacattatatatatatatatatctttatatattaaaagtgcctatctaacgaca

SEQ ID NO: 310174 - DNA, 3876 bp, Cannabis indica
gggtttggggttgggtcccagattcagacaccgactacgggtttgatccaagactcgggtctagatatttctggtgtttggtgacaagctgtgtcctaagttcaagttcaggtctggggtcaggtcttgggtcccagtcctagttttgttagccacgtccctatccggattttgggtccatgtcccggttcttatctgggtttgggtcccagtctacgttcgggtttgggtgctagtcgctgttcgagtttgggtctcggtctgggtttttatttgggttttggttcgggtcctaatcctggtcctggtcctagtcctagtcaagttccaattctagttgcgattttgagttccagtttgggttcgtcgggtcagggtttgagttcgatcgaggttcgagtccttgtccaagttatggttcgtgtctagatctcggtctaggtccggattgggcttcgagtgtgggttagggtcctggatctgggtccatgttcgagtttgagtctgaggtttcgatctcaatctcagtccgggtttagtttggggtctaagtcatgggttctaatctttgtctatgttcgagttttggtccgggtgcaggtttagttttggctttgattctgggtcatggtgtgagtttaggtcccaggttcgagtccaattttgggttcgggttcgggttcgggtttggacctaggatgggtttgtgtccaggcacctatcatggtctgggtcttacttcggattcccgggtccaggtcaggtcctagttcgggttagagtctcgaatttagatctttgtttgtgttccggggcctaggtccctagtctaggtcccccatacaagtcaagttcttaggtactggttcaggtttgggtctcgagtcttggttttattccacgtctcagtacgagttcgagtccaggtctcagtcccaatcttggtctgagtttttgttcgagtccttatcaggatctggatcttggtctgggtcccgagtattaggtcccgctgagggtttaggaccaggtcaggtccacgtcttggtctgggtcctagtccaggttcgagtcctatgtctcaagtcccattccttgtcaaagtctcggtccaagttctggtctgagtttgggttatggttttcattcagttcttgtctcaagtccgggtcctagtcacagttccagttctaattttgggtccgacataggttctaggtccaggttcgggtcaggatcctagtttgggtacggtttttttggatccaagtctgagtctgggtctaggttcgggtctggatttgcgtctgggtccgggtctagctcccgtgttttgatcccggtctcggtctgggtcggcattcgggtctgggtttgggttcgtgtccaagtccatgtctgaatcccaatttacgtgaggggccatgtctgggtccgagatcgagtcctgagtttgggtttaggttgaggttcgagtctcagtccttgtctgggtctgggaccgggttggggactaggtccaagcccgagtttcggggctgggttttggtctagttcctggtcccgatctaggattgggtcttgtctgagtttaggattaggattgggtcttgttacaatcccatgtctaggttctagtcccattccttgttcaattccgggcccggcatcaggtcgaaccagaaactgggacacgattccagaccgcactcggacctagacatggatctggatacgaacctggactcgaacccaaacccagatcgggattgaaactgggactaggacccgaacctggactcgaacccaaacccagatcgggattgaaactgggactaggaccttgatctggatcaaacttgggactcaaacatttatttggacccggaccgggatcagaaacaaagaaccagaaatcagactaggacttgaaccccgaccgggtcctagactcggactgggacctaggacacaaacctagatgggggacctggacccgggacccgagcttcggaactggcaccgagacctaggacctgaccccgaacccggaccctaaactaggacctgaactaggacgtgggacccgaagtggaactagacttggacccgagaccgagatccagatctggacccggggctttgacctgaccgattgtcaatgtttggatctgggacccataaccggacttaaactgaaacgcgaactcagacccaaacccggaccaagaccaggacccgtaccccgtgaacccaaaactgcaagcggaacttgaaacggacgggcccgggaacaagaccagggtccaagacttggtcggggtccctgaactagaatctgagtaggaccaagagccagacccggaccgggacgcgcacccaaatcaaaactcagatcgggactcgggacacgaacccaaactcagacacagacttggacccagactcggacgtaggatccggaccgggataaaagactcagagctggactcaagtccttgacctagattggggacccaaagtcgaaattagaaccaaaataaggacccaggacccgaccctaatctcggtccagacccggtgccagacatggacacagacatggaccaggaaacaggatccgaatcggaatgagacagggacccaagattgggatccaaatcttgacctacgttcaggggcttggacccaactcatagtcggtgtttggatcttcgaatcatacccaaactcagacctaggacccaaaatcggaacaagaaacggaattaggacctaggaataggtattgaacctggacccagaatcggatctagacccggaaccgaacacggacacaaacagagactgggatcgatattcagacccagacccgaacctcgaccgaaactagtgccaggacctgcgaccgagaacctggaacccaggacccgtgacccgagacatggactagaacccagacccgtacaagaactaggcccaaacctagacccgaccaagacaaggacttggacccagacctgaaccgaaacccggacccataccaagacccagacccaatcttggacccagagccggactcatacaagaacttagactaaaactcgggactcagactcaaacccgggactcagacccacgccgagatcaggacttggacccagacccaaactaggaccgatccttgaacttagactggactagaacctagattgggaccgagacccaagactaggaccaaggatccggacctagatgggggacttggacgcgaaattgggccctgaaactaggaccgagacccaaaactcgatcgtagactcgagatacaaggcccgaccttggacctagaacccaagacctgactactaggacacaaccttaaactcagacccaaacccaaacataggactcgacccaagacccgtgacccgaattagaacaagaccgggatccaagaccgagatccaaatctagacctgaggcttcaacctacccgtagtaagtgtttgaatccaggacccagacccagatctgtacccaaaatcggacccgaatcgtgatctagccctgatctaggactgttacgagaacccaaacctcacactgtaacaggaccaaaacttacacccaaactcaaaccataacccctactaggatttggacccagatcgagacctaagacttgggacctaaaccaaaactgggacctcgaccaaaacaaggacccgaacccagacccaaaaactggggccacacccaggacctaagaaccaaactaagacatgggatcaaaaattcggacaaagactaggactgggaccgaaactcagacccaaacccaaactaggacctggactcggacgagacacgaga

SEQ ID NO: 310175 - DNA, 1295 bp, Cannabis indica
atttcattgttttagaaattcacattaggatgttaatgaaacatatatgatagtaaatctagatcttggtaaaataattccaaaaacctttacatgtcaatatggcacttttgcttttaggagaattctatttggactatgtaatgctccagcaacatttgagaggtgtatgatggcgatcttttccgacttgattgggacttgtataaagatctttatggatgatttctcagttttcggttcctcatttgacaattgtttgaataacttggagaaagtgctaatcaggtgtgaggagtcaaacttggtactcaactgggaaaagttccatttcatggtaactgaggggattgttctggagcataagatttcgaaggtaggcatcgaggtggatagagccaaagtgtctaaaatttgagaatctaccccctctagtttctttaaaggattaaggagttttctaggccatgagggattttaccaaagatttatcaaggacttctcaaagatctcctaactattgtccaatctgcttgttaacggggtaccttttgagtttggagaggaatgcttgaaggccttccaagctcttaaggagaaattgatatcgacacctatagtcacttcaccaaattgggagttgccattcgaactgatgtgtgatgcaagtgactacgccatcggagttgtcttgggacaaagagttgacagggtgtttcataccatctactatgctagtagaaccctgaatgatggtcaactgaactatgccaccacggaaaaagaaattcttgcaattgtgttcgcgtgtgacaagtttcggccataccttattgggaataaggtgattgtttatacgaatcactctgcaataaagtaccttatgaccaagaaggattcaaagccaaggttgattcggtgggtgcttctgcttcaagaatttgacattgagataaaagacaaaaaggggactgaaaaacttagtttctgatcattggtcaagacttaaattagaagagagccaaaaaaacaaaggaggtgcagataaatgaagagtttcccgatgagcaactctttagtttgagggaaatcttgatggtgccttggtttgcagactatgttaacttcttggctgcaaatgttacacctcttgagatgtctcgtcaacagatgaaaaagttcctttcagaggtgaagcactactattaggaagaactgattctttacaaacactgtgctgatcagataataagaagatgtgtgcctgaagaagagatgtattctatcttgaacca

SEQ ID NO: 310176 - DNA, 1853 bp, Cannabis indica
tagtataatgtcatgcatatgttattacatgtttagcgtacatgttgtttatgcctgttagattgcattgatagcagtaatagtatacatagagttgtactgattactgataaatgtatgttggctgaaatactgattgatgatgtcacatcaatatggctagagtatgactagcatattgagtataggctgacattatggtcgatagtattgtcgtatgaacgttctagactcagtaccgtgtgggacacggggatagggttatgatcgggtgtatggacgccaaattataacccgggatattagtatgttttatgttatgcttttcttactgagtctgtcgactcacagtgctatttttttatgtgtaggtaagggcaaggctaaagctgtgagagtgagcaggtgaagattgtacatgtcgaggcggttagtcctggagtgtacgatctttggagcatcagggctttttgcagtatagtcgcttggcgacaaaacttttgaatatgaatagcaaacttttgtaaatgtattttgtaaacgggatcccgaaattttataaatgtaatactttaagtttattaattataagaaaattttaattaatcacatttttcattaatcttgttgattagcaacgagctgcacagtaagtttaaagtcacgctaacatgcctaatttagttagggtgttatagatttcctcgtgataatgagggaatacctagaaatcaacttaggacaagttgtcttcccccgagacatcctcaacatccatcctgagcatatagagacaatgtacacacgtacttaaataaatgacatgtgtctaatctcttctagagaagaaggctagtgcgagatgaggtaagctcaagctcgagacagtcaaggtctcgagggcatagtcgatcgagtagacaaacgtgagaaggaattagatcttgacattattatgctgaccgagaaagcataagtaactcacaaagttatcaatcggagagttactcggagataagatctataagtaactatgaacgaaggtagcctgacctttgcaagcacctaaatcgaagacagcctgaccttcgcgagcgtctaaactgaaatgcacctgattcgcgcaatcaactcaatcaaaatacaaatcaacaacaagtagatcccatccagctatgaataattgagctggaggataaatttataaaatatcaagatggagaacatgaaaaattgctaggatatgactcagacgaagaaacctagtcattccatccaaatatcttaaatttagaatttcctcagggatttaagaatccaaatgtctcgcagtacgatgggaccacagatgcggtcgctcattcaaacaactttaacactattatacgagccaacattatatcaaataacttgcgttgcattttattttcaacttccttaacaggggcagcgagcagttggttttataaattcacccatcattctataacatcctgggaacagctgtcgagggactttaaaaagtaatttgaagctgtaagagaccgtcgagcttccattgactatgggagagccacccttatcaagaattcttggttgttgataccccatctgtgtataatatattgatgggtcgtccaactctaattggactaaggtcgtaagttcaattaaacacttgtccctaaagcttccaacatagtcaggagtgggagtagttagaggcgaccagttattggctcgagaatgttatcgtacaaaacttcaaaataggaaggccagtcatcaattaatggtaatcctaactgagttgataacttttatagatgcatactctggatataactagatta

SEQ ID NO: 310177 - DNA, 1724 bp, Cannabis indica
gataactaatcagattgtaaagagttttatttagggcataaaacccgacaaaagattggacggtcctgacttcaataaaacatcctaaccagctctcgataatagtttactatcccaattttgaatacgcttcctaaccttctcctttaagaaaccaaatgccacattcttatttctaccaatcgcactcggcaatcccagacaaaagctattctcataagcagcatgcatatgaagagttgacaaaattccaagacgaacactaccaatcgtgttggagctaaaaagtatagaagacttatttagatttaccttctgacccaaagccttctcaaacttattaagtaattccagaacacgttgagcctcctctatagtagccgagcaatagaggaagctatcatcagcaaatagcatatgcgtgacatatggggctctacgagccacacgacaaccatggatccatttcttctcttcataaagccgaatgagagctgagagaccttccgcatagataataaagaggtatggagaaataggatctccttgacgaatccctctagttggaacattaggcctaagaacttctcctccatgtacaatgttataagaaattgttctcagacattccattatcatcataatctagtcaatagagaaacccatacgaaggaagatttcatgcaaaaaagacaactccatcctatcataagccttacccatatccaacttgagcaccatacaaccttgttttccttgctgtttacgtcttaaaaagtggaggatttcaaaagagacaagtacgttatcagtgatgagtcaaccaggaataaacacactttgaaactcagaaatcaccttagacaataaacctttgagcctattagcaaaaacttttgaaatgaccttgtaaagcacattacaaagagcaataggcctcaaatctcccataactgcaggcaatttcttcttcggaataagcacaagattagtaccattaagatctttaggcgttacctcattccgaaaaaaattatgaacaagtcgaaccacatcttgaccaactatatgccagcacttctgatagaacgcaggtgtcataccatcaggacctggagacaaatctggatgcatctgaagcaccgttgaacgcacttcttcttcagtaacattatcctcataacttatcgaaggttgaatcttatcaaggatatcatcaccatgtgaccccaaggaatggaaaatattagtaaaataattaactattacattaggtaagccagttttttacttgacccaatcacttgcctcattcttcagttgatgaatgaatttttttttttcaacgagagtttgcagcagcgtgaagatacttcgtgtttctgtccccctcttttaaccaaaacttattcgatcgttgacgccaaacaatttctttttggcgataaatttcagcaagcagttttttagcttcacggtattcagaaatcgagtcaacatgtaacaccctaactaacataggcatattacgtgatttttaaacatgttgtgcagctcgttgctaatcaacgaggtttatggaaattgtgattaattaaaatttttgctttttaattaaacttataaaatatttattcaaaagactcgggatcccgattacaaaatcatttacaaaaggttactgttcatacaaaataattgtcgcctagcgactagttacaaaa

SEQ ID NO: 310178 - DNA, 1285 bp, Cannabis indica
tagtaaaaagagctttttaataattacggggggcatttttgccaaaatcttttcttggaaaggacgcctcctttgattctggcagttgtatggtttcgaaaatcattataattagcctatttacattctacacgattcccagctgttagatttctcaatctttagctttcttgtcactgtacttcgtgtataaaagggcgactaatgcttgtcatttttcacaaaacttttggctctttagtgaaatccattttcataatggatcacttccttactgccaaaatgtctctcctgagtttagaagtttatactcacagacttataatatcaaatgcaccaaccaatttccattcgttcctaaagacttcaagcctcaactagagctagaaatgattgattccagggctgaggagcttccgaccaatctcaaccaggggaaccccgtcttagaaatcaaccaaatcaagaccctaacctgtgtcaggagatctttgtgtcagcgtctctccagtgttgagaaatttcctgaggctgggaaatagatcttggcttcaggaaatggtatctgatgatgtggagaaggtgatctgtgcaatgattaagtctctctgcatgcagacggtctttctcgtctatgtgtagctggtgtttctccaagctatgtgtaggcgatctttctctctcatcctcttcttaggagaattacttaatggtttgcccctagttgcatatttgtaaagacaagtttgtaaccagtcttaggtttttcttatcttaaatgccttgtactgttttcatttgaacttaatacaattgtatttacttgcattattattcacaatgtaaacaactatattttgatcaaatatacagtacttttgggtttttccattgctcgtaatatttttatttaagtagttagtaatctaccaaactttatgatttttgagcaattgtcaattctgcctcgcaattgtagttatattctgccttaagcaaacttaaatatacttaaaggattttatcactttgtatattttaatttgctcgcatgaatagttatattatttattcattttctaggtttaagtacttttatcaaggcgtcgtgatgcctcatttagtactttcctagcttgcgacaaccattagtatgcagttttatacgcgagttataccttttgatttttctctcttgtgagataggttatcaatcaaaaattatagttgtttgatcccttcttcgtcaaaaaggtttgatcaaggtgttataacaattcgaccc

SEQ ID NO: 310179 - DNA, 1653 bp, Cannabis indica
ccaaataaagagataggggaaagtgggtcaccctgacgtaagccgcaagaggatttaatcaatccaacctaacctccattaaggcagatattgagagaggtggtggagatacactgggtgacccacctgtgaaatttctgagggatcccataacaagaaagcacatggtcaataaatctccagcttagtctatcataagctttaaccatgtcaatttttatggcaaagaaaccctctttgcctttcttcatgttgaacgagtggataatctattgcacaatcacattgttatcttgaatattcctccttggcacgaaagcaacttgagttgggcaaatgagagaaggtaagataggtttgattctatttacaatgattttggaaataaccttgtacatcacattgtaaagagaaatgggcctaaaatgattggttcttttttgagttctggaccttagggatgagaactatattcgtagcattgatgcccttatgcatattaccagtcacaaaaaagtcagaaaatgcatcacaaaaatcatctcccgtagatctccaataattcttaaagaagagaaccgacattccatcagaactaggagccttatggttacccatggcaaagagagctcttctaatttcatcatgagtagggaacttgagtaactcctcctggtcttgtaacgagattctttcataaaaaaagtatctgcaattaagagcctgaccatcatcgaacctagtaaaaattcctttaaagaaatcaacgaactcatgaccaatcaactctcggttagagatccagacatcatctttattcaagatattctcaatggcatttctccttcctctaatagcagtcgagagaaaaaagaacttagaacatttatccccttccttgagccaagaaatcctagccctttgtttccagtataaagcttttctttttagggattcattcaaagagtgacagatctcacatttagtatcccaatcacgggatcctgctggtaaactcaaccaaaaaattaagcttttgctctagctcttttatgaccgtgtcaagtttaccatattgagttctattccaatgaagaagagcaacccgagtcgctcttaatttcttataagcgcgggcgggagcccaagagtgattaattgaattccaggcatgatcaaccaccaacttacttctctcatcccgcgtccatccctcttcaaacttaaaacatcttgtcaatctagcattcaaaccaccagtaagaagacaaagaggtatatgatcagagttactcgtctgggaggaagagcaaagaacagctcttggaaataaattgagcaatgctccattaactaaacctttgtcgagagcagatttaacatggttcctcacagaacagtggttatcccacgtcatcttatcaccctgaataagcaaactaataagacctcgagaatcaaccagattagagatgaaggggataaattggtcccttcccgtggacccttcacgttctaaatcactaagcacaaaattcgtatctcccagattcaaccaaggtccatcaaacttatccccaattttcataaattcagtccaaaaaaatttcttagcatgaatataaggagggccatatgttggaaattatttta

SEQ ID NO: 310180 - DNA, 2061 bp, Cannabis indica
aaacagccaccaccagtagacgtagcacgctcttcctttctcggtcgttcctgttcggccctctgcgaagctagacgaaacctctcgtctccctctactccatcgacgacttctccgcctccaaatgcccatggtctcctttcgtctcccttaatatatattttttttgggttaaaatctctccccctgtctctgattttttcaggtgtattgtgtttgaaggtctttgtggatctagttgttcgaacttcgtgtgtggtctatggtggtggggtttgttgttttcgtcgttcaaatgctggttgttctggttcctggtttacggtgacaggtttcatgggtctcgacgtttgaatgtcgacgagaagaagaagactacactaaaggtcttcaacaaaaagaaacaccaccttccatcaacattgaccatcacatcaaaattccttatcctcaaagacttcacaagaataagatggataagcagttttcgaaattccttgaatattcaagaaactgcacatcaacattcccttcatagaggctttggaacagatgtcaacttacctaaagttcatgaaagacatcctatccaagaaaaggaagtttgaagaatttgagatgatagcacttactgaggagtgcagtgcagttctgcaaaagaaactaccacccaagctaaaagatcccaatagtttcaatatcccatgcttcataggggcatcgatacaaacgaaaactttatgtgatctaggagcaagtatcaacttaatgcccctatctatgtttaaaagattaaattaggagaagccaagcccataatagtgactttacaaatggcagatcgttctttgactcattctcggggtataatcaaagatgttttggtaaatgttggtaagttcatattctctgctgatttcttaatacttgacatggaggaagatgagaatattcctatcattttggagagaccattcctagcaacggggagagcgttaatagatgtgcagaagggggagttaaacactactacaaaaaaccccttttaagtccattaaagctggacttgataagtccatctagtctattttgtgttggacattatatcttgggacataataagggtgtttttctagccgagtattgttggactagaaaaacgtttttagtccactattcatggacgtgatattagggttttttaactaaattaggcttcacgtccagtattgctagacttggaccataattttttttattttaatattaaaaaatcagtgcataaaatatttaaaaatttataaattttgtatatataaggaaaatttgatttttacgcttacatatacttaattttttttttcctaaactcataataagtaatatttgtaagatatgacaacttttatgatatccctataataccccctatttacatcaccccacttacacaatcgaacccccctcatcggaccccacatcgaacacaatcggacccatcggacccttcagaccccgcatcggactcatcgaacccccccatcagacctatgtctcctacctcgcaaactcacagtttcattcgaccctattggaccgcatcagacctacatcggaccccaacggaccttgctcaaaatcacagatctgagattctaaaacctaaatctatccctaaatctaacaaattttatctttaacactaaaatcacaaacaaaatcaataaaaaaataaaaaatggaacacgaactcacctttgacattgtgtttaattcggtggtggtgctttggtggtggtgcgccgtgggtatcgtgggtcggtggtggtgcttcagtggtggtgcgtcgtgggttggtgggggagcaccgtgggcgggtggggatgttgaaggtgtccaatcggtccgattttgtgggtctgtggagtggttcacgtgggttgggttgggatgtttagatatcgagcaagagagagagagaggggagagaacagaggttagagagagagttgaggtttgaaaatgagaggggtatttttgggtttaatgtaaagtggtcat

SEQ ID NO: 310181 - DNA, 768 bp, Cannabis indica
acagtatattctaagtcccacatgtgcacctaaataaatgatatggttgttgtttcaatattaaaaaatggtatttttttttttcaaccgaagaaaattccatacaaaaatcaaaaataaagacaatacagataactgtcacgaaaaatagtatcatattaatgatcaatatttatacaataattaacaaaattgatattaatttaaacaaaagtaaaattataataaaaaataaataaaaagtataaatatttatagaaatacataaataattgaaatatctcctatattaaagccgtgcacacgacgccacgtttacatattatttgcatatgatttatagtacttggttgttgccaactgttaatattttctaatttatattatattgaacaataataaaaatttcaaacgaaaatattgtgtgctaagattttttttaaaatattttatattatctgtttgagtactttttcttcttaaaacttttatgattattttcttagggataggttaaaaactacctttttttattacactattaactaaatataactttaaaaataatttaagggatatttgcggacaaaatcccctaaagaagggaggtttttgcaactaacccccaattctaaaatttttgcggtaaaactccctaaactcaagttctgttagcacttagccatttccgtccattttcagctgttaagtaccaggttggaatgtccacgcgtacacagtgtacacgtggcacaattttattggtcc

SEQ ID NO: 310182 - DNA, 1925 bp, Cannabis indica
tatttttcattaaagaagtcttttatcgtctttatcttagatggttttaaacggactagctagtgtgacgtctcgcgaaatcggggcgttacacaagctgcaccaactagacctcctggtttaactatcaacaaagatctcaagcacaaaaagcaccaccatcaaatttcaagccctctattgaagacttgattacttccttggccacaaattcactacaattttaacagacaactgaagccacgttgaaggatactttggaaaattctatggggcaaatggctacatctatggccaagatagaagccaaactttttgaaagattgccttctcaaccgattgaaaatccaagagcttatgcttgttctataatgttgaaaagtggcacaacttatgcaccaccaactccaccttcttcatccatccaatctcctcctacaccatcaccacaagaagatgagattaaacctcccaaggaagcaacaatgcataaattgcctctgcctagttatgttcctgttcctttattcccaagtagattgaggaacacatagaaagatgaaattggcaaagcaatccttgagacattttgcaaagttgtggtaagtctaccattacttgatgctattagacaagtacctcactatgaaatttttttaaaggaaatatgtatgagcaagcagaagttgaaaggggacaaaaaaataagtgtgggggagaatgtgtttgcaattctccaaaagaaacttcctcctaaatgtgaagatccaggaagctttatgatcccttgtactatgggagataagttggttgatcgatgtatgttagatttgggagcttcgataaatgtcatgccatattctatttatactttgctgaatcttgggccactaaaaaatatgggaatagtcattcaattggccgaccgatctaatgtttatcctcacggagtagtggaggatgttctcgttaaggtaaataacttgggtttcctggctaatttttgtgttctagacatggaagatgactctattccatgcactacaccggtgttattgggtagacatttatgagtacgtaagtataaaattggaagtcaagtccgagacattaacgatgaaatttgatggtgatcaaataaattctagtgtatttaaattttataatccaacatcaacaccaaaggtattgttaaagtcaagctaacaacattaaacaaagttaacttacatgagtttttcttatccttttctttttattttgcattgattttatttgattgagccttgaagacaatacttatattaagtgtgcgggggagatttattgtcgtgtctatcaagtttttttttacttagttgtttagttatttattttatctttttttttttagtttatattagttttttctttctttaattttagtgagcatgggttgagtgaaattttattgacaatgattgctcgggtttgatgtgtgtttactttgatgtcttatgcatggtcttttaaaaaatagttctattgatgataaaattcttgattatgtgatagttataattctaggaaaatgatagattctcatgatttgtgtgcttaagtcatgattaattactgctcaagcttgattttttttaaacttttgcacatcagttgaattatcatatttgttattgtttagaaagatgaatgcatgtttgacttttgattagaagtctcaacaactctagaacttgtttgataatcatttgaggcgaaattgataaattacagatgatcttgagatatgatataagaatttttttttttgattaattgagcctttcaagcctaccctattagtgaattacctagttttatccaatttgagcctaaatgtcgacatcttattttcttttgaccctatgcaattattggattttatg

SEQ ID NO: 310183 - DNA, 1173 bp, Cannabis indica
actcctaccttccacagtgaccaagcaatagctgctatttcttccaagattgatgagcttcgagccactgctagagacgagaaccagtccccaaatactgcattatgtagttggctgctgtccacaccagaaagagaccagtaagaaatatgattataaaaaaaaaattgatcaaaaactttttttaaatgctaaatagacatagaattcttttgtttttttttttttggaaggagacatagaatctattcaaatacccatttaaaaggtgtactacataaattttcaaaattgtatatgatttattgggttgaggtggagagtgaaaataaatatatataatagttagagagaaataggcaagtgtgatttttcatacttcacgtgagcagtgtcgtatagtgctttgttggtttcttacatacaaataataatcaacaattatcaattcacatcagccgcctcagccgattacaattgacttgatgacgattgagactccaatatttgtagaatataaaactataatagaattacttatgttgtatatattatattagataattgttacatcaaataaagaaagcaaaatttgattttgtatgcttatattagtcttaaattaatttcctaaattaatatttattactattaaaaaaatagttatacaaatattttagtaccaaaatgtctcttatgcacacataatctattccactcttctctcttcactctctttctctcaacctcatcccttttctctccccttctctaacaattcaaagtaaatttttatttttagttgtaaattaaactatccaagctactataaagtagtaaaagttagaggctttagtgtgagactctatttttcaagtacctgacaattttcgacaaaaatctacgaataagtgatttgttttattttttattcttatatttagtttagaatgttcttttcatgattaatctgtaaattgttactgtttttctgttattttgtggtaaaatagttgctgtctgttttgttttggtttttttgcattttttttttgtctagtccaatggggcccgatactagcccgatgcaatttcagttcttaaggtcaaagaagatggcccgattaggctcgatgatgggccggattgttggaatttattttaccaggatct

SEQ ID NO: 310184 - DNA, 3314 bp, Cannabis indica
gttgtgtccaaaatcacacctggttgagggtacaattctagaaaatgaaagcgtctcctcctcagcatgtgtgatatagcatctatgtgttgcatgaaaatcagagaaaaattaatcaaattgtcgcaaattaagtcgcataatgtcgcaaattaagtcgcatgatgttgtgaataagtcgcaaaaatatcaataaacaacacttattttgtgttagcgacaatgtcgtgacagtgtcacgacatgtcaaaaataacaacagagaacaataaaacatcaaaatagtataaaatcatacaataattaaatacttatatcatcgtccaactaatcccccattagcaacaattttgtgaagaacttcacatcagcgacgccagtgtgcacattcctaggtcaggtattgggaatgtctccaatcaaccacctcttgaacgtatgtagcaatctacggtctgctggtgttttcgaatctatgttatttggaagaagtcgcctcttcttcttttcctcggtgtagtccttcaagtacgtaggcggcttcctcttcctcacaaacggcacatcgtctgggggtccaggtagaagtaggacatcgtcctgtgattgtgtatcaccaatggccgtgataattgcttctaatggagttgatggtgcctcattatcatctagttcccaatcttctgggaacacatcttcattatcgctctccattggtccaccattttgtgttgccgaggtgggttgtggttccccctcatttggttttaacattgccatcaactggtccatcttagccaatagagtctccttcagatccttctaactctccgtgaaggaccgcctcatattgagatggctatttactaaccccgtctgcgccaatatgatggcttcctgctgggcctcaagtttatccagtcggacctgaagtctatccaatctatttcccaggtcattatccacggttgtactggtaggagcagatggagcggctgaagtagatggctcgtgcacttcaggtgctggtggtggtggaactaaatttgcctttgtcacgacctcgttaatggtcttcacttgactttcaaacacagaatcctgtgtagcatcaccctccaccgtttgttcgatgtccatctcaaaataaagaggggctttaccctcatcaatgatcttgaaatattcctcttcactaggccggggaaacaagcacttctttaccaccaactacaaaataaaaaaaaacacacacaagaattaaaaacagcgaaaaaaagtcggaacaaaatgttttagactatatcgcaaatagtcaataccaagtcgcgaaaaggctagttgatttctaaataaaatattgcataatgtcgccaatttttgcgaaatatgtcgtgaataaacaaagcttttttaaaaaaatataaatctcctaatcgtgaataaaattgataaacgtcgtgaagtaagtcgcgaataacaaattcagctgttaaacaagcattttttacaaaaaaaatattgcagaacataaaagaaacatacccgattgttgaacaatagtgcgatgtcggttgccttgacatcttgtttccgttggccctccagagttttccaatttaccattctagggaacttggtcccgttgtagtgagcatacttcttgcccactttctcaatcacttcgtatgcccagtactgaaagataggtacatagccactaatagtgtactttgcctcctcaacaatcttcttccccttcttcttgtcaacattatccttgtaatgttgcatatccttatgcaatgtctccatcaacttacgaaaagcacgcttgcgcccatggatacttgaagaagaattcaagatcgttaacaaactttaacatgtcaagccaaacttggacattgccctcttttgatactaatacaccttcaatgaaagcgatcaatccaagcttgtaggcatcatcttttacttcgcacctctcaagttggagcataagtgaatccaactgaacagaatcttcccttcaaaatacatccgaactagatggtcgttggacttggcttctatttcctcctttataggggcactacacataggtaagccggtaataagtccaaactctatctgttcgaatctcatgtcatttctccctacatgaaaccaaacctcatcttccttttctgtatctactttcattttccgtaagaggaggctgtggaccaaagtgccagagaaagtcaactctccagcttcccggaagcgtccgaaagggctagccttaactgtatcaaccaaatcaagctgagtaaacttggcgttgatatatctaaatctatctgtaccccgataggtaagatgtcctgtgaaatgctgggaaactggaagtttaagttcaggagccatctgcaaaattgtcaaaaattttgttaaaaatcagaaaaatgaacatcgtaaaatatattgcaatatgtcgctaatcatcgtgaaacaaaatcctaggtactactgtaatatatcgctaatcatattgctaatgtattgctaatatatcgctaaacacaaacatgtcgagaaaagcaacgcccttaaaaaatccccaacatttttaagacgatatcgcaaagcatcatgaacaatgtcgcgatatgttgcaaattgataaaaaaccagaactcagacgggcgtcaatgaaattcaaacgaaatcataaaaattgaacataaaccaaataaattactttacaatgaagcacaaacaattaaaaaccaattaaaataataaatttttttaaacaaatacctttttttacgatttcggatctgggttttgtttggggtgtcgcgatttggggtttcacaatatcttcttcgtctggtgatcgtttggttgggtttcacgatatcgtcttcggtgggcttttgcaattttgtgatgggtctggtctgatgggtttcgcattttcgtcggaggtggtggttttgttggggtcgctgggtttcgttgaagggtccagtggggtttcgttgatggtccggtggggtttcgttggtggtccggtggggtttcgttgggagtgggtttggagagttagagaaagagagagaaacgagagagttagagggagagtgggggtttgaaatggggagggtattgttgggattaaagatttttggagggtattatttttacatttttttaagaagcatataaaaacaccttatgctttttttaagcatataatgtcaaatttccttatataaattacgtttaatagttaaactattttacatttaaagtttgtattt

SEQ ID NO: 310185 - DNA, 552 bp, Cannabis indica
tcacctaacttgccaaaaaaggactttacacaacttcccatcaaaaaaagataaatgtccttttatttcttccacagtaatgcctacatcaaaaacttcttctaggagctcgtaaaatttgagaaggttcactcaaaaaaaaagcacaaactaagaactaaggataaaacacacataaatattttactgaacaatataagaaaacaacaaataggattatttaaagagaaaccataaatataaaattacaactattaaaccaaataaaattacagcatctagtaaactaaaaatctcaaacaaataaatgaataaaattccttcaatcctatacaagatgataaataatttgaagaaaattcttattttggtttctttgatgaattccaaaaaatacatcattttatcaataacaaatatatatatgctaaatgaacaatataaatgaggtatgcaactattttattacagctaaataaaatttgatttaaattttgaagacaaactcacatatgtgacattttagtattactacaaaaatcaaccaaattg

SEQ ID NO: 310186 - DNA, 593 bp, Cannabis indica
ctacctataaataaaaaaaatatgatcaaatcatcaatattaatatatcaatcaatcaatatatataatgtcttttattttttaatttttctttccaaaatatttaatgttgtaagttatgattttaactaatattagagtttaggtttagtaattgattgtagtttctcaatgtgtctcttcatgtgaaaattatgtcacatataaagtgcattgagaattaattcaaaattaattataatctttaattatgtggagaaaaatcaaaagacaaatagtgggcatatatacatagtgtatagttttttttttacctataattgcgcatatctaacacattctttccaccttcactctttgcaatctcaattttatttttagcatttaaagtaaaactcaaattaacttttcctctttatctctttcagttctcaatctctctctctctcaaccaagttatacatagtcaccacaagcacaaatagcatgttattgctaaaaaggtaactatgttattcataaatttgtttcttaatcagggaaacttacaaaaatactggattttaacccaattcttacaaaaatactgtcac

SEQ ID NO: 310187 - DNA, 1138 bp, Cannabis indica
aaaaaaaaaaaaaaaaaaatctcctcaatcttattaagctaagttttaccttttttttttttgtgaaaagtcattttctttacttggtatcagataaaaaattgctcacacagccatatttcactaggaccaatattcactcgaccaacgtaccagcatcaggagcagtgcaaagggaccagtaggtaccttctgatgtcagtaattttaggacaaaaaagactcagaactacgtccaaagtagctccccaccaggcttcaatggagcttcgtagttagagtttcagaatggatttggtagttttacaagcacactattttgtaatacactatctcaacaatttattttgaaattagatcgtaataactatgttttgtgaaaaaaaatggtcaccacaatcataagaagccaccgattgaatggtgttcgtttcagcagggattggtactcgtgatagccaaccaacactacaaaaaatttctacattttgtactaaatatgacttttagtcacaacaaaatattactttgtgactaatacatagtatttagttaaaagttgtcactaatttagttttagtcacaacaagtattgtgactaaaaacttatttagtcacaacgaattgtaagttttgtgactaatacttttagccacggactttttagtcacaacataataatcatgatttataattagttaaaaattttttacttttagtgataaattttattgtgactaaaaataagattttttatagtaagattagaggttcatgtgaaaactaaacatgagaaacaaatagcgtgcgaccagttgctcatgggggtcgctctatgtttatatgataaaatctagaaccacagaagtgatgggatgtaactcccccaagtatttatagcatatccctagaaaatttgtatggagctctctagagctaaaatggacgatttaagaactctgctgcaagcaactcgaaaaagaccagcatcaatggctaagtactaccttagacagattagttcttggtcagatcagttggcactcacaagatatttcaatgtaagtacaagtaattaaaattctaatacatataatgcaaatatatttcaaaatttagtagatcaaatgtatattta

SEQ ID NO: 310188 - DNA, 1453 bp, Cannabis indica
cagagcggaagtcttggtgatcgtcggtgactgcaataatggaatcaagagtgattggattgaagtcggtagaggcggaaactgtgagaaacagaatcagtgataaactcgaatctatggtggtcggtcgaggtggtttcaacagaagaatcagggatgctgcggaacatcgatctgagtttcaatcttcgaaaattgaattaccgctgttcgacgcaagagatgaccccgaggaatgggcttacagggctgaattgcacttcagcttacaacatttgacaccagcagaaaaattagacactgcaattcattgtctcgaaggagcagctctgagatggttctgctgggaaaatcggaggtatccttttcaatcgtgggatgacctaaaatctgtattactgcgtcgattccgttcccattccacgcatgaaggttcagtgtacaatcgggcttctgttcttcatcgattgaatactgtgcaagagtatcaccaacaatttcaggttgaagaagataaagcttctgaacaaacaaagctctcgagggataagatgaagttgttgggctcatctacattcgggttagggtcatgtgagcacaacggtaatattcaaagggaagacgaaaaacccacagaagatgcaagtgttattcgattgttagaggcgtccctggagacatttggggtcatggagatcgtcgaacagtcgactatggcatcacagtcagatttggaaattttaccagggggttcgaacacatttccgcgactagtgacactagagaagaactataagaaagaggttcaactggttgcgtcgacggggatcgcgtccctagtgccatcgccggagaagaaggctatgtgggaggtggtgacggacgaggaagagaagacgaagacgttgttattgcgagcggcagaggaagaagaaccgctggtggtgccaaggccgaccacgttgctagcggggacggagccgaaccaacagagggggtcttcaccggagacggagaagagggacgaactgctggtggcggcattggaatggatttcatcgccgttcccaaggccgatcacgtggtgggcagtgacggagctgaatccacaacggaagtcgtcgccggagtcggagaagacgaaggcatggacgctggaagcttcgccggatattcagagcttgaagacgttctcccgaggagcagtcgcacatgagggtcggctggcaaagaagatgatggtggggaggagcttctttgcactcaaaccctaccaagtaaggcccaagcccaattccttaagacttacctcagctttggcccacaagagcaaaattaacccaatgggtcactttgatttacttactccatcttgggcccagacattccaaagtttatattgctttgaccaagttgtggtcatggcccaactaaacaaagaaatgagccattt

SEQ ID NO: 310189 - DNA, 889 bp, Cannabis indica
gcataaaacccaacagtataaagatacgaaataggagttcaatagattttgtcgtcaaaattttaatttttatggttaagtgttaaaaaacataaagttcaattaattttcacaccaacatcccttcttaaaatcatgtgtcaaccctactttcactaattcacttgattatgtttttttcgtatctagatgagatgcattgttgaatgttgatgaccaattcaagaaatttgaattgttaaaatgcatgtagtgaacaatattctcatgtaccattgttgataacttaattatgcgctcaatgggaaggagtcttactggagtattgaaaagtatgtcttattttgtaaaagttactctcatttgtttctagttgtattttctcttatattaacagggattgtaattttgccgctcataatgtggttaagtggacgtttaccacaagaggcttggggttatcccgttaaactccattccgacaaatattttatgtaacgaccgtaaggtctaaccggtttatctatcagagtacgttttttattcaaaaaaaaaaactatttaaggccataatttgattattgtttggaaacttatcacaaagccataagaatagtcttatatttccaacctaccttattttaacacgttaactattatcaacaatataattaattttttagttcacaaaacgaaatacaaaattagttaccttaattatctaaatggattttttcattatataattttatataaaaatttaaatgatttataaactcattttcattaatcttggtgaaatatcagatacagtagaacctttatttaagattactctattcaagaataacttttaatttgttaaaaaaaatcaagtcccaatttgggc

SEQ ID NO: 310190 - DNA, 2238 bp, Cannabis indica
tttgatagaattaacaaaatacatgaggggatagataagataatatactattggaagtgtttattgaagtcacgtgagaagtacataatcctgatgcacacactcaatatgtcacatctccaatgtagcctaagagcaaattgggaacatttaggacatgtcggggtagatgaggctgaatgatatgacctactcatgatcaaccttgtagatcaatacaagattatcgactgtaatggtactaaaaaagaaatatatcattaacccagtaatgttgtcatgtttgaattctttcaaaagttaccaatctcgtcaaactcggtgtatttagaactcgactatgtagatttgacagaagatatattagagaaagggtcagacatagaagattagaatagtcaagttgtattttatttcatgtgtttatgtatttatgtaataaagggttttagtatgactccactttagttaggagttttagtgtaactcctttaacttgttatcctttagaatccataaataaataaagaagttttattctatctcgtaaatatttataaatatatatatcttcttatgttaagtcttactaaatagttataacaataaattgttgcggatttaggaggtatatctcttaaaattaaggtgtcaaacgaaataatacttataaaaatcaaaaacattctatcgcttaagatcgaaaatacccgcctcaaagaggataagattcttagagctttacgagaggtcatcgcaattaataaagaaatcaaaagagtcgtacatgaaaggggagccttagtcaaatcacaagaaaagtttctagtgttaagggttgcattgtcacatgtcctcgaactcctctactatattgatgatgtttggcaccgtgtctcgggtcttggcgatgcaatccgatacacaaccttcatatgtgaattgacacttgacttcctcaactttattttcgaaaagacttatattgtggaaataaacagcatggaagaagaacatgtcaggaatatacaatataaactaagagacgacagtaaggaggacttagctgaatttgtgaatttaacgaatgaacgatatttggaagaataaaaaatgtcagactattttgaggtgactgcataaatgctagaacttgaactaaaatgcctacctcaaatagaagtagaggaaatagtagagctataaagattccttcagatgaagaacccaatgatgaggaaatgccagaagggtacaatgaactggattaccttcaagtgttgaagagcgaggacttagattcaagcacaataacaagtatcgatgaaccagaaggtggcatacctaactatcattatgaggtggaaatcgatgagttaggctcagaacctgaaaatataccagcaccaatccgagcaactgtggaaatgaaaattgattccaaggagaagaatttgaggacgagtcatgcgtggaggataattagtagtttttttaaattgtccaattttatccaaggacaagacttttgttcatattctaataatctagtgcttatataattaaagatttattatgcttttaaataaatagagattgttccttcaagtaaattcttttcttttgactaaagttaaattcatttacgcattaagaactcaacaaaatgaatgaggaagacattttctctctttacttaggaattcacttttcaaaatgaataagcaacattaatttttacgacgagactaaattcttaaacctaaacaccaataacaagaagtacaaaaatattttggcattccaattggcacccagaacactgcaaggcactaagaatattggtgacaccttaaattagtcaaacactctgaggatgaagtgagtgtttaaaattaggtggacgaattcattgtcaaatttgttgatgacattgtccatacctcaattagtggaaggacgttaaggatacctaaggctgactctgaaccaacttaaggagaccaaactttatgtcaaattcaagaaatgtgagttctggttagagaaggtggcattcttaggccatatagtttccaaagattgagttgaagtggatccttcaaagatcaaagcgattaagagctggccatcacctaagactggaagtgaagtaagaagcttcttgggtctacgtggttactatagacgtttcgttgaacgattttccaagatagcaactcctctaactaacttgac

SEQ ID NO: 310191 - DNA, 1565 bp, Cannabis indica
ctctgacgacaattttatattggaaaggtatattttcaatgtttttaggtgttgtttgattgtgttattagctttattgtctaaatttccgggggcagttttgtcccatgtggctcgagataagaattctgcagcgtatggtttggcaaagcatgcccttcagttaaacaatgagctatcctgacacgaggaggtgccgtcgcggattgtagattgatattttgtttatcatttgtgattttaatcaccgcgtcaaaaaaaaatcttacaggaaatataatgagtcaaatttacattataattaatgctgtttttttatttacttatttactactaattaataatatttactaattaaaagctttttaatattttatttattcatttaagtatttttttttatatagtttcaataaaagatgaatgacaatcatgacttcttttaaatttcgaatcgcttcttcgcacttattaatcatgctcacacaataccttcttcaacaactctctcaagggctaatacttgtttagtttgatttgatattactttatttttggattgaatttcaagagatcataaaaatgtcaaattgatgaatgaagcatttcaattaagttttgagtttgattatcttatttttatgtgacttaattttgagaaaaatgttgtagaatacattcaataaacaaaattactaatgtcatcattatttaatatctatatattttattttggattgataatgaaattgtaactaaaaggatattagtgacaataaaaaattgtagatcaacaagtattagtgataatttttgttgtgactaaaaaaatattagttttaattttgttgtgactgaaaaaatattaactacaattttttgttgtgactaaagaaatattaatcataatttattgttgtgactaaaaattagctataattttttgttgtgactaaagaaatattagtcaatagtcacagttttttgttatagctaaagacatattagtcacaacaaatattagtcacaatttttttgtagctaaatatatttaggttgtagctaaaaaaatattagtgacaataaatattgtcaccaaagataaataatttgtagctaaatggtaattgtgagtaattgttgtgacataatttaattagttgtgacttttagtcataaagattaattgtgattaaaagtgatttttagtcggagcattatttttattgtaactaaaatttttggatacgatttttttatttataacactgttaaaggaaaaaaattgactacaacttttgattaagatatttttttacttttagttataattttagttgtgattaaaaaaaaaaattcgtggtagccttatataattgaattaatagacgtataggcgtatagctatatatagggatcgatcgtgtgtgagtgttttacaccaactctaatttaatatattgaaattttaatttaatgctttgtcgtataaatatatatctttatatattaaaagtgcctatctaacggcatttcttggtttaacattcttggtttaacagaat

SEQ ID NO: 310192 - DNA, 905 bp, Cannabis indica
gggtaaatgagttgcaagctttaaaaattaataatctaccctttctagtaatacagtttcagtctgttatattgccatcctagttgctccccgagatgatctcaaaatattgcacctcgcaatgctgtgctttatcagtgccattgttgggacatggtgcgaggcatatatctttttattattgcttaacctgaagccagatatccatgtgtcatgtctatatttatggcttgaaatgtgggcataagatgagtgtttgatttaaaagtgtggttaccaaaatactataaacagagacctatatgattcatttctgtaccgattatgttctttcaagattgaaccttgctagaaatattttaagcttgataaatccataaagttattttcacttcttttcttccctaagttcttgtggtagggggcaataatagcttttggactaaattgtaaaaccttattcaagtttgctgagtcccctacttgtcacttgtggttttagtattgatattgctctcgcatcttctttatatattatgcaatttactttgtgttatttacttgttacttattggttttgagttgcactattttcttcatcttctattcttcattttacatgtattttttgaatagagttgtaactatttaatcattattatactctttgtattgttgagcacagagttgtaattttattgattttacattttcattgaagattaatatttttcagcagatatatattttcattttcttcttgtcaatttttatcttcctaattttttattccttcctattttttttctttgctaccaaacatatagtttagttgtttgttcgtttgttgaattggacttgctgagaccatctcgaatggttaaactaatttggtgtagaatctt

SEQ ID NO: 310193 - DNA, 874 bp, Cannabis indica
atgccaaaaatgaaattaacacagttgaaagataaaagccaaaatattgaagaacaattttacatgtttagagaaaaaaaatctaacaaatttgcataaaattagtccgcaattgttagaatttacatagcattttagtagtgaccaatggcaatcaaaattatttaggttagaacaaagatatgttctatacaattcacaatcatttcaacagtgttggactgaaattcacaaactttatgccttttatggtagtctttgacagttttgtctatagcttcaaaggtgcagatgacactgatgaagacaatctggacacgactcctttgaaatattttgatttagtggtgtctctacaattgcttatttcttcaatataaattcaattattttagccttttttaagcattaatttttctattttaataatcaatttgtgatcagcttaattgggtgtcaaattcttttggactagaaatcaaattttcacctaaagttctgttggatttacattcttcttgtttttttatcacttcattttgataaaagaatcatgagaggagatgaaaagaaagataaagaggagagagaagaagaaacctagataaaaaaaatggagaagataataaaagtatagacagataaagaggagagaagagtgagaatattaatatttgggatattggcggctaaaccacctgaactttacagtttgtaacacttaaccacaaaaactgaatttttggcagctaaactacctaaaccctagttccgttttgctctgcacacctccgtccaaaaatcaccgttaagtgccacggtggactgtccacgtgtacacacttgtacacgtggcaaatttttagtggtccac

SEQ ID NO: 310194 - DNA, 1280 bp, Cannabis indica
taaaaattctattttggatttttggtgtaaaaatttcattttataaaaataataaaaatcaattttatatatagttttttccacattaataaaaatatattgtagagaaaaattattaatttcaaatgacacataaaataaaaaaaataattgatatatctatatttttttatcaaatcaaaataaaaatatattgaatattaaattattattttggtagataaatttatgcatctataaaaaaaaaatattaataatactcactactacaatttagctttttagtgacactatttagtgacacacacaaaggtacgggtcactaaagagttagggataagttttagggacatgcataattaaactctaattattcaatgttagtctcctataatgcgtgtcactaaaaatataaaatgtcactaaagagtaaaattcaaaattttctaatttttattaatttgaaaaatattgggatatagtgacaaactaggtgcgattggataagtatttgcccacccacttagtgcgtcactatatcataatcattaaattttttttttttgaaaaaaaaaacaaaaaatacaactataatattaatatattttttttcttttcttttttattaaacagatatttttttccttaaaaactataatactaatgtatttaataatttaacaaaataaaaaaagtaaataagggtttacacgaaacacatctgaattaagtatcatatactgtcgtttcttcttctccctcaagaaacgctagacgagtaggcgtgaatgttctctttcttcttgtccttcttcgcagctggtgaccagccatcctccagcgaatgacattgaggctctgcctcgtcaatttgtcatcgtctccgcctcgtctctccagtgcagggatctcggcgaccgattgtcgtctccaatcgatcggctgtcgtctctctggctcatcatccacgattgtaagggaacgtctaagagatcgacgttcaagatgagctcagtgttcgctcacggcaagagaacgtcagtgcttttcaaggctctctcggtcgactacgacgaagagatcgacctaggcgatggctgggtcttcggcaaccgacaacttcaacggagcaggaagctgagatcttcgccccaaaaatattcaggtacccacttcctcttcatcttcattttttgattcctactcaacttttatttttgtcttatcatctttcctttaattttttgtatagatctagttatatggtgatctctctctct

SEQ ID NO: 310195 - DNA, 1036 bp, Cannabis indica
atgtgaaaaggggtttggatgaatttttaaatccaaatagacaaacaattgattaattgaaccaaaacatacacaaatgaatgaaaaatacttctgttactttattgatattgaataatctagattacattgaaatagagttttatttagggcataaaacccaacactactatcattcctcgctcgacataaaattctttatggcgaactgaatcaaggtatttcttttcagcagcttatgaaacaaattttttagcctctcgagcatccttttttggaggcttgtgagcacacctcttaattttcggcatgttgacccctgcttaatgaaattcagcaacaccaattctttttcaacaatagtccaaactcacacaattgcacttcacagattcagaaaaaactcagagcaatatactaacacaaaccacaatgctctccaattgaaccttccaaccaaatagcttttcaatttaaattcacaaacccggaattacttttgcttggctaaaatgtgcgggcttcaatttcttgctgctgagatgatgcgcgtgaatagcactcgatggtgaatacctcggtcgaatgcgcttgctggagcttgtgacggtggctggttcgtggttgtgcaggagcgaagtgatgctcggaggtgtgcgaaatggaggctcggtggtaatgatgagttgatgaaggcgaggtcgagcttgttgatggatggacgagtgatggtgactcacggaatgatgaaggatgcagagttggtggttcgagcttgttggtgagtcgattgggcagtggtggcttcgggttgtgggtcgatgtggctgggcagagggtgtaggtcgactgggcgaagggtgtgattgggtggttcagctgctcggtggtggttcgactgatgtgcggatgggaatggtttgtgcaggggtgaatggtgcggctgggttcgagcttggagagtgactggagatgggcaatggtggacgactagggttttcaggagaggaagctgaagacgatgctgatttttggg

SEQ ID NO: 310196 - DNA, 1359 bp, Cannabis indica
aactgtctattgagttgggtaactaatgatgatatttcattggaatcactcccggtgattagaatatcatcaacatatacaagtatgtaggtggtgtgtttgttggtgaacctgatgaagagtgatgcatcggctttagaactgtgaaagccgtagtgttgcagtgaggtttttaacttgtcaaaccaggctcgaggggcctgtttcaagccataaatggctttgtggagtttgcaaaccatattgggaccttgttcttcgaatcctggaggttgttgcatgtagacttcttcaatcaagtctccattcaggaatgcgttattcacatctagttgtttgatttcccaatggttaaagagagcaatggtgatgatgattctgatagttggagattttaccacaggactaaaggtctcagaaaaatcaaaaccatactcttgatgaaagccttttgctaccaagcgggctttgagtttggaaacactaccatctgcattttctttattttgtacacccatttacatcctatggctctttttccaggtggcagagggacaatagtgtaggtgccatttgttttgagagccacaatttccacattcattgctccattccatttcggatttttcatagcctcttgcagtgtgagaggtgttttggagctgatgcagaccttaggtttgtaaacacctgctttagcacgtgtgatcatagggtgagtatacttggagctgatgttgttgtaggttccacaggtgatgcagctggttctgtatgtgtagagatggttccagggagagatataggagattgattgactggttcagtagtgcttggtgtttgttgttggttattagataacaggttgggtgtaatgacaggtacagaaacatttggagagttgaattgatggtgagtttgtgagggattgctggtgtgagaatggacagagaaaggaaatcgatgttcattgaatatgacatctcttgagatgtatattcggccactagcagagagacatttatatcccttatgctttatgctgtaaccaaggaaagtgcacgcttcagacctaaagttgagtttgtgtttattatatggtcttgtgtttggaaagcatgagcaaccaaagactctcaaaaggctgtaatcgggttccatgttatgtaatttgtgcaaaggtgtatcacctttgagtacagatgatggaagccgattgattagaaaggcagaggctcttacagcctcatcccaaaattttaaagggagtgatgcatgagctaagagagtcaaggcagtttctataaggtgcctatgctttctttcagccacaccattctgttcatgagtggtggggca

SEQ ID NO: 310197 - DNA, 973 bp, Cannabis indica
ctgaagctcctagaagggtttctcggacatgactattaagtctctgacagttatctcagtagttttgtaataattattcgtggtatttagaattttgtgccacatggcttactcctggctcgccacgtgtgttaggagaataatggacaacatttatccccaaatcttgttttgcacttttgtaatatgagatttactatctgcttcaagaaatgatcccattggacctcttccagcatgtgcatgggtcatttatcgttcataatcttttttctcatttttagtgaaaataatttgattcccgcctatttgataaagaccttcattaatattactgttagacaatattgcaaccgccctttttaccatatttccctgctaggttgtcccacccgttagatcaatggaatttcgataatttgagccctgatcgtcggatggctgtcgatcaatattcaccttagaaggtctataaaagcccgtgtcttttccttctgagatttttacccactcatcatttttcacttccaaagttttatgtgaatcccttgattcggggcgatcaaccccaactatccatggcctatctcgaggtatacccaaagttttaagcggtcaaggtagacccccgaaggatgtatctcggggcatctcatggtagccaccccgaccccatgaagtggtgtcaagatttgaagggaaataaggggtaacccaaaatctcaaccaccaacacacaatacacggtcaacaattttttccaaggtacagacaatcttcacaaacatctttttctcaattttatgagaatcaaagcaataaaagagagggaaaatcaaaattcttcatgttcttaatgttcttccaaagctcaagaacactctcaaccaaaagtttcaaaattagtcattccttcactaaatttcatcaaaccaaagccaaaaacacattacccatagcctatgctacataa

SEQ ID NO: 310198 - DNA, 1250 bp, Cannabis indica
atatattcttttagttaagtaaagaaaaaaaaacacaaagctttaagacagtcattgaaataaaagacagacctaagacctaagattacataccacaatatgagaagcgcttgatccagaattcaaaccaacatcataagaagagtaatggacccactcacttagtttgaacatccacctacaaatataaaagttggtggtagcaatcaattatgtgacttaattgcattcaccattgcttaaattaactatatgttatgcagttctttctatttctcacccatatgaagcctgtgtatcggttaaaaatcctccttccataacctggtttccagttccttcgtcaaaacacaatgtcagatgaatcatgttgttcagcttatcagaaacttcaagaacttcaccacaaacaggacagcaagtaattaatggttctctgcaataagaaaatatgtaaaaccattatcaggtcccatattaattggaaaaaaaaaaaaaacaatatcatgtagtagtactagtaaccagtgacccaagaactagaacaggaaggactgcgcgtctattgacaaatagacatatatgaacatatctaattctaaaacaataaaggaaattccatagcttccaaacattatttttctagtattacaaggcctaccctacaacactatctaaactcttctggtttaaaagttatttgcattaattacttttcttgttgagaagcaagaagggtagctaactcatccatgctaacaacaccatccccgttcttgtcagctgctttaaacaattcctctttctaataaggatggaaaaaaaattagtaaacacaacttcatcataaaaatttgacaacgaaaatatgatgaaataataagggaaccaaaggacgttcaagctcagaattaacaagtagttaaaccttatagatttaaatataggtaagtgctgtagctgattgaatcactttaaaatgagaaactggatgttaaggtaatgcatattactaaaactcattttgaagctttgctaccaacagatgtcttaggattggcttggggtgtcaatttcatctaaccatagcatttttccttcaggttgttacagtataaataaatacaaaaatatgtagcattgaaggctaacactttaatttaagatctgtattcaccatacttaacaacaaaacaatgtgtaaataaaatctaatttagaaatccagttttatttttcttttcaagtta

SEQ ID NO: 310199 - DNA, 859 bp, Cannabis indica
aataccgtctggcagtatttttataagaaaatgacaaaagttagtataccatgtaaattttcctaataataaacactactaacttgtgtgtattgggttgtctatgttttttttcttcccaaaaggctccaatttaaagataaatcatttcacaatctctatattttacaattgagaaatgatttttaaatttaaaatatatgagggttggtttggtatattagactgtattgtacaatattatattgaattatatttttttgtaatacttttatgtaaaattatatgtggtattaaatttataggtacctgaatatataatctagtataaattaaagtttaatatagttttatataaaaaaaatatgatatataatccaattcaatataatacaatataatacgacctaatgtgacgttccaaacgagccctaaaactgttaattaatcatttgggtaattagtagcataaaacctaaagttttttgtttgtaagttggatatatttaagagttaatactattttagaatttttgttatgcaaaagttattgattggattttttaatttattaaataataaaatagagaatctgatcaataatttttgtaaaatacaaggttcaaaataatatttactctatatttaataatttttttaataacatgagtatctaatattaataaaactataattcatctataggatcccatttaacttagttttgaatttattaaaaaaatagggatattcgtggataaactacttaaattttaaattttttaacccttaactactaaaaattgacttccttaaaaaaaaaaatacaaaaattgactttttgaggacaaatctacct

SEQ ID NO: 310200 - DNA, 2998 bp, Cannabis indica
atctatttttaattggcaaaatagtaattctttatttttgtaataaacaaataatttttttttaaattaatcaaataggggaaaatacaaaagttataaagctaaaatttgtcatgaaaataattgttaagacaaaattcattaagacaaaagacatcattcttgtcttaattaagacaaggtaggcgtctaccctaaagtagggtgtccctactggttttatctttttcggttaattaattaattcaattagataaatatttgaatttgaaaagtggttatagatatttcaagttggttaagatatcccctaaaagtagttgaggtattctctcaagtggttgagagatttccttattagaaatatcagtaaccgaattcgggtatagatattatttaaataattaaatatgatttaattaattgagaattaactattataaatagaagcttgttttgagaaattagatgaagtttttttacactgttatttttgaaatatcagagagaaaagaaaaactatttttctctctcaaaccgttcttgctcatgtattgagaatttaacaagaataaactatacactttatcttagtagcccacactgctccttctatgtggtagatcaatctgaaagactacggtgtgagtttctaatcaatcctaaatgacacaacttacgaaaagaatcaagaatgccctaataggcttcaagaggtatttatttattttatgtaatttatgttttgatttaatatatatttgttataaaaattatatttatacgcaagtgcgcgcaatcaacaacaagtaatgtaatgataagttgagtatcgtctccatagggattgtaaattaaaatagatgtaaattcaactagttaacaacttaaagtcttttgttagaaaaaataaaccaaaaataaatggatgattgatgaaagtgaaatcaattggtgacaataaaaatatgctcaaaataagacaacaaatattgaaaaattatctgcaagaaaaagtatttatggaataatagacttgaatagctaaatcccccctttgttaattctacccaatttttcaacattactacagcaaagttgcacagagttaacataatttttcttgtgtttatgagatttttctaaaactcacaaattgagttctaccacttagttcaatatatttctatatcaaacaaagttacagaacactaattaaacatcgattctcaagttatgcaaggtaatgaatatccatattcaatgtactaagaaaaacctaaacttaggaattcacttgcatcatccaagttataactactagatctagtctatctagaaccagatctagcttagtaaatttttcttcaagatagctagtcttcctccagaaagatgttctagatgactagttgttctctcccagaaaagagtcctagatagtcgactctagttgtgtctgtcctattcagaaagacccttcagcgtatgttttggtctatcttccaggaagcgtacatctcatccggaagcacttcaacttaagacggcatggagttattattacgagaagtttgttaagttttttaagtcgtaactaacttaacaacttagcactttcagccactgactataggatctctatcctgaacatataaataccaccaacacttagcattttagaagaaggaaaaaaagatcagacgagttttaagatgtgatcttgagagagaaagattgagagagaggtataaagaaaagagagagattggatttggattttgtatgaagaatctcttatggatgaatgagattattggataagagtgtgggagttaaaatactttgagagaatccaatatagaatctatctcaaatatattgtaccctattcttgctcaatcaataaagaagatttggtggtgttccaaaattggagtagagccatagatcacatcgatctatacgacttgaaccaatatatatcttgacgttgatttaattgttctactactttaattgtttatgggtttaatgctctgttcatccctattttatcttcgattattgtttatgatttcttaatcttgtcattgctaattgtttgttgtttaagttttagttaatttgattctatcatcagtcctaatttttctacagtaaaactaaaatgaaaattttgtgtcttctaaaactgaataacgataaaatcaatcaaaatatttaaataaatacaattgatataagtatataaaagaaaaacaataattttatatctatttagaagcaaaaaaacacaaaggtgtattgcataaacttctaaaacatgtaatatattacatatagatagattttactgacacaaaatctaaaaaatgttgaatcctatcgacattgtcccttgttccttgttggagaatagtagaagaagcattaatcttattctcaacattgttgattctttgtttgatattattaggtagtgaaaattgagccactcccacattcttagaagcatttagataagttgatgttgggttttctgctttaaataaaactcatttcaatataatcatatttactaattaataaaagatcgaaaatcattctatgttgcatggttcacatgatttatttcatgattatgtttaatgtataaattctattaagtccagaacatatatttttccatgattataatgttgtctacacagtgaaatataatcatgattatatgttcaaaagtttaagtcccatgatttgtcagtacacaagatttagactgacatgataatcgacaataaggtatacttacaccttggatacgtgttatgtctttttcaggatattgataaagtataccagtatcggatgtatggaatatatattggattagatcgatattgatcttggataagatatcataaacttactgttatatctttttaagtcaatatcactggttgatcttaggcttatagatcttaatcctgatatg

SEQ ID NO: 310201 - DNA, 1352 bp, Cannabis indica
atttcagacattattttttttttcaaaaatatacatgtaatgggtgtccaatgggaatccttctcccgtcgagtaatccctaccccgctcccgctttaattaaacgggtattggggcagaaatggggtgaattttggaagcgggtatgggggtgagagagcaatccccaccctgtttacatccctaatgctaaaaggcactcatggtgtctagtatcacttaaggcattgttattgggcaccattggtgctcaacacctttcataagtgacaccctacaattagttagcgatattccctaaacattattttcttaagttatatgaaactccttacttaattacactaatagtggtatgacaccaagaaaagtgataggtgccttttagcaattctctaccacttaatatgaagaatcgtatcactaatagtgcaatttaatatcaaatattacttattttacttttaataataattatagaaaattgttaactatatcttggacaccacaatacctaatagtaatctctaaaagtaaataaaaaaaatataacatttataatgatgtaatttttaacacaacttttacaccactacaaatattaaaatttgctatgatcctaaaaacgatttttttttttggatcgtcgctaaaaaaattaagtaattattttaaaaccgtcggaaaaaatttagtattcccgatggtttaaaatcgtagtaaacaaaataggcgacgttttttaataaaatgcgaacttttaggagagccttatactcgacggtttataagagcccattaaaaatcgtcacctacttctcgccgcatttcctacgtgcccacctactttttttctatttcccaaatgcccacctatttcttatcacatatttcttctcaatttctcacactctaaaacaaaaatctaactctccaaaaccccacccacgctttcgcaccatcgccctcctctctcgctgtcttcctccctctctcggtctccctttcttctcgtctttctcgtccatcgatctctacccacccctcctctcgtcggtctccctctcctctccgtcgcatacgtcgaaccatcaccacctcccgtcgatgtcccttttatcttcgtcgcgtacgtcagaccaccaccacctctcattcgtctctctctctctctgagctcgatataattacatttatttatttatatatatttattttatatataatataattttgttattgtacaaatttaatttgttttaaaccatgccctacactataggtgacggttttaaaccgtaccctacactataggcgacagtttaaaaccgtcgtctataccctgttatagg

SEQ ID NO: 310202 - DNA, 1493 bp, Cannabis indica
cacccacttatggccacttgagctagcctcaagtggttgattttactctattctctagttatacatacttatgattatgaatatgtattcatatactatgtatgaagattgttgttagaaaagtgagattgagagttataatccatattagtatatggaattcgttattccttagtctgcttttttttttttgtgtgcgctaagggtgttgaataattgtccactcatatcaatacaatatcaaggatagtgtggaagattgcctagtctttcacattttcgaggagataccaagttcaattcttgatcatactttgtgacagattggatcaagagttagagaattgaatagaatgagacattaaatttcactgcattattgtaaggttttcttaaactctttacctatgtattttaaatattttaggaatctatgttaggttgttagattaggtttaatctaacatacttgaatagtaaataagattcaagtaaataatatttctaacagtgtaagcctcacaaattatattaaaataatattttagaacacccaaagataaattatatgttacataaattttaaattaagaatatttgaaaaaataatttcgtttttgtgttttcaaaacaatatttaatttaaataatcttattctaattaagaattttaaattatattccaaatataaagaaaatacatgtataaataggggttgatagtgacatagagagagactacaaataaaaattgtattagttttcttgctcttgttataatgtaaaagttgtcacaccaaaaagaaaaatataggttttgagagatatcaagccagaagaagaaaccataatcatgtccactattcactcgattaatacagaaatatctaagcgccatatagaagagattaggtctcaaaagttctcggttggtaaaaaagagtcaaacccattatcccaagatcttcctcatgctattacaagtttatcagttgaactttaaaccaaagatgttcactttctcatggagtttatcatgccgagcttatccaaaaagacaatcaaaggataatattcaacttttggtatattgggtttctatttttctactaaacgcttaagattttcccattaattcattccatataacgtatttttttcatcatctcatcaccataatcggggaagatgtacaacatgtggcgttatgtgattttatcggaagtcaagaacatactttttaatatgaggtatgcgttttttaacttacttttataagaattttttttttatatttagataactcttaaatacttagagtatttagaataatattaatgtaatacatttacttaaggtattataattgcgtatttatttaactatttaatataatttttctttattgttattatatataatttatacttaatttaaatataatataaaatatatatatgaaaaagaaatagattttttttaaaaaaaactta

SEQ ID NO: 310203 - DNA, 1971 bp, Cannabis indica
gggcacaaaacccaacataaactacataactgacaaaatacgaagacgtgatcttcccaaaagcgacacaaaaaagcttagaagagtatatcgcaactctatctaaactaatcaaaaagtagagcagagccctttcagattctcaggatgaggacctagaccttgcgtgaggaggatcatagaatccctgcttccagaaaactttaagatgccacatattgacttgtataagggaaggatagattcgcaatacacttggaaaaatataacaagatgatacaagtggcacgtgtgagtgaaaatgtcaagtgcttgtgtttctccctaacattgaccaagttcgcagaagactggtggaagcgtctggctgttagatcgattcatagcttgaaacatttacagtgagccttccgcaaacagttcattgttgcacgtgctctggacatggaggttggctttctcacgaacatcaaacagcaacaaaatgaaagcctaaaggcttttatttagaggaagatggaggctacagcccaaattaaagttggtgatgacataaagttgatggcccttcagtctggattgactattagttctttgctatggggaaagatacaaacaaagagagctgagacattgactaagtttatgtcaaaggcccaaggcattattaaccatgaggacgcttatatacaatcctttggagtccctcaggctcaagccccttctgaaaatgcaccagctttatccctcaagttgtggctccaactttgactcttctcagaaattagttttctctaactgtttacggacccactgtctctggtctcgcacctacacagacccatttttttgggtaccgggcggcacagatcgggtgcagtgtggctcccgaataggcaaaaatagacgctatagaatctaatgtgagccttactcgaaaaaaagaggaggtaaaggcaatagccgtactgattcttcaaagaagtcgaggaaggaatacgaccccaaatacacacagtataccagtttggttgacacatgagaaaatgtgtacagagcgacctgcaatatggtccactatagaaagcctcagcgtatgttgcacggaggaaggaatagcattactagaataaggaatgtgagtatcacagagcaaaaggccaccacaaatgagtgttgtaacaccctactagattaggcgtgttatcgtgatttaaatactaattgtgcaatctgttgctaatcaacaagtttattgaaaattgtgtttaattaaaacttttcataattaacctttaaactttaagtaaataaactttacataatctaggatcccatctttaaaagttacaactattttacaatatatataactacaaaaattgtcacctaacgactaccaaataaagcctgctaccccaaagatcaaacacttcatgtctaccgccccaatatgtacaatcttcatctgtcacactcactgctactgagccttagctttgtcgttccctacacatgtacacaataattgtgagtcaacagactcagtaagaaatgcataatcataacataacacaaactagatcattagtaggcatccatacacccaattataatcctatcatgcatcccacgcatactgagtcttgaacgttcgtaggatagtactatttaccataatattagcctatagtcggtactctaagcgtaccaatgtgacagcatcaatcagtacttatgccaaacatatatcctttgatatccagtgtaactctatgtacattatcaccgccattactgatatattaactaacaggcattcataaatatgcacactaaacatgtaatcacacatgatattattatactaatcttaccttaattctaaatttaggcgtgtcagtcaacttgagtgaaaattgttgctcgatggtttacaggcccctagccactcaagtacttttccttctt

SEQ ID NO: 310204 - DNA, 2418 bp, Cannabis indica
gcatctactagctggtcaattctgggtagtagaaagtagtcttttggacatgctttgtttaggttggtgaagtcgatgcatactctccacttcttgttgggttttggcaccaatactgggttggatacccactgccggtagaatgcctctattatgaagtcattggctctcagcctttcaacctcatctttgagcgcttaggcgcgctccttgtctagcaaccgccttttttgctgaataggccagatgcttggatcaatcttgaatgcatgggttatcacggaggggtcgattccgaccatgtctccatgtgaccatgcaaaaaggtccaggtttgcccttagaaattctatcaatattatctaatttctagagcaaaacctttaccgatcttcagtcttcttttcggaaaagtgggattacactccacttcttccaactcttctacaggtccaaagcttcctgcaagatccgcaaagtaaggatctatgtttgtgtccctttcttgggctagacttcattctgccttgttgggctcattctctgagcttttggcgggcatcttctcctttatagccttggacagggcaaagttgtagcagtgacgggaatactgctggtctcccctcacaaatgccaccctatgccttgttggaaatttgaggcataggtggtagatagatgtcaccgccttcaggtttttgagggccgatcgacctatcatggcgttgaaatttgagggaacgtcaatcacaatgaagtgcgccatcagtgttctggtggttggattttctccaactgtgagaggtaatttgatataccagacaagtgcgatgccttggccaaagaagccatacatcacttggttgcaaggcgccaagtcggtgagttggagtcccatcttttcatatgttgatttgaaaagaatattggaggaggcttcgtcgaccaccatacatcttgccacgaccatgttcttgatttgtacagtaatgaccaggaggtcattgtgcgagaaactgactcgagcagcatcttctttagtgaaggagaccgtgggctcttcagccttttattgcttagagctccagtcttgggtagttaggattttacttttgggctcgtgacggagtgtctgagcatagcgcttgctagttatgctggtctcgcctgcaatgtggggtccaccaatgatgacccccaggtgttcagccataggcggtggcatcggatctctatttaggcctccttgcgcatgggtctggtcgtcttgcacataacaatgtaggtggggattattacgccttattaggtattcaatctccctcttcagattctgacgctcattggtgtcatggctaaactttttgtgatctcggcaaaaattcgacatgtccctcttgcccatgtctttctaaataggaaagggcttttggtatgggattgttccttgagtggccatgaagatggcctcaagcttctttgttaggagggtgaagccgatgtacttctcctccttattcttctgtggtgttggagaagtgttgaacttcccctttttaccgttgatccttccagagttgttggtgtcgcgcttgtttctagtgctttgccactagaagtgtgggtagaattacttgtgtatgcctgtgcgcctagtgattcatgaggatgttggatgcctcgtgactgcctgttgttgacatgccccgcttgggcttctcgtatggcttcttcaagtttgataaagtgatcagctctatcaaggaacttcttcatgttgttggtagaaatccatcaaatatctttccagaagtgactcagtgggagtatcccgcccagtatgaccgtatattggccttcttctgtaaggcctttgtttttagtagcttcggccataaacctctggatgtaatcctttagaggttccccttgtcgttgtttgacttcgacaaggacttctagttgcaatggtacaagtatcaaggacaataattgtgtgtagaattctcgtgagaactcaatccaagagttgaatcttcctggggtgagtttaaactaccattgttgagctgtctctgacaatgtggctaggaatatgcagcactgaacatcaccagtaaccttctgaagattgagttgcatcttgaaatacttgatgtgagcaagtgggtcctcttgaccggtgtacatcatccatactgacattttgaacttgggtaagagcaaggcatttatgtataccgagaatggtgatccccttgatcgatcaagtttaaggtcgaaaggcttcggaccagctatgccttggatcatgtccctggttggtctaactgcgcttgcacaaaaggatctattgctgtggggacttggttgactgaccctccttggggaggctacagattctaaagagatagg

SEQ ID NO: 310205 - DNA, 769 bp, Cannabis indica
ttttttttttttgataaaaattttctttggttgggtgagtgaagttttcaccttaatcaatctttaaatttacatatattaatataattgtatggattttattttcttttagatatgtacccaacatattcctctagtatgtttttgtcaatggtaagatgtttgtacagaagttgatggggggttcgagtgtgagcatccgatccaattcagtatttttttctcatccgatccaatccaattagtaattggatttggaaaattatcatccggtccaattcaattagacctcaaaatccaatccaatccaatccaatctaattactaattggattggatcggttttttaattggatatccaattacacacttagtttgaggggtaagcttttatcaattatttgatgaattccgatgaagggtgatgttccaataaatggcatatgatagtagctcttaaagaaggatttcacgatattttttggttaattgttttatatgcttaaatttcataagttctgtttttatttaataatttaattttgaatcaactgtctatcgcaatttttggattttttaataacttattagtatgttctattattatgaatttatttttatatttaattaaattatttttcatttaattattttattctttcttcactaagtagtagtacgtttagaagattttattttttgttttaatggttggtgtctttgaactgtatttagctttttacagtaatcaaatttatttaattttata

SEQ ID NO: 310206 - DNA, 1024 bp, Cannabis indica
atataatataatataatagtttttagagagtatcactaaccaatcgcaaggcgacacatcttaagggtgctaggcaccactagtgcccagtagcaatgctcttttataatttgtgttttgcaaaagttattgtatagactttttgttgttaaatgataaaataaaccttatattttctaaaataataaaaataagacccgtttgattttttataacttttctttttaaataactaatttgaagacaaaatttaaatacagaaaatgtaatcatttttgtcatcacacatttaaattaaattattattaaattttatttggacaaaaaataaattcaggatcctatttgtaccattttgaacaatacaggatgtattttgtcatttaacaaaactgatggtccaattgataacttttgcaaaacacaaaattcaaaatggtatttacctcttttattttaaagtgttgtaatatttaagaggtttttaattttatttttaaaatatatttaacctaataagtaataggctataacaaataaataacaatataaaaaataaagtattactattgggttcttgatattttttggttggtaatattttctaaaattataatattaaattatatggaacataatacttaattgtaccaacgattatataatacataggagaatattaaatactagtggtatcttttagtatttatctatacaaatattctcaaaagtaaaaacataacataataataattatggttcatagctgtattttataaagtaattcaatcattgtggcaaagttaattattttgggtaattaatatgctaaatttcttttataaaataataaacatataaaataaataaattatatattgtaaacggtctgattcagtttaattatttactaacttgttaattttatttttggcatatttaattgacaaaaatattttattatttcctattaatttcgactggtatgtttaatttggtttccctatttgtgtgtatctaaact

SEQ ID NO: 310207 - DNA, 827 bp, Cannabis indica
tcatattttgggtttagcttttgcttgttattctgtctattgaacttgactttctcagttggtaagctgacttgatattatcttttggtttaattagtgtttttgtgcttagttattttgtgtttttcttcttgtatattttgcttggtcattgatcataattttctaaaggggagattgtaagtgtcatgtatttgtatggcaaattatgttgcttaatattgggttagtcgtgttctaaactagtttctttactggttgtttgagttgttcatctaagtcgatcttagttgcatatgttttgtctggcttcgtttatcttttgccaggtcagcttttagtttgtttcattaattggtttagctcattgtcagctggcttgagctgttgccttagttagttaagtcagctttaccgaagtgctagatatactaagctgatctagtcttctctaactaactctccatctttgatagaattttctagtgattcttgctctgctagggcaaaatacttttctgtatttttctttattgttgtaattaattacagattgtaattcgttggatctttaagggttgaagaaggagtgttgatttgcaatgtctgaagggagttcagactgatctcctggagggagttcagcttaatggaagcaagtggatcttgtcttctcagatctaaggagtcttagatcttggaacttgattgtattcaagtgtatcagtaacttttgtgtaaaatcatttcaggtaacacttttctaatcatttttttgtttttaaaattaaaaaagtgaaaatattttctaaaatcatgttctataa

SEQ ID NO: 310208 - DNA, 1343 bp, Cannabis indica
cattgggcagcattagagcaaatatactgaaggagcaccaggacgaggtattgtatacaaagatcatggatacacccagattgagtgtttccttgatacagattgggcagactctaaggtagatagaagatccacttcaggtcattaagtctttgttcgagcaatctgatctcttggaagagtaagaagcaaaatattgggtctaaatccaatgcagaatcaaatataaagctatggcataatctgtgtgtgagatagtgcggatttatcagcttttgactgaagtcgggtttaagactttagttccagcaaaattgtgatgtgataatcaagttgctcttcatattgcctcaaatccggtgttccatgagcgaactaagcacattgagattgattgacattttgttcgtaagaaaattcaacaaggtctgatcttcataggatatgtgaagattgaaaaacaattaggggacattttcacaaaagctttgaatagagtgtggattgattatctttgtaacaagttgggcatgattaacatttatgctccagcttaagagagaatgttagaatatataagttgtacattagttgtagaaattagagtttattgtaactagttagtttcttattttctcttctagtttcctatttagactttctagttttgtacataaatacacattattctatagaataatatacaatttcattcaccattttctacaaaactcttaggtggcgtttggttacaaaataaaaatggaataggaatgggaatggtaataggaataggaatagaatggaatggaatttctattcttttgtttggtaaagactatggaatcaataatgaataagaactgtgatgattggtatagtatagaatgaaatagaatttttattattttgaccaaaatgtcctttactcttttaaaataatttttgttttataaaattaccattatggtacaaataaaaaaaatgatatatatttatgtatcactctcaaattgtattttttagatctaattatcaaataataaaatataaataaatatttaatttaatagtttattttatattaaatatttaagtatcaacataatgttattcatataatttaatcatcacacatcgtttatccatataattataataataatattgttttcctataattatgtacaaaaaaatataataaacatatcattgtaatattaaatgttgtagatatatattttaaaataaaaaaatgttatccatataattataacctttatcatttatttatgagaagggtagataaggaaaaataattttaagttggtatggaatggctt

SEQ ID NO: 310209 - DNA, 1167 bp, Cannabis indica
aatgaacttaagtacgacaagttcaaaagcacaacacgtaaatataaatagaaccggcccaaaattacagcacattaaaaagtatgataataataatagtacataggtatttactaataaatagacacattctaattaattgttaatatgattatatacaaaatattgttgaaaaattatataaaaataattaaaactatataaaaaatatatatataatttcgtgattaacttattaattgtaaaaacaaatagtgaaaaagtaaagcttaaatttaagcctatataaaaaatagaccgcccaaataaagtacgatactagttcgagcgtgggacaaaaatatacatgggcttatgaccgtattgagcttactccttaaaatattaacacagcatgacacgattcatatcattttattaattgacacaatacaattgatattattacgggctttcaaaatatgaatcaggctaagctatagactttcaactaaatctcattgtcaattgttgtcactgtatatagctatgtagatagtcatagggtagtaaaactttgggtataaataaataaattaggacagcttcaaagtaagcttaaagcatgttatcattttttaacttataacgtcacacgcttaattaacttttacaccaaacatgcattagtttaaggtttcaacattaattatgtatagtcttatttaagttgttttgcatcaataagataattatttgaactcacaccctaagatattatataatataagataatcgagcataattttcagtcgcgggttgagtgtgtttatttttgatacttgtagaaattataattcaaattatgttttatgataatatatattatattcataataagtattcgataatttttgaaaaattttaataatttatggtactaaaaaataagatttaaactttaaacatatttatttttcactacacacgtgttattaattattctaaattttatttttagtatgataaattatttaaaaaaattcaaaaatcaacatgagacctaccataattataatatatattattatataaaaaattagatcattttctaaacacggaaaatagagatgtatttatatattactaggtgattgttacgtgccaagccacgtagtgttagtttta

SEQ ID NO: 310210 - DNA, 2248 bp, Cannabis indica
aaaaataaaacgttcattgcaaataaattagactacattattattacaaaataagtttattagaatagtctctacaggcaaaatactaaattatttgtaagtaaagatccacttagcaacattatgaactgcaaaattacaaattttgaaaatataagaaaacgtataaccattaaaagaagtagaaagcttaaagcaaaaagatgagtagttttcaatctcttatcaagtttccttacaattgagagaattgatcactatccttgagtcactttccacaatgatgaacttgtaatctttggaaaccacttgaggttagctcaagtggccaaggtgggtgtgtgtgtcttggaggtcctgggttcgagtcccaggtaaaacatggttgtaatatataaacgcttaaaaaaaaaaaaaaaaaaaaaaaaaaaaaaaaaaaaacttagtaatctttggactttgccaactcgcaagcaacacgccgccgcttctccacagagagcatccgaaaaaactaaatatgtcgtgctaaccccgatcacctcacctaagtgatttctagcaacaaccgctatacacgagctttcaaatcccactttaacattgcaatttagtttgatccaatcctaaggaggaggaggaggaggccagacctcctcacgaacaggagagggagcaaggataagaatcactctcaagtctgcataagagtaacaaatagaatcaatgcattggttcaaattaagcaacttatgattatgtaccttttcatttcaggctcaccaaatagtgtcaacaacaatagataaagactccatcaacattgatgcccctattattcagacttcaaataaacttgacccagtcccacatacaaatgctagaattacacattgcaaagataccttacggagaagatctccacaaatggaatgtcagatcgcatttgagaaacaggcgcttcaaagattcttcctccactccacataaagagcaattaacatcgtcaacatgaagtctcttacgaagaatagccctagtcggaagggcttttgacaggatgcaccaccaaagggtcttatgcctccccataactttactattccaaagcttattccacatggatggggcaacctcacaaggcggagctctaagtaaggcttgagtaagataaaccgttttgcaagagaatttcccgttccgccctattgtccaaacccatttatctttcccttgaccagggggtctaccctctttcagaatagctgaagtagtttcactgtcaaacatacaatacaaattctgaatgtcccactctcctgagctagtgaggaagtcttccaccttccttaggccacactcagaatgaccattagatatagggtataaggatttaccatgggtgactcacacatcctaccaaatattggtattcagagatcactttacaagctccttctctttggaggtcactagctttgaccacattttttaaaaccaagaattagagttcttgtacttacaattaagaaactcctttcctttgaggtacttggctcatcacagcaaagagactgactttcacataaaagattccacccttacttagctaggaaggtaagattcatctccttagttatacgaaaactaagaccacctcttgacttaggaagacaaatcttatcccaagctttcaactggattcctcggttccctttctcaattccccaccagaaatcacgaaccaagccatcaattcttgcaacaagtctattagagagcttggtggtttgcatcgcatacataggcatggacagtcccacagacttgatcagagtagcacgccccagtttagagagggttttagccttccaaccctgcaatttcgaggtaagattctcaacaacaaagttaaaataagcatccttctgtctagagcaaaataaaggaagccccaaatatttaacgtttcctttcgaccctgtaacgccctaatgctaaggcacgctacaatactttttcaattatttagtgcaatctttgctaatcaaagagttttcttgaaaaacatgtcaaattaaaacttgtatattaattaataaactttataatatattaaaatatttacaagtgtcgggatcccgttttcaaacttttaaaaattaaatttccaaaatacacatgtcacaggtcgcacagcgactacaaaatacaatccccagatgtcccgagaccgaacactccaggt

SEQ ID NO: 310211 - DNA, 1321 bp, Cannabis indica
atattttatttttattaaatatattttaattaaatattaattacatataactaaaaattaaattaataatgtaaataaatgtacatatttacattactctaaataaatatattacacaaatattttacaattactctaagtggttaatagttatctaaacataaaaaaagaaaaaaaatattcttatacaagtgttccactcatcgtgaatcaccgtaagaaattttgttaactactctcgatgtaacggtaacaagtcaatttttacgtcacatcgagattgcccctcaaactgtaaaaagaacaagtaaatatttttattattatatatatatattatattgtttgttaatataataaataagatacgtaattaaaaatatttattttttttcgattatgaatctgccaacatttgaagatttgacgatgtcattgatgtatctcaagacataagaactacattcattatttttagttgttttgggcaaattgcttctgctatttttggatacggtccaaggatcccagtcgtccccccgatcttctcatatgccttgcttaaaaaattatattagtatttcaattaattaacataacttagctaaaaaagtttttatacagagagtaattaagttatagcctcctcaacatataattaatttattttgagaggtttgtggccatctatagggtctaaatgtatacttttctctgacaatctcgagtatctaatgtgcactaatatatatatgtataagatagtttaaaaataatttcaagaaataatataaaaaataattttaaaatatctcttaagttgtaggctttacttgatattctaaggaatgaaaaatacttggtattgacttctcattgctcccaaccaactatccaatctagtatagccgcattttgaaactgctggtctatatttttttttcaccgtagagtgtaaaaagctttgggtcatgaaaacctgtgtcatttcagataagccttcccaaatacaccagcattaaattattaagtgctaaattttttgaaaaattttagtagaaattctcctataaataggatgttgggacgttggataaattagtatgatattttccattttgggcctaagccctcatggttttgttcttgggcatcttcccaaaagatctcataccaatggagactgtgtccatccttatatacctaagatcctttccatttctagccgtgggactttggttgcacactcaataatcttctccacaaacacaagaccacattgcctctcctcaaacgatcttcactcgtctactctttacca

SEQ ID NO: 310212 - DNA, 879 bp, Cannabis indica
aaataagaaaaatctagaaagttgtagtatcatccttagctccctataaataccaagcttgggttgaggagctagtgtaacaaaacaaccaacaccaaaaaaccaaaagttccaaactatcaataaaactttactactttctcaaacaaccctctcttctaagccaaactcatttcttatactaaatcaacaactactcatcaacatcactacttcactacattaccacaacaaaccattaaccacatatccacctattccaaatctaaaccaatacaaatttattatcaaaccatcagactatgagaggagtagtccactcatcttatatataacattttatttccatacattatcaatgtgagactaactctaatattaattgtaaaaataaaatttagaaaagtggagtacgaatttgagcttgtacaagaaaacaagtcagcatgagtaaagcatgacacgaatccgagcatggtacgacacatcccgtatttttttatggcactgcacgatatggctcgtatttttttatgacacggtacaatatgattcgtatttttttatagcacgacacaacatgtagggtcgaccctgagtaataatgggccgttaatttttttttttttgtgtgtgctatatttaaagtaacatgtgagtattattgggtctcttttcataaaattttataaaaattactatattttcaatacaaaaatgtatactatataaaaatttttggtcttgaatttgggtggacctaaagcacgagcttagcctgttttaatctaaggtcgaacctgacaacatggctcacaggacacgtatttacaagggataaattgaaaaatactttttttttgtttctattaatcaaaa

SEQ ID NO: 310213 - DNA, 763 bp, Cannabis indica
cttcccctcctaccaaacatagtgttagtgaccctcattggtggacaataaaaattaaacattaatctcccatgatacaagatgctaaaaatacgaagggttactaaagacttaactaattatttaaaaaatatagatacatatattgtcccatactgtgcaacttgaaatatctttagagttgtgcaatgtgcgttactatagacttaataattttttttttaaaaaacttaatataaaaaaatattaaggagcattttaagcttataaccttctactaaagacatatatgatttttgctctgtaggcatatgatcatcaccatataccaattctcagagtttttcaaattcgattgtgccattgtatccttagacccaaataaatagcaaatactatgtctcatcccaatccgaataatattgaaagaaatactattacagtgcaaactaggcatcaacatgtcaccagcatatataccaacatgcggtgccacttgaccactttaaggacctccacctaacttgtatcgtgccatcttggctgacacgtcacaatgtgcgatgaaaggttttagtgactaagagtaactaaatattatctttccagtcactcataccaataacccttagtaaaaagttactaaaaatctttagtctcttaaattgggtcttggaagcgaatgataagagatttttataaaaatactgaattttagataaaagtttacaattttactgtcacacgaattttttttacaaaa

SEQ ID NO: 310214 - DNA, 881 bp, Cannabis indica
taaatgattattctctcaattctacgattttaggcatccataatgaccttttttttaggaatttaggggctattttcgtggatttaaaataagtcaaacttactggtcggttgatctgattagattatcttcatataaaactcttggaaagaattatgctgctccatgttagttaggcaccactagtcagacaatctacacaattggttgggtgattggccagctgaacactctagaacctttcctacctgattcaacaattttaatatagtgttatatttcattatcttccggctaatgcatccgactctcagtcttccttacttattatttactgactagctgtctacttttttgtgatgtgtcaatttatctcatgccatatcatttgagtaatttttgagataataatatccaaattcaataatttttatcgatgtgattaataaaaattatcattgaccttcatggttgatcacgctacaacaatttctttgagctagtaaaagaggtttcaacatttgaatacttaaattgctgagttattttgatcaattaacaactttattttgatctaagtttcattgagtagtaagaaaaaaaaaaggcccaaaagtggtaataaacttagaggacaagagttttttttttttcttactctttaaaataaaaagtgtaggaaaagtgtaaaaattatgctacaccatatgatatattttagagaatgttataatatgttgttagtgttttatgttattgaaataatacagaacgaaagaatacatataatttttgctctgaactataattaggctaattagtaatttttccccgaactttaacatgtattaaattgtaccccttgaattttttggccgtta

SEQ ID NO: 310215 - DNA, 2324 bp, Cannabis indica
atatatatatagttaacttgtactggaagatattataactttctaaattaaaggctaattataacccatattgcttttatcacatttatcatatatgatgcggcatgggagtgaaaaagcagtacgtacttaacttgtttaaattaaactactatatataatatatcatctataataattaattaaactgattatatattaatggtatatacatacatagaattcagctccaaaaccaaagggaaaactcaacggagaacaggctgtagcattgaggatatcaggagacaaggcagcttttcacaattgcaaatttataggttttcaagacactttgtgcgatgacaaaggtagacatttgtttagagattgctacattgaaggcaccgttgacttcatcttcggcaatggacaatccctttacttggtatgcatattaattatagtactttatatattttaatttattgcctacctatatatatgatgagatttataattaagtgatggtacttgatgtagaacacaactataagatcggttgctaagcaaacaggggttatcacagcccaagcaaggacaatggtgtccgaaaacagtggattcacttttgttcattgcaaaatcatagccgagggtgacacttatttaggtcgagcttggaaagatatgccgagagtgatatttgcatatacttacatgggaccccatatcgatgttaatggctggtctaatggcatgtggcctattcaagcgcaagccaaaaagtacgtatacagtgtagtctattttgttattaattatcgttatttatctgcatgcatattaaatatgaaacgaaacgatgattatgttatgtttgaaatgtatatagggatgtgtattatggagagtacaagtgcatgggacctggagcaaatacttctgggcgtgtcaaatatgcaaaaatgctaacagatgaagaaattaaaccttttatgagcatgactttcatccaaggcaacaagtggcttatccagcctccaaatcttaaacgttgaatgccaacctctcttattttttattttttttaatgagcgtgactttcatctaagacaacaagtggtttatccagcctcccaatcttaaacatgccaataattcctcccttaaatttattcagcaaaaaagggaaaaaaaaaaagaactttaataaatctacataagggagctcaatttatgtaattttaatgtttgtatattttcaatgtgtaataaagtcaaaatcaaaatttgatctattgtatattagctccctttaattaaatcaatggctaggtggagatatattttttttttcttttatgtctcactcttttattttataccaataattaattaatttcttaattttatattattattacttttttaataatttgatgactcttaataaataaagttactaattaatattcaatattgtcgacctttaagctttatttactaaaaaatctttaaatgaagtattttacagaaattttttttttctaaaaaaacattctgcattaacattctgcattaatatatatatatcactttctcttttttatgtagatgataagaaggatgataaaaaataaattagggttttgatgtaaggaagataaagagagagagaaattggttttatattcaatactaatttattataaaaaaatttctttttcaattacatcaatcaacattaattttttttaatgtatattagatttcatttcaaatttccatgcgtgataataattttaaaggcatgggcattgataattaatatatcagtatatatattaataaatttattaattataattttaaaaggcatggggtatatataaaaatatattgatatttttctaaaaagttatgatatagtgacgcgtcaagtgagtcgagacacgtgtatgcagtcacgcttggagtgtcactataagtcaacattttttatgaaaaaaaaaacaaataaaaattatgggagttattctttagtgacccatcatatttttatgacgcaaattaaaagacactaacaccgaatttttaaagtccttatgtgcatgtcactaaagctcaccctcattcatttagtgacccgcacttttctgcgagtcactaaataatgtcactaaaactcagtcttgtagtagtgttaattgcatcttgattggtgaatacaaattatatgtatcttgatacaacataaataaccttataatatttatcgaaagacgtcatactaacagagtcatacgaactgtagtggtaaaaaattagtattatttgattaa

SEQ ID NO: 310216 - DNA, 1825 bp, Cannabis indica
ttctgctgctgcaaacgcttacagtttaatattttcgtatatacaactgacatttgcaaaaacacgatttttcattacccactaaagagagttgtattcatagctaaagagctactcgatcacattattataaattagtttacaatcaaatttatttttaacaattaatacattgcaaaaaatattgggtgtggttcactatacatatattttgtatattagaaaaaagttaagtacgagacacgcatgcttagttttatattaggtatataatttaattataaataatataagaaataattatatataatttaatttattattatgatctaattgatttttttttaatataaagtggttaagacaataacaagtaatataattattttgtaaagttatttttattgtatattcaatacatttaaataattaattattggatgaacaatattctatcattctttattaaaaaaagtaatcttctaatgcatatatatatataatatgttgtgtgccaagtaatgaaatgtttactctagtatagtaatatcttaaatgttctctctaaacagaaacacacggtatttaatttgtgtatacatatacatatatataaatatatatttctaatcaaaaagtaatatatatatatatacttttaataaaacgtattgtaaaatatatttataattagtttttttttaattaggttcaattatgttaagtgcaatacatgtatgtttaatttttttttagttaggtaatgtattttttttaattttaaatgggatttgagattttgatctttaagaaaaaaaaattagctattactacactgcagtgtcatttggatatgattatatatacttatttttaaatttttaaaattttcttaataaggtaacgtttatgataatacatatattgtaatttactatattcttaaccaaaactcacataaccaaatttgagtgtgtttatgcataaactcgattcgtaaatttgatataaaggttttttattcctaaactttatgaaaaatatggtgtgtgaatcagtttaccataactaaaatagaaagcaatcaattcattggtacaacaatttcaatttaaaatataaaataaataataataaagttaaaaatatggttaacaatatttataattttttaaatttaaatttctttatatataattgtattacctgaaatttggctaccatctcagtaggggacacgtgtcaagataaaaggaatatggatcgatgcaaccgctttttatggaataactcattaattacgtaagtatcagagtatatttacaacctattgactgtaaagtctaatccgaggaaaaaaagtacaaactgttgcttggtatattaacgagaaaccatatgtcgttaaatgtgaatatcgaggcatcaagtacgttacatctaggaagacgaaagcgacacatatcgactgcggaagtacttagattataatatacaaactaagtataacagtcgggttggctcgagacctaataagcgaggtgccagtctcgctatgggaagacttcctgtaacttcacctagttaactttagatattttctcagtgaggcttacaatcctgacgagtcagaagctaacattcaaacgagcctcaaagaactatttgtaaataagaaccgcgatcatcacaaagaagcagcaagacgtgcatcgtcgacctcggaagggaaaatagccccagctcgctattatgatcactagaaccaagcttctatcgagacatacccagatacaacaattaaagatgtgtttaaatacatgat

SEQ ID NO: 310217 - DNA, 817 bp, Cannabis indica
aatattgctttaattatctttatatttgatgatgcttagcttatagcaggagctcttatggtaaaagttatttaatcaaggaaaaaaattaaaaaaaagtttagtttgacgtaaatatttccttataaacataatttttatataggtgaagaaagatattttttaattttaaacataaaaatataaaatttttaattattatttattactatatgaaatctaataatttaatatttttaaaattaatatttataattaaattatctatatatttatataaaagaggagtatgatacggtgacgtggcagtttaaaatcactccaaataactctatctcttctctccttaattatctttttttttttttaatttttaatagattcattaatatttatttatttacttatatttttttcctattttcttaaaaattattaaactataataattcttttaaacaaatctacataactttatatatacacgtaaacgtggttatcattcaaaaaaagtatataattattatatatagtattaattaattaattaacctaactattgctcactcttaattgataaatatttttaaatacatttatttttctctccttaattattctatataaattattttttttatataaaatactctaaagtcgcgtaactcttaaaaaaatattagatataaatcataataataataataattaattgaccatatttatttgctcttctctcaacgatcaatcctcactactacaatgttggcctttagaggttgttttttcactcccagttataaaaaaggaagctaaa

SEQ ID NO: 310218 - DNA, 891 bp, Cannabis indica
atcatatttaattaatttctattttattatatacaatagtggtatataatttgttcttcatggtatatttattttaattgtgttatgcaatttggttagtaaagtatacatatatatattttttattatttttgttgttagtatatatattttagttaatggtatatgtattttttgttatacggtatattatttttatctttacatttctccccatcgttactcttttttatttatggagacaattaactttgccctagctacgcaggggatggttgcaatagcagtaggctttttaccatttctttttggagcgttacttctgatttgctatacttttaagggatagttacatctcaaaatacatggttccaaagaccaatactccaaaccttctcgttactctttgcctttttttagtcgattttggggtcgtccatggacttaaatttcttgtcgtaatgcttctcctcgctaactaataacccacttgggagaaccactcaccaagtattagcctggagatgacttcctttgcagaagggggaatatttgttcttcagacatctcataggctcctacacctttatgaagttgggttttgggagtaatgcattcagttaccctagactttaggcattttccctggttcggtaatgaagtcgaaaccatatcgatttttatgcattcttcttactttgacccttgccagcatgaagttttaacttttttacaaaacccgacaaactaagctttaggaaatccactgtggtcgataagaagggattcaagggaatgttttttctcaagaatcttggccgaatatgcatttcatctccgaatttatctttaaattttaattttgaagaagcaattcaagcgtgttttccc

SEQ ID NO: 310219 - DNA, 1158 bp, Cannabis indica
ttatgtgttagaactaatttcttatcatgtttaatgaacaataaatgttcatgtaggctataaccattattttatttgatatataacaagacgaagtagaaagaaaggttgttttacaacaatacttaattgcatacacttttttattatatttaaacaagggtttgagtacgtatacctatatagggtgagctactccatatgatatctaagataagtatttgtgataatacatgagatcatcatattttcatacataataaaacgatgatgatgctcattgctcaggttccggtgttgaaagtggcgacttgaatagagggtttgttgggattgacggtggtaggaggttggtagttggtgaagagcttgtaagaggaaatgagggaaagcaaagcataacaagcaactaccacgaaacttatggccacagaagcggtggctttgtggcagaatcgaccgaaggaggagcaagctgagctccatgtgatggccacgttcccattgaaagccaggtatagaacctccgtcgaggctacgccggccgccagtaccatgtacgtcatcacttgatcaaagaagaagaaagtccacgcttgagacatcttcggtggtcgacgtggcattgcagcgatcactgccgatagcagggaatagccagcacaaatcccattcacatgcactaagtacctaataaacttaacacatacatattattacactacatatatttctgctataggaattggtgcctaaaataatgctttttaataaattgaatttatcattacttaattagcttaatacaccacaaacacgaacatactaattataaaacataataatagattagcaaattaacagggatgatatgatgatgtcttattgtgatatagatgatttttgttttgtaattttgtacctgaaagctccgaggtgggagtaagaaacagatccaaaatcattggtctgagagttgtgaagcatgacgacaagggcagcaatgcatggagcaatggggaggaggcggagcaaggtctcagcagtgtgcatgcctccgttgctactattcaaggcggcttcttcttgactctgatgataatcatctcctcctgattgagatcttgggaatattggattcgggctcagatcttgatt

SEQ ID NO: 310220 - DNA, 2120 bp, Cannabis indica
gattctgaccgttggatggccagaccatgaagactccatcatcgaagcgctttcttgcagtgctgacaagtgactggggcgaggagagcatctctctttgccttggccgcctccttttgagcctgctccttaaactcacaaagccccttcacttcaatagttaggttggtgcagctcctctagagacttcaacgttgcggtcaattcctgcactgcctccttagaatcatgaaggtcccgcctcactgtggccacgaccgcatccttggccttcaatgccttgtccttagccttcagtgccttctggtggctccgctccataagggcctctttctgctaggcttcctctcggataactctcttctgcgccttcgaatcctgaagactcttcatggcctcctccatgcccccgaactcggacatggtatacccatggtcaattaatgtcttcgagaggtgaccggtctctgcaccaatctgttaaccaacaaaaaaaatatgaatacgtaatatcaggcatcagaaagaaaagaagctcgaaaatatctctaacaaatgggaacttaccgcggtaagggctgcactcacgtcctggatctggtagatgggattagtagaagcacaggccgcatatctcttcattggaagctcagtcagtccggcagcaaagtggcttgttatttctgaggtaaagggagctaaggtgggaccaacaaaatggttaaaccagtcaatcaagggatccaaatttaagtcctagacgttcccggcgtattcacttcgagtgaagctatcatgggcctcctttagaacctttttaagggcctccacctcggcattcccctttgtgtactctatcgtggcataattgtgcttggcgatccggagttgggttctttcctcatcagcaggaatgggggttaggacgatacccggaggaacagtatactcgtccacctcggacggaatccctgagtcaaagctgggagctggagtgtctactcagcttggcttctaagcaacctcagtctccaccatatttcctttgcccttccggtgcaagggagggagaatctcgccttcttcttccccttcttcctcatcaatcagaacgacttgggggatgctggaagaagacctcccaggagtcaccgttgggtcgcaagtttgaggcacaccgacctcaggactgtatgttaggcaagcgcatctaggagctcatccatcggctgggctaattaaggaaataaacaagtaaagacattagagcattatcaaaaagtcatacattcaggaataatgtaatgaaactaatcctaccccggcgatctaattcttccctagcaaaagtatgtattaaaaggctggtgtcgttgccccctagaaagttgtccgagtggaggaaccaaatggaagataaataggaagaatgatccaaagggataggtgtgggaggaccggaccccatccgggaccggtctaagaagtgaccaaggttggaaaaataaaaactcttggcatgattaccccattgaaaagggggcatcctaaacctatgaagtcgttcatcaaactctactggcctacagccagaataatcctgaacggaagggacatgatgaatagttagtggggacttaccagcttcagaagtgctggcgtctggagccccagtgttagggaccgggaatggaagcttcggccgggaggacgtcttctccgttctagcctcaattcgaacggctctccccgcgactgcctgggccttaatgtaggccaactcctgtttcctcttaaagaggtacttcttgtatcggtccccagcagaggtgatgatgtcatcccgaagcgccttctcccatttggggttgcgaacgttggggcagagaaccttggacaggttaaatttatccacttactggctctctgaaattaacttggccctcctgcagtgtgcagccacattcagtccgtccttctcataggtggaaaagaccttggcgtgctgaaggaaaagttgagtaggcgtggtgaggtgcatgggggatgtaaagcccgcttagttaatttggaaattagcagtgtttatgattaattaagaaaattatttatagctattt

SEQ ID NO: 310221 - DNA, 541 bp, Cannabis indica
atgttaaaattgtgccaaatttaacacaaaatataacatgcactgaatcttacaccaagataaatatcactattttgtttactcttttgccacgcattaatgcctttattaactttttacattttattgatatgtttactaaaattttatacattttcaatcaaattttaatgtatttattgactttcttacaactttttattaaaaaaaaagttaatttaccactacatcggagcacgataataaaatttgggtccaatataggattgacttattttttgagtcaaatttagtgcaaaatttacaccacccattaaagatggtcttatgatacagaattggagaagtcttttgttaaaaaagagttcttttaaaagtgtttgggtaataaatgagaagtcttttttcttaatttaaaagttcttcgggagaacttatgatttgtaatttctcttaaaatgacttttgagaagttattcttaaaattgaaataatttacataatctttaatttactcaaaaaaaaaaattccaatgacatt

SEQ ID NO: 310222 - DNA, 934 bp, Cannabis indica
ataacataaaaaaaaactagcataaatttagtatacgtgcctcgcacgtagttttttcctagtatatatatatatatctaataagaagacagattagggtatgatgtgaggtgagcctgggaaaggtgatatagagatttttggagagatccaaataactaatgattaaattgatgatatatatagttttaattttgtacaaactctgtatatcatattgaccaacaacttaaaattataatatatatttatatattatatatgaagttttgtttcatcaacgtgccaaaacgaaggtactttatttgattgttgactatattcataattattgatgatcatgagaattattggatttatcagttagatcaaatttattggattttaaaatagagttcccaatcttataatatgatcgttcaaatttattaaaacttttatttcttaaatagatctcattctcattaataaaactaagttgaatgttaattttaaataatagcaaaataccgatcgaattattgaatttaaaaaaatattatgcaaaacgaccccataaaagaaaaaattaaaaaaagataaagaaaagttttgatgaaaaataatgttgcccatgataaatatgaaataactaaagagagatttaattaattagcaaatagtaagctaatatatatcatgcatgtgcagctacacgtacgtacgtacttagtcatcttagtcatctaattaatctcgatcgattgtgtgaacaaaatcacgtggccatatgttttcattgcttttatatataaatatcatgtataaagatattcttttatatgtatgtgtatgtatgtaaagagtaccaaaagcccacttgcataatctgcatgttctccatattacttctcttatttcaacacactaatacaatattgatatgttgaactcg

SEQ ID NO: 310223 - DNA, 910 bp, Cannabis indica
atgtgaccactaaagaaaatgattacatccaaagccaatatataataagtctatttcaatggagctttgttattttttgcctgttttcatggctcgttttcttattaagctacttttgctggagtttacctattgcttctgggtacttcatttgaatttttttattatatatattcagaatatatatacaactgataatatgtagagaaagcctcaactccttggggtagtagcaaatataaatcaaattatattaaaaatatttagtatatttaccattaaaaaataagtataaaaataaaacaattgaaaaatatttcaaatttccttcaaaaataataataataaaaaagtattgggaacctagttccattctctatatcaattttcatgaagaaaaattctaaaaaaggctatttatgggaaagcttagaagtgtagtaatgttatagaaatgttaatgagcagcatgttagggtgtaattgataaaaatcatgaatatgaatcccacagattcaatttttattaattctaatatgaaagttactacctactaaactataccaataacaatatacatacaactatactctatagctttgtgtcaccactttaatgcatacatatgatatgaaaataagatttgttacaatacaattaatagtaaatttgattgttaataaaattaaaaacatattacgtttatgtttaaattggtaaatttggtggggatgatcatgatgggtctctatctaactctcaagctttctctcacgaaccctagcccttaaggcatgtccagtcttagacatatgcggtgcctaggaccaacctaatctaggggattcaaaaaaaaaatattttttttcttttaaaaattacatatatattttttaattatttttgaaa

SEQ ID NO: 310224 - DNA, 1043 bp, Cannabis indica
aggggtcctagccctacacccaagttgacttcaggaactctagaatggaagtcagactttgataactcatttttaacacactatgtttcagtatctagtaccatgaagacatgaagcaaccaaatccaggcctcaagagctgaaaatatacgaaccaacacctcagaagtcaaccttggcacctaggatttcacccaacacccaaattgacatcctcaactagggtttcaatttctaagaccgtcttagaccaaatgggtcaaactttgcattgggacatgaacaagacatacacgaacatatttgaggcatcaaaattagatttggagaaagatcattttttagcactcagagtagccgatgtttggacacccaatgaccaagttgacaatttgtcaatttgggccactttcaagtatcagattcaaatttgactcgttcatcttgttcatattcatcaaaaacggtaaaaaagtgctttcctggatgaaatagtacttcttgggtgctagaatcaaggctcggtgcctaggatgacacctagggtaggcccaacacttaggttgacattttgtcaacctgggccattttcgagtattttttccaactcttctgagcatattctacgtttttttagcaaagattaagattcaactatttatgaggaccaaacaaaacttctagatggcatgaaactagacccagtgcccaggttgacatttggtgctaggcctagcgcccaggttgatgtattttcaacttgggtccagtttttcaaaaaagtgtttcgggaatttttttctatcattaaaataacaaagatacaagcaaacttagggagaaaaccacaaacctgagggcttggaaactcagcctaatgccgaggttgacctagtgttgtgcctagtgcctaggttgacaattaacctggtgcgctggttttgacaactcaaatgcctattctgctctgttaattctctttgaaatggtcaaaaattgggtaagagacctcatcctcaagttctagaaccttggaagtatca

SEQ ID NO: 310225 - DNA, 1319 bp, Cannabis indica
ttttatttttactttttttttttatcatgttttgcttttcgactttgacatatattttaattattatagttgtgtactaaatttatattattatcgtcttcaaaactcaaaactgcacaactacaaaaagcaaattaaatctatataaaatttaagaaataaatactaatttatttgtgaatgagtgtacaaatgtgcactcatcacacccctaaacttaaattagtgattgtcctcaagacaaataaaaaaactaaaactaactaaaatttaaaaaaactaacaagtccattattggataagagtgagatcaaaaatttttatcccactgtttattttatcaaatgtaaaaagtgggataaaaaatcccttttgttgtagtgattgaataatttacatataaatatcgaaaaattctttattcatacatgagactgtgacctatattgtatggagaattaagatcacttatttatgaataaaacagtcagcaacacattaaaattttagaatctttaatcaatgattattagtgtggttcattgacacctgttattcggcgcaagcaatctagatttggattgcttatgtagtatgacatctaagtgaaggtgctgtatataatagagattatatatgacaaagatcgatatgtaatttttttgattcattaaaaaaataatgaaaaagaatttaattgttagtagaaggaatttagagtattttcaatggtaagactttagagaatatttggtgatgtggacatattatgtaacaaaatattgagatgttataccattggagacaatggcagacccaagattaaattttaggatgggtttagttatacatttaatataattcaaaacaataaataaatagctaaatttaagtggaatgatgatttagcaacatcctcctattgtagtggtcataagtttaacctaatttgaaccttatatttcattttttttttcctaataattaaaaagtaaatacacatagaaaaaaggggcaatgggattcaaaacataaacatggtctcccttgtaaatttatagcatcttaaccaattattctatttaactactatatatatatatatatatatatgaaaacaaacattgtatattaatatattttcaaatctcagggtgggctttagccctcccttaacacccctaggtccgcgtatgattggagagaaggggatgtcattctaaaaatttgcatggatgctatgttgttgcgttaatgttattcattattttttaataaaaaattgaagctaaaaagttattgtagctaaaaattaagat

SEQ ID NO: 310226 - DNA, 1584 bp, Cannabis indica
atgatctaatttacagaaatgtcgttagtcattacacttttaaaaaatatataactataaacgtagattaaagtattgagtttcactttcaagttattataacacacacgagagtaaatttcttctctctcttaattcatcacagcttaaagattttttgttggtctttagttcttgttgtataaagtgtatccattatttttattaattttttctttttcttctacagttttaaaaaaataattttgactacaccggtatttgagatgagttacaccattatattctactttttaatgtgatcgttttaaaatgtaagaagcatagattttttttgctatttttgaaatcaaagaaaccatttaattactaataataccaattatatttgttaccttagttcttacaacaaaaataaagttaccaaaatatatcttaaaaaatattaagatacataacgtcactttaaaataactataacttagatgactataaatttagttaaaatattatgtttagttttttttttttttactttattgtaacttattagtttcttaaataattttgaaagaaaaataataatatctgcaactatagaaaatcaaattacaaatcgaatctattcttatcaaataaatctccattaatagaaaaaatacttcattcacaaatagcacaagatcaaataagaatccaaattagagacaaaattattgctaaatgaagtaacaactcaaaataaaaatcacaaaccaaaaccattctcacaaaaaaaattacatcaatgaaaaaaaaagcttcataatttcacaacaatgtggaagatcgatcaagaattcaatattgaaattatttatcaaactattgacaatatatacaaattagagacaaaatcataactagatacatgaatagctagctcaatcgaaacttaaaaaaaattgacccaaaaattagtgtgttcgttaatggaggtcatatcctcaagccacaattagttgggcatgtaataaaaataaattttgtaaacttaagaagaaactacacaccaatgaaatacaaaacaattagtttacacataattcaaatatacatataaaaaaaatttatacacatgaaatgaaaaaatgtgacatttcataaataagttactaattagttacctttcatatatctcatatatatatgatgttattataatattgtaaactaaatgtattttaaaatacattaatatacaaactgattagtatacgaaacgaaaataataattaataaattttttaaaataataaaattttgttaatataactttaataatttgcaaacataactttttattgttacttgatattagttttcaagatactataaacatactgttaaagtaattgattagttgataatagcatgctttaaaatttcaatactttttgttgcctatggtcaattaacattttttaaagctgatatgtttacaattattaatggtgtttataattttctttttattttcaaattaaatattgaatatattcattatattggtttacaaaattgatatacaaaagaaacatagat

SEQ ID NO: 310227 - DNA, 677 bp, Cannabis indica
tgtaagtaattatataactaatatatattctatatgtatacacatatacatgcatgtatatatgttttacgtacaagtactagagttagcaattttctatattagttattaaactaaaatgtacgaaatttcatcgatataccaaattgaatcatgtctttctcagttagttactcgcgagtgagttggtttagtaataaccagttagtataattactgagttggttcttgagctcaatgaattctataaatactcttaattatttgtaacaactaaaacatataatttataacaaaaacatataattaagactcaaattcttaattattatagctatggacgaaaacatatagtatcaattactttcaaatgttaatatattcaaaatagaccttgtacttacgaaaaataaaagaaaattacaattttactgcttacaaactcaaaattttgaatacttatgcctctatttatcgtttaactattgggcgcacgccaatgctcataattttattacgtacaaaacatgcatgcatgtttaagtcaggccaggcgggttaagcctgtgcctacagtacacctagcacaggagttcaaaaaaaaattctcttttaaaattacatatttttttattgattttaaaaaatacttaatttttttaaataaaaattgaaaa

SEQ ID NO: 310228 - DNA, 3939 bp, Cannabis indica
ataaatgactaaaatacccttaaaaatagatattttccatctattttcgtgggctattaaggccaatttatagtctagcttgctgtccatgtgtaatgatgtgcaccaaagtcctgtcaagccaagttttggctggccatgcatttgcaggatgcacgctgaccggccataggatcggccaatggtagctgaccaacctccttgaggttgttagtccatcatttgtcatctagtttgagtgtcgggactctccattagttgaagtattgagtagatgacttgaccttcttattggtaagctatactgccatgtggtactgatatcaaccacgtagacatgccacgtcaggtgggcaaaaattgggataacattttcccctaagtccctgtgcagacgtttgtgcggataaggactttctagcttagttgtgaatgatgtagccttaattgagtaaatattgctgcatttttagtctttgaaatatctactcttgattgtctaatctcatttattgtagtaagttaattgcattgtacttatacgtgcgttatacgtgctttttagttgaacactgtgtggcaagtgaagaagtggtcccacaatagccatataagccttatggaggaaaactcctcttcacttttcactttctcactagaaaaagtaactttgaagaagctcttcctcctctctagaggccgaacccacactgctccatctctcgagatttttgcgtcatttcgatgaaccaaagcttcccattctctttatcaacgatttcttgtagtgggtaagctttttgttcctgctatttacttgatttaattgattttactatgattgcatgaatcttttctttactttgaatattttttaattccacgttagattgtaaccctttcgatattttgatccgtatggtagtcttaggatgtgtaatgtgtgatttttagatgaaaaagatctgattctgaccttcattctgattcttggctctttgagtcatgaagaacacgaagaacatgttcgagttcttgaaaaaacacatgttcggatcctttatagaccctgaccggccaaagaggtattgttcaagacctggccagccatggttcaccatggggtctagccggccataggggtgtaccctataggttggccaacctatgcctaaaagtgaaattcctggctggccctaggatgggtcatgggaccctggctgaccttctaaggattgggaaccctggccggccaaggccaaggttttaagtgggcaaccagtcttttgtcatcttttgaccttagctagggtcttgtgacggtcttataggcatatacaattgtagtcttatgtgtggttccccttgggaactctgtataaaacttggtagtgagtccattatagtcaagtgcacaacttaagactcactatttatctaagtagatgtacttgagacagtacttcactgatacacagtcttgtacaatgtgatttacctggaaagtacccttgggtatagttgaccaaaactttgtctgtagctttatcaggttgctcagctccccttgtctcttctatgcaagtgatttcgagtgttgatctaaggaggtgacaatcgctgtgtcataggtcccatcagctttgccttcgagagatagcatttcgtctgtccccttgctccctttgagtgattttggattgatagaacaaaacaatcgtatcgaagggtgccaccatatgaccctcatgttgctagggtggaaacaatgggcagagttagagctttataggaggccacacagccccgtgatgatgtagatctagatgtcggtcaggcagaggcgcctgatgttgaataggggctcagagttctgacaccgagtctaagatggaggaggctacgcttgttaggaggaggacttacagaatttgtgttgtcattcccaattgccctctgggcacatatgacattttatgggcagccattgaacaggttaggtcagcctttagtgatgggtctgaaccatgtcttgattcaatttttagagcctcaggttcttgatgctggatcacaaggagacaggtgggtctctcccgcatttgtttttcctgccgagacttttgacaggatattggtcagtggactagttagaggtgtccagtgtgagatacccacaagggatcaaagagcacaccagctcaccctcggttggatgtcatggtcggagcaccatattcagttggggtggtgttgtcgttacacttatacttctgagatattgttgcttactttaagatgtgttcaacataaatcaccccaaaaagtataaaatacctctcagcgatgtttattttatatgtggatctaggatggcctcaggatacttcatatgagattgaatattactttgaactgaaatctactccaaagcagaactagactgggtatttctacttcagtcaagttggccatcagttgttgggtgacactaatagcatgcatatgtcaaaagttggtggatatgcccataactacttcattacatgggatatccatgagatttgacattactgcttccagtgagtgtcatcatacaagcgctccatccctactttgtagatgagggatagggcgaatcacatcttatccctccccatggagaagaataacataatcagtttggccaatgtagctaacttttagaagtacaatttgtatcctcctgcttctaaagttgtagggaccgagggcccatcagttggtgtgaatggagccctagctgttgaggaagtctgtcctggtagtggacatgctcctgacatggatgaagatgtgcctctgtcccggatagcccgagtctagagaagagagagagggccctccaccagcgcttggctcgcggggggtacagttggggacactactcttcatattaggcttggaggctagagctctgcaaagcttactcaccccttgcctacatttaaaggcaagggaaaggtgaccaataaggatgatggtatttgatagttgattgtaccatcttttatattcttgtcttacattaaataattaacttgtattctaactttgttaccttcctcttgtagatatgtctttcaggttgagaggtctagctggtggaccttcagaggagcctttgggtcgtccgagggccaaggtggtctggacactcgtgtgagagatgacgcgtggtcatctcttcctcctcctccttcagggcctgcactagctaagcatcccatgattgatgaccctctagtgaggagggaatggcattcgggcaggagcgcctagaggcctagtcgaggagcgggttcagccatggaggtagctcgcaagcacctggacagatcctttcctctgtggatgatgagctttaggagcttgatgacggtgagccaaagaggctctcttttggtggcctttaggatttggccgcagtgacttacactgtaacgccctaatgctaaggcatgttacagtgattttacaattatagtgcaatctttgctaattaaagaattttcttgaaaatcgtgtcaaattaaaacttttaatattaactatgaaactttataaactttacataattatttataaaagtcgagatcccgtttctgaacttctttacaaaatattccaaattacattattcaggttgcacatcgactacaaaatgataaccctagatgtcccgagaccgaacactgcaggtcgcgctgccatgacatgtacaatcccatcctagctcaagctcactgctgttcagccttcacctttcttttacctacacgtgaaagtagaactgtgagttgacagactcaataagaaaagcatataacatattagataataccgacttgtatcttggcacccatacacctatctacaaggcttaacagatgagtaaga

SEQ ID NO: 310229 - DNA, 885 bp, Cannabis indica
caatcctccctaattccttgtgtgatcgctgtggtcaccaagaagaaactgtttcccatgctctgtttttctgcaggaacgttcgaagtgtctggaaaggtacagtttttcatagttatatttactctttgcctttcactgtttcttttcatgacatagcacacttgatatatactaaactgaccaaagaggaagtagactctttcctctgtatttcttggcttatttggcataacaggaatagagctctcaggaaccaagcgcaggatcaaaatcatgcaattcccagtctggctagcagctttctggcagagtacaaaacctcctcccaagcttctcagtctccgggtccagtgactaggccccccccagtctctgtctgggagcctcctccaaacggttgcctcaaattgaacactgatgcagctatcccgaagaatagcgcaaaagcaggtttcggaggagtaattcgcaatagtgaaggtcaggtggtagcagctgtagccaattctcatctcggcggaggtgatgtggcaacccttgaagcaaaagcactcctcacatcgattaattggtgtatcgaagaatgctttcctattcaccaggtggagacagattgcaagacgattaccgacgcgctcacaagtactaaggaagatctctctctttttggtgacatcattcgtcaaattaaggaagctttatctcttttccccaacgctcgagtctctcacattagtcgttcagcaaatgccatggctcatcatttcgctaagtgggcagtggggttagatgaagcagcaatttggattggcgatgacccctgcaatttagtttcttttctttccctctaagggcatccctctcttcaaaaaaaaaaaaaaa

SEQ ID NO: 310230 - DNA, 563 bp, Cannabis indica
ttagaggttttctggaattaacatgatactgcagaatatttgttgagggatgtttacactcttagtggaattaagtcaagagaattgaaacagaggttaactattgtatcagtgttaacattgccggtcaatgaggagaaatttgtgattttgtgtgacacttgtaaacaaggattaaattatattttgatacagtccaggagaattattgcctatgcttctaaacgattaaagaagtgtgagtaatagtattctagctatgatattgaattgatagcagtggcttccgccttgaaagtttggcacttttatctgtttggcaaaaaatgcgaagtatatatagatcataggagccttaaatactttatcatttggaaagatttaattaggaggtagcgaccatggttagagctaattgaaaattataacggtgtgattctctaccactgtggaaagtaaattagtagtggatactttaaaccgaagaggtctaggacaagtttgtaaaacgaaaagatttcaccaaaggttgctggaaatgtaaccagaacagggattgagtt

SEQ ID NO: 310231 - DNA, 763 bp, Cannabis indica
taattacactaataacagtatgagaccgtactagtcgggtttgaagtaatcccttttaacaatgctcttagcaaacactatggagaaatggtaaagggcacccatttggcgggtttgaaggcggcatagatgagctgcgtctggtcgatgagggttgagtaaaaccctctgaatcccacaatgaaactaccatcggggatcggaaaatagtgttccactcctccatggccaccaaccagaagccctctatcatctctgatatataggccaagcttatcaagttcaacacctgatcttacataaattttcttgataaactcaccatcttccaacaccagctttttactcaaccgtccttcggctttgccataactctccgtccgtcttcctaaggtcgattcgaaatcgacgatgatactgttcacattactgcgacaattattggtgtgcatctgaatcccggtaatccttgttttactctggatgtaggcatcgacccccgtgaacaagccatatgggtacatgggttgggcggcgccagtaccatctccaaactctggtgagaaatggatcgagtattggatctccggcatacctttcgaaagggactgttggaaatattgtgaatattttaacaaaatatatatgtgtcttagtgtgtgtgagttggaaagagtcccacatgggatatgaaccctcattgacaagggtataaagagtgcaactttggcatttgggtttgggccccaaggggtacccagtt

SEQ ID NO: 310232 - DNA, 1527 bp, Cannabis indica
tttttatctagttatatctagaatatgcgtccatgaaagacataatctcgtatccagcagttgcatccactaactagtaaatccttggtagtggaaaagcaatcctttggacacgccttatataagtctgaaaagtcgatagaagttctctaagttctattttgttttatgacgagaacagggttggatatccacaaggggtaagatgcctcgtgtataaagtcattaaccaataacttttccacttcctgcttgagtgccccttgtctctaagaatccaagggtcgcctcttttgtctcttggctgggtaatttgggtcgaaattcaagtggtggcaaataatcttagggtcaatccctatcatattcgagtggctccaagtgaattgatcctggtttgccctcaaaaaacttattagtagctattttagtttttaatccaagtttttcccaatgaatacacactttgtgggatttttttgatctaaaataacttcttctaatttctgaattggtttcaatagatttcgttcatcttaaatccgagaatcaagatcctcattctgcttctcgccttcttcagtcatgactaccattagctggtgactggcctttttattctgcagcgctatgcgttagcatttgtgagccagcatttggtcacctagcaccactcccacacctttcggtgtctgaaaccttagagataagtacttaattgaactaattgcaccaagtacaattaatgttggtcgacccagcaatattttgtaggatgatgccaggtcgacaacaagaaagtctcgcatgatagtggtggataaagctgcttcgcccatagttaatgggagctcaattattctttgactggcgacactgtcgcctgtaaatccacatagatttacaatgcaaggttttaactttgctttttctagtcccattttctttagtgtatccttataagggatattcactgaactttcgttgtccaccaacaccctttttatcattttgttggcaagttggatggtaactgctagtgggtcaacgtgaggatacctcacgtgttttgtatcttcctccgcgaacacaatcggaggttcctcagtcttagctttcttagaaggtttcggagtaaaaacagactgctcgttcttaacttcctttgcatatctcttttaggcattgttactttctccagcaagatgtggtcgtcccgagataaccagaatgtcctctcctttaagaggagaaggttgtaatagctagttacctgggttattaggcggattatgctgggtttgtccatcaccttgtctttttcacatactgtcagaagtgacctcgacatataaggctttctatctcatctttcaatggacgacattcctcttttgtatgcccaatctccttgtcatacttacaaaatttggttgcatctctcttatgtcatgcttcttctattttttcttgtccttggttgattccttggagtcatctttcctcttagagcctcctagattgtca

SEQ ID NO: 310233 - DNA, 4002 bp, Cannabis indica
tgtattgataccaagggttaatactattccaatcactataggtaggatctgatataacactcttaaggatgcaaagtaagaatcgaggttggcaaatctcaagtgttgggaatacttgtatgggcgtgtgagagagagtgaggaagagagttattagaattaggcttagaactgtatcacatggaggctcgtatcaggcttggagacttaggttttctaggttagagttaaggcttttatataggaaagcctaaaccctaatttataactgaaacccttacatatatgtatatcgaattagttaattagaaaagactaaaatgcccttaaacatagatattttatagctattttattgggcctttagggccgaatttgcaactcgatcagaaatccacatgtagaattgtacaaaaaatcctaccaagttctttcctagccagccagacacctacagggaccagactggctggccttggtgttgtctagaggctggccaggggtggcaagccaacttctgtgaggaagctggtccgtcacttgatgccccgtttaagtactggggttcctatttggtgagatactaacttggccttcttgttggtaagttgtacttccacgtggcactgattttttacatgtaagcaatgccacgtcaggtgagcaaaaatcgggataacattttctctttaagtccctatgcgaacgtctgtacgaatagggacttatcagttagattggtgtggttggaactgatgtaacctttactgaataaaatttgttgcatttttagccttttgaaatactttgccttgactgtctgatcttgttttttgtataaactaactgctttaattgtccttttattgtgtaggtaggtatgtgaagaaggggtctcacttgtactatataagtgcttctggggggaaaacccttttcagtttttacatttcatttctttcactagaagtttacatttgaagaagctcctccatctctctagagggcccaaaccatcaagcactattctcttgggatttttgcaccgtttcaacaatccaagcttcttgcattcttcttcaaccgtttcttgtagtaggtaagctttctattccttgtatttcacttgatttggttaatttttccatgaatgcatgaatattgttctttgctttgaatatcctttaattcctatgttagatttttgtcctttcggtattttgatttgcatgatagccttaggataactaatgtgtgatttctagatgaaaaagatctgaatctgaccttcgttcagattcttggctctttagtcacgaagaacatgaagaacgtgtttgagttcttgaataaacacatgttcggattcatacaagccttggcccaccaaggaggtcttgtttaagacctagccggccaagggtggctattagggggtctggtcggccaagggtgtgcaccccataggctggccggcctatgcctaaaaatgaattcctgtctgaccctagactgggtcaaggggtctaaccagcctctaaggcttagcaccctagccggccaaggccaaggctccaagcgggcaactagttttttaccctctattgaccttaactagggtctcgtgacggccttggaggcatatagaactatagtcttatgtctggttccccttggaaactctgtataaggcttggtagtgagtatattatagtcaattgtataacttaggacttatcatatgtctaagtttatgtacttaagatggtacttgatcgattgttgaccttgtacattgttatttacctggaacgtacccttaggtaatgctgactagaatttgtttctagctttgttaggttgctcacctccccttatctcttctatgcaggtagtttagggtgttggataatggaggtgatagccacataggtcccttagtcattttgtaactatggcccggacgaagcagacttgtcgtagagtgcctccatgtgaccctcatgtagccaaggtggctacaagaggtcgagtcaagattatagaggaggctactcagcctcatgttgatgttgatccaaaggttgaccacgaggctgagagtcccgatgctgagtctaatcttgaggagactgcaccagtcatgagaaggaggtacaagacttgtattgtcctctccaactgccctttgggtcgttaggatgccaatggcaatccactgaatagggttggtgagccttcaatgttaagcttagatcacgtcttagatcaagtcttctgagcctgagattttggatgcgagatcacaaggagacagttgggtctctcccgcttctaccctctctgatgatgcttttggcaatgtacttactagcggtttagtgagaaatatccattgtgagataccttgtagagattagcgggcacaccgactttccctgggttggctggcttggtcagagcgttatattgagcaggggtagtgttgccgcttcatctatacttccgagacattactgcgtacttcaagatgtgtttgacacaaatcacccaaaaagtatcaagtaccttttaacgatgttcgttttatatagggagctaggctggcctcagcctactccttatgagatcggatattattttgattttaagtctactctgaaggagaataggactgggtacttctacttcatccgagtcgatcaccagtggttgggtgacaccaatagtataactatgtcaaaagttggtgggtatgccaagaagtactatattgcttaagccttccgagaattggacactacgagttttggtgagtgctgttcttcaaatgctctatccccacattacaaatgagggatagggtgaatcatatcttgtctcttttggcggagaaaagaaacatactcaggttgacaagtgtgaccaacttctagaagtatggtttgtaccctcccgctcctctagttgtgggagccccagttgtagaggtagcttgtcttggagatggacaagttcctaacctagataacgacgtacctttatctcgtatagcaaagaatttggagaggagagagaaaggcctccaatgatgcttggctagcggggatccaattagtgatgcttctctccgaataaggcctgaaggctagactcgtgagggacctgctcaccccttgcctacatctagaggcaagggcaaggaaattgaagagaattctgataattcctcttctgagcatgatggtatttgatagttgttatacctgaaattcggtaagcacatcagaggaagacacgtgtcgagctggaaaaaacgaagaactcaaacacgctaacgaaaagtatacttagtatggaacaactcgttggaaatacaattcacagggtatgtttataactcggctggctgaatagccttctgcgagacagaaacgtacaaactactaacttattgatttacgagaaaccatttgggtgcacgcattcatgacgaggtctcaacctccctgcgtgaaagagaaaacgacaacactaaaaatacttagcgtatattatacgatattcaaactgagtatagatggtatgcatgcgaggaagatcatctcgacaccagaaagtatagttatcagagttaaaacaacattagtctcaagaagccaaatgacaagcaactactcgctatcaaagtgatctttgctccattctcggcgaggcatccctatgagataaggcttaccatatatttttgattacgcgttcatctcggcccaataaaagctggatattcacaactgtgtaaaaacctcatttatttggcttaatttgtaatcagatcccgcaattttagggataatggctgtaaacatattttggttagctttgtaattaactgccactatgtaattataaatagtgacagaaaagatcaaaaggaggggacgaaaaaactcttatgaaagaggccctaaaaaaatactcagaaatctgaataagattgac

SEQ ID NO: 310234 - DNA, 8369 bp, Cannabis indica
gggcataaaacccaacaattaaaagcgcataaaaggtaaaaatattgtccacaccttatggaggtatttttataaataaagtataaatttatattttccatgtaatagttcgtaaaaaatttgatatatatattaggttaggttgaagttacctagaatgtacgtatacttagttttatataaaaccaaagaactaagtcacgcttcgcgcggtgttgtcaaacttttgtaatatttttatatatattgtacttatactaagtaatataataaaaaataatacattttgagtgtgtgttattataaacaaaataattgtattaaaattagaaatatagtttcctatttttaaaatgttaacccgaaattttttcctagtgacacagacatcaatatttgacatgtggcatgaaggatgacgtcacagaaatgggtagacccgagtgatagtagtcaacttgggaggggaccctacccttgcacccaggttgactttgggatctctgggatggaagtaaggacttcaataacttgaatccaagatattatctttcaaatattctataccatgaagacatggaccaacctaatacatggtctatgagctgaaattacacgaacttgcaacccaaatcccaacctggggacctatggtttccacccaacacccaagtttacatcctcaactagggtttcatttttcgagaccatcttagtgaaaaattggccaaaacttgtattgggacatcaacttgacatatcacacacatgtttggggcatcagaattagatttagagtaagttggtttttgagcacccgaggccctggggcccgagcacctagtgcccatgttgacaatttgtcaatcagggcaacggtcaaagatctaaattttgcattgaatctaccttcataaaaaaaatggagaaataggtcctttcggaggaaaaacagcaattcctgggcagaacaaatagggcccaacgcccacgttcacacttggagctagccctgcacccttgttaatttgtcaacctaggccacaataaatggagctttcccaacattctttcaagcatcatctccgtcttcaaaaatattgagatttaactatttctggggaccaagtgaacctatcgaaggagtagaagagggacctagcgcccaagttgacacttgggactggggccctgcgcctaggttgacattttctcaatatgggctgtttcctatttagttcagcaaaaattgcttcgggtatcttcaccgtcatcagaaataacagagattcaagtaaactccgggagaaaaacataaacctgagtccctgggaatagggcacagtgcccaggttgacctggtgctgggcgcagtgcccaggttgacaatcaacctgggatgataaatatgatgtgaccattgaattcggcattgcaaaaaaatagggggagagaccccatcctcaagtttagaagccttggaaaccttgaaagtataaaaaatagaatcccgagagctcaatttaaagccccattgcccaggttaacaaatggcatagcttcgttggattcttcttatctgaatctaatgtcatttcgaccgtttatcatgttttcacaagtgcaatgatccataaagtcaaatcaaccaaattcacaactttaattttggctcattgggaagcagaaagtttcgagtcttctgtttcggtaaaacagcaacatcttcgagaatatgtgaccagtttcacataaacatataaaagtactaaggggtgtcaaaccatcccttaggcatctcaaaggacttcccttagaagtttttacacttatacaacatccaggttgacgtcagatgtcaacctgggcgatggaatatgaactgccttcagtaaaatagccataactcactcaattttttattcgatttacaatattcaacttgcattttgaaggtttttaagccctcaatcaagtattgcgtcacaccccaagcgtaattttgaagataccatcatcaaaaatcaccccaagagagttacgaaaataaggtctgggtaattcgcaataggacccactagacatcaaaaataagctatcaccagcagaagctaattttcactgttaagtcatcatcaacggtggaaaatactttatttttattttatcttctatatttttgggcctccttcacctataaaaggatagctcccttagtttattttaaacttttaaaaaactacccataaggttagagcttctctctctagaattcaaagcttcagatacttaaacattagttataattaccatcttgtgagaaatataaactaaaagtatacatagccccattactatcacgatgtaggattgaactactataaatcgatgtgtctatcattaattactttacaacttttcttattcttgctaatctcgtgcgcggatgtggcttagaagtctagtccagatttcttagtcaacattttggtgctttcattgagagccacagctcaagaaagtcactaagaaatatggttgtgacacattctacaagtgtcaacagaaaaacttcaataactggccaaataattgggggcacgccagttgatggaattagaaccaggactactcctgcgccctaggagctaggagtaggccttataaccaccacctcaacttgtcctccaaggccaccaccaactagtcctggcactagtaccaacgactaaatccaacccgaggagccatacgtggaggtaaaagaccctaaggaggccaatcctcaggtagctcggctcagccaaattgtggctaacttgcaacaactgcaagactctcttgataagcaacacgaccactttcaacactggttcatggaaaactagaagcacattaaaacccaacttgttgagcaagagtagtatagagctaacctatctcaacggattagagatgctgatcgttctaatcctagaactgcttcccgtagaggtatttctgagttggtgagagacaccccatcaaccagttggtcacgtgggaactagtgttcgaggaaaaaccctaaatgctcaaactaccaatgttacattggttaaccgagctgacactacacaaacaccaagcatggagactttctggagggaaagtaccttcaatcaagagcctgaaaggactcaagctcgagggcgccaaccaatgggccctccactgaatgttgaatgatctcacaacaaagagagaactaacaagaatcctccaccaagtcctactcaacattctcaagagaccagacctcaagaccctgcaaggggaaaagatctattgttcaacccaaaggaagtagtaggagacactacatcaaaattagaagctataaaattaaataggtaaggaccaatgagtcgcttcatactcggaagtactttcatgatgaaggaggggagtcgtgtcgttacattgcccatggccatgagggccaatggtatgagtatttcccttacgtacatggagaggaattgaatttgagtcaccaattcaattgtttttgcacctgtgatcctactgaagactacttcgaggaaactagccactataatgctccaaatgaaaactctcatagtaggtcatcccaagacaatcatgaattcattctggaggcctcactagagttgccttcatgtccctgtggtcaggagacagctacaaaacccaggtcgaccagagtacatgatcgacctggaagagaaagagacatgcctgacctcttgaacaaaagaagaatagtggatgtgggagcgtctagagaagaccctattcagataacaaaagctccattctatctcagggtcaatttggtagaatttgacacctcacgtgctgtagggaaggcgatcacgacacctaagttgtacaaaatttaagcttgacagagaatggtgctcaccactctctgaatgaatcaaagcacttcccattccactaaaatttgagaacctttcttggaatcaatacaccaggcaaaaagattcgttattttacatctaatacttcaaagtacagacctatttgtatggtgtgagagacgacaccaagtgtagaatcttctgtgctatgttgacaggcctagctcaacactagtacctaaagctctcccctagattaactgactcaaggaaagaactagtgaatgctttcgataaccagtttgctccttcttgacaatgctagatcgagcccaatgatttggttgatgttaaggaataggaacacgagcccctcaagcactacatccaatggttcttagccactaagacaaaaagtcttagcgaggatgcaagggtaatggcacttacagtcgggctcaaagagatgagtcccccgagtatacattatgaatagatagagcggatggctttatcaaacttgaagaagttgtcacccgagtaaaagcctcaaagggtggcaagaagaagtccccaaacactaaagctcttgctactgaggtatagagcgatgggaagaaaggaggtttgaatagaggaaagagagccaacaatggtggcatgcaaggcaactcccctggaggaaagaagcctaaaattgggggcaagcccttaagagattatgagcctgggttcaccatctactccattttcttaggtccaagagaggagatatatatggccactcaatcaacattattgtatcataaacctcttcctctcaaagaatcagggaacagagacatgaacaagttctgtcgttaccaaaacaattacggtcatgatactaatgagtgtaattagttgcgggacgagatagaatttctcataagacaaaacatgctgctctttggtggtatgtacgacatgatgctctagcagggggaatgctccattctagcctggaccaattacaagcaggttagagattgttattagaggccttcacttagctggaaattcaaggaaggcctcagaaaggtaagcaagagttctctaacatgaactaagattcgaagtcctagaggtcgaaatgccttccaaaatctcagtgctatgaatgtgaacgaatcaccttcgaagaatcagactcttctcatgatagcttccctcacaacgatcctctagtagttgaggtcaaaatagctaatatgatggtggccagagtaatgattgacgacgaagcatcatcaaacatcttgttcaagcaagtcctactcaggatgggtctaaatttagatgacctagaagcatgagaatagctcatgtatggtttcattggagtcgatgttcctccatgtggcaagattaagttgccacttaccgtcggcactgcccccaaagcaaaccaacatcatggccacattcatagttgtggacttgaagtctccctacaaagtgatgctcagatggcctacccttcaagccatctccttagtataccacattttcgttaagttcccaagggttgctggtttcaattatctccttcacaatcaagaatatgcccgcgagtgctacaatgcatcgttgtcactcgccaagaagacctcttcaattgtcatgacctctaaggggacgaacaaaatctccactactattataacaccaagggggatgagcaagacctctcccacaaaatttggcgagacaacaaagaccttcaaagattaaactatggataaggtagagacaacacctaaaacaacttgaaggtgcacccaagacggggatgacattttcccccattttagggaaattgacttgggagttggtctaactgaggaattaagagaacatcccctcaacacattagacccgaccaaggttttcaagattggaacaaacctgacagagctcttgagtgagatgctcatagcttgcataaggagaaatgaagacatcatcacttggtcgagtgaggacatgatcgggattgacccccaggtcatctgtcatgcaatccatatagacaaagttaactttaagcctgtacaatagaaagacaggctccttaacaaagagtgttccaaagctctcaaggaagaagttgaaagactaccggagaacaacttcattagggaagctttctacttagtttagttatccaaccttgttctggtgcctaaaccaaatggaaagtggaggacctacgtcgacttcattgacctaaacaaagcataccttaaagactattttccactactaagaattgatcaactagtggacgcgaaagctagccatgaactcctcacattcatggatgcatattccggctataaacagatcagtatgcatgcaccagataaagaacagacgagttttcaaactgatgcctaagcttgtaaaaattgatgcccatctagtaattttgagcgaaacgggtttggttcacgtcatcaagttaactctacacaagtgtgaaattaacatttggggcaaatgttaacccagaagctttccctggtgatgtgaacataaatgtttgacatgtggcatgaaggatgatgtcatagagttgagtatacttgagtcacagtggtcaacctaccaggtgaacctagccatgcacccaggttgactctagaagctttaggatggaagttcgtactttaataactttaatcccacctactatcttttagtattctataccatgaagacatggagcaacctaataaaagtttcaagagctaaaaatacatgaaccttcaacctggaagccaacttgggcacctagggtttccacctcgtgcccaagtttacatcttcaactaggatttcagtttttgggactgtcttagtgaaatgtttccaaaacatgcattgggacatcaactagacataccacgaacatatttgaggtatcagaattagattcagaaaaagttgattttttgagcatcgaggtccagagcaccccacacccatgttgacattttgattgatcgaagattcgacttttgcatttaaaccaacctcaaaaaaaaagtagggaaataggtccttcaagtggaaaaaaaataagtgcttgggcataaaaaatagggcccatcacccaggttgacaattggggctggccctgtgctaaggttgacaatttgctaacgaggggcacaaaaaatggagttttctaagaattcttttgagcatcatctccatcttcaaaaaatattgggaatgaaatatttccaaggaccaaacagaaacttctgaaggggtagaagaggcacccagtgccctggttgacacttgggacaaggcccagcacccaggttgacattttgtcaacctagcctgtttccaattcaatcagcaaaaagtgctctagggatcatcactttcattagaaataacaaagatttaagtaaacttagggagaaaataacaaaacccgagtccctagaaacatggcctaccacctaagttgacttggtattgggcccagctcccaggttgacaaccgatcagggatgctgcctttaattgctcaaatgcaaaatacgattgaccattgaatccgtaatggtcaaaaataaggggagagatattgtcctcaagttcttaagccttggaagtatcaaaaacagaatcccaaatgctcggtttaaaggccccaatgcctaggtcaacaaatgacctagtttgttggttctacttatcccaatttgatgttgtttcaaccttccatctagtttttcacaagagcaatgatccattaagtcatatcaatcaaattcacaacttcaacttttttggcaaagtgactcactcagaaattggaagttttgagttttccatttccatagaatagtaacatctttgaggatgtgtgatcagcttcaccaaaatatataaaagggctaagcggtgttaggtcatcacttaggcatctcaaaggaattccttgggatgtttatacacttgtacatcatccaggttcatgtcagatgtcaacctgggcagtggatgtcaacctggctactaggacctgaattgtcttcagtaaaatggtcataagacactcaatttttatttgattgacgcgattcaaattttgttttgaagctatttaagccctcttttatgttatgtctcacataccattcaaaattctatagatatcgttgtcaaaatgcacccccaagggagtgacaaaaataagttccaagtaactcccacaagtatgctgaattaacaacctaaaaatgaattgtctaaaaaaatgaaattaaacaaataagggtttaagaaaaccttacattggttgcaagggaatataatgactccttccgttcaagatctttagcccttgattcctttttgtagcagagcataatcaatatctaaacctggatctct

SEQ ID NO: 310235 - DNA, 2106 bp, Cannabis indica
taaggtgaatctcactatgatgcaagctgttttaaagacacctgcttttattggcaataccgtcgtagatgtatcccattccaataccttggtaatggcactagggacaacttcgtcacatcctgttagttaaggagaaatcaattcacttacatgaggtaaggtgaatctcactatgatgcgagctattttggagacaactgcttttattggcagtactatcgtagatgcatcccattccaataccttggtactggcactagattaaagttatagtcttagtgtgccaacttgtaagtttaggattcaagcacttcaaccacgacatatggtccttcccatttaggcccgagtactcctgttgttgtgtcttttgtgttcaagaatacccttcgtcacaccatgtctccatgcttaaattatctagctttaaccttagacttgtagtgttttgcgaccctttgctgatacaccgcctttctaagctttgaactcaaacctttctctgatctcttcaattccatctagagattcggccggcagctgatgattagtttgctggttggatgtaaatcttcaataggatggaagtgtgagctctatgggttagagtgaagggagtgtgacctattactattttttctatggtgctcgtaggttagagtgaagggagtgtgacctattactattttttctatggtgcgataagcccatagttctttaggcacttatttaggccaattcctttttgcttgctctaggcattgctttagcatatccttaagagtttggttgactacttccacttgtccatttgcttgtggataagcaatcactaagaaactcttaaagattttatgtttgatgtagaaatcagtaaagaggtcgctattaaactgtgtttcgctgtctaacactatcttctgtgggagtccgcgtaacgtcttactcagaggaatgccacgtgttgtgattacaattagctaatcccgttaattggggtccataagccaagtgatttaaaaaccaataatatactaaatttaactaaataacttggaatattacaaacttatttcaaatcaaaatatttatagttacatatccgggatccaataaaatttatttttaaaatattacaagtcatttcttacaggttgacctaagcggcaaaattagaatttctacacaatcccttgttggacccaacccttgtggtctagcttggcttgaatatgtacaactcatctttaaaaccctcaaactcatggttgaagcgacaccgcctaactagtgcctgtacattagagcactagtgagccaaggcccaaaaagacagaataataatacatcatatagtacgctaatgcgtatatattgtgccattgcactttatatcacattattccatatataataatgtcactataattaatgtttatatagcatagacccacgtgttacgctcacatgtctcgtttacatttaaggccttattagggtttatcttagttatcattaccgagtctaacctggttatgccttacccgcataactctactcatatatacataatccatacattatgctctcacagtggttcatcctaatgatgtttatcagggctaacccagttatgtattatacacataactcttgatatataaatatcaatacagtacatttagcatatactcaaccatatgaagttttagggtaataaccctaacttgcataattctaatcattcatttacataatacattatagcatgctcaagacaatacatatttagggtagtaatcctaattcaccatatatatattgagggtggcaatcctaattcacaacaacataattacttagggtagtaaccctaatccataatataaatactacggtaatgaccctagttcacgacacatattaatttaagttaataaccctaattcatgctttcatctaaataatcacattatatattattgcatattcatgtaaattcatacttaaggtaataactgtaacgccctaaataattaggcacgctacccaaaatacttatgaaaccctaatcccctaaacgggattactaataaaaatagc

SEQ ID NO: 310236 - DNA, 846 bp, Cannabis indica
tcagcttgtgttttttttctttttcctatcaatttaattcttcctttttcaacaacaaacaaacacaattaattggaaaaacacacccaacaatatcaatatttacaagacttaaaagttagcttactaaatagaaaataacactaaaactaactaaaattaagcaaacaaacacattttcactactcttctcacaatacttttagtttaaaagcatagaaaataactctataccatagagttatcagcttaatataaagctaattcaagcctaggggtaaaatagtcaaaaaccataatctcactcaaactcggtattctattttttccaacattaaacccattaagataaaagttctagacttacccatgtgattaaaatatgtatccattacattttctgttgtcgcctagtaaaaattgtaaaaaagaaaaacataattcttatataatacaaataatactcttagagtttaataaaatttttggaattgagaaattataactctaatgctcatttttaataatgggacccaaaattaaacaaattcataaataactataaaaataccaataatcaatgttaattgtctttactagttcatattctaaagtgcggttattacaaacatgttgttctgaagataataattcttttgctatttctttttacattttttttaatagatcttttgtttaaatttttaatactgaaaaataattaaattaaagagattaattttgtcatatcacttaatctatttgattacaatatttattacatacctaacctcataatatccctcctatataattttgggtgattctacaatccactcccttaaa

SEQ ID NO: 310237 - DNA, 599 bp, Cannabis indica
aagtggttttcaaaatattttttgttcaatagatattttttgttgtttacttattcatgtgtatttttttatgatggataattttagtttcttcctaacaatttttctttggttgtatgtgtattttttgtagtttagatgtaatatttcagaaattataattatatttaactggacatattttatgattatatggatagtggagtaagattataatcttacttaagctaattatgagttgattagtgtaaaatttagtaaatgaataaaataaagcgtaattcattaattacgaaggttttatcggattatgggggtattataaataccattttcaaaataaaatattttcgggttcggtagctgtgaaaactcgacagagtggtcagaaatgtcacgacaatataagatgagttgtattggtttataccgaactagttaaaatatgttagatgtcggttaagtcgggaagcaaaacaaataaccaaagtacccctaggttttttattttagacttaagtgtttaaggaggggtaatttaatcttttcactaggttaaggttttatcttatatggatctattttctaagctgaagtag

SEQ ID NO: 310238 - DNA, 704 bp, Cannabis indica
tatttgtctttttatttttaattaataaaattaaaattaaaataaattaagatagaaaagaaaaaggtattcatatagaatcaaacagtttttgtcatgtaatcaatctcaatcacaagtttatatatataattatttatgataaaaattaaacacatatttttgtgtgtaaaagaagtgttacaatttttttgatatctctaacattactcaatttgtacttacatatccctactagttggtggaatcataccctaaaaaagaagtataagttcacaaatctccaatatcaatcaattaaaacccacaaaactattttaaagggcattaaattgctacattgtttttttcttaccctatactctacaagtacaaaatatgtcaatgactcaactataactaattaaagttttaatcttcctttttttttcttgtcttttgggaataatgaccaaagtctaaccgttgaagaatattgctaaaagagtacatacatacatacatatttttatatatatatatatatatatatttaatggtagtagtagagtagttgttcaatatttaagctattctcaaatggggtattttttttttttcattttgatttgttgtctctccatctatctatccacatgcacttcctcttgttgcgctttataatatttgtttttacaaactgtatacatacatacatatatata

SEQ ID NO: 310239 - DNA, 1141 bp, Cannabis indica
aaaagaagtatgttttaattaaaaaaatgtaaagataaatttggttaattcattaacaaaagaggcatttttcaacttacccttttttaaacttcaattagtatttggtgttaatttcttttttttttattctttatctgggccaatttgatgtgagcttttcttcccaaaggcccattattaaatccaatgtaaaatatgagcccaatctaattaacccagataattaacgtagctccgtgtcgtttatctggcactggagagtggagagcttgaatagtttgttttggatttttttattttttttataaagtttgttttggaaatttgactggccttctttggtaacaactactggacttataaaataataaataatgaaaaagatttgaaagatttgttcataactgaatttgcattactttctgttggtttctcacaattcacaaacaccaatctcgattgtccctgcacacacaaacacaaatcaatgcagaaaaccacaggaacaacaattacaagaaaaatataaaacagaataaagaacacaacaccaagttttggaggttcaactatgatagatgaaacgcactagtcaaaacaattactataaaactatgagcaaatttctaataaatccatacagcatttgcatgtaacactctctaactcttcaaaataccttatcttcaaagtggtataaataaaaataaaactcagaatcaaagaaattacactacatacctatttctctaatcaaaattttacctaattttcccacaaacttacatatctatctccaaagaacataaatctattatgtttgaaattatgtgagagtgtgatattaggaaatactgtaaatctgtttatagccctaattaattcaagagaatcaaacaataacattaaggaatagcggaagcgtaccggagtctatagaatcgacctttaaatgatatttaattggtatgatcttccaatttgcatcaaacctttctctgaaactttttctcttggtgatggggatacaagagtgaaaagatacgatgcaaatgggaaccattacctgttatattaccaacagacaaaactgttggaaatattattgactatttctatttggcccctcatcaatata

SEQ ID NO: 310240 - DNA, 1225 bp, Cannabis indica
gtttaaaaatcacgtaatacccctctgttagttagggtgttacatttcggtcctttcattgagagcaaaaacaaaagcctttgtcttagttttgacaagtaagcaagatggttgtacaaactcaaaggggaggccttgctgattaaggcgacccaatggtgacaaatcccaatgtgcaaactcctggaaacacaagaggaccatcagggaaaaaccccgagcaggtaaatacacaagctcctactgtaggccacgaagtgacttcccctcttactggaatcacaccaggcgtacaagaagttggaaacaccagtacatcaatcgatcaaaccactcctagcaccggggtcctgtccactactaatactcaagggctagttggaggcaacactaaattccaaaatctacgagaagtacttgggctaatgcaaggccataatgatactctgcatcatgattaggaggacctccaagtagccacaaaccttgcattcgatgaacaaagacgttaattcatagaatggagggacctgtagatggaaattatgagcgcataacaggcagccattgatgatcgcactaggcaggccaccatgctaatgagaaaggcctaccaagttacaaatcaacaactagctattgtattcagtattcccttgaacggatcagaagggtatgcagttaggcataccgcacaaactcatagtggtcagccatctaatctaaggccataggtccaaacggtagacagtgagatcctgccagactatcccttgggaggaattacaaattccaataacttcaccactaccgatgtttcaggccaacctatcgggaaaacaagccagacaacgagttcatctggtactttcgtgtctaataggttgggcaccacacatgacctaagaactggtccaaatcacagaaggggcctagatggacaaaacattccactaactgtccaactaggtatccgtacccaagatccaattcaaagagatcccaatgtcacacaagccagtcaacaaaccgaacaagtttatccacttatgaaataatagatagatcaacttaaatatatggtacaaagcctgaccgacccaaaactcaccaatgtcaaactcgaccaggcacgcaaatctcccttctcgcctgaaatcgaagttcttgacctacccttgaagtgttgggttttatgccctaaataaaactctgtttcaatgta

SEQ ID NO: 310241 - DNA, 1632 bp, Cannabis indica
aataatatttaattaagttaaaatatttgctcatttttattaaaaataaaaaaataaaattgtttggtagtgtatggtacaatgtgttaaagcatgtggtaaggtatgagctttattatggtgctagagagccaaacctaataatactaatccactcataaaaccaaacctaatactatttcttttttattagaaaaaagaatctcgtggtgtagatttcttttcactctttcagtagtgataattttgggaactatatgccagctataagatcttatacctcattatattttaataagatcgttggtatatatttcgagagttcttgttccattaaaaatgacacctgaccactataacaagcttgcttcctaaaaggtctagtataatccctctcaataagaggttatggtggaatttaaactcttaattcaaataaggaaggatgctaataaaagtctctctattactataccatacaatatgtggtcaaaagtaatactattactagtgagtttggcttaattagttaattattattgttattgacttttttttttcaatatgaacttcattgtgtagtaattggtgagtggttaagaaaaaaaaaatcttacaatttcatgattttcatcatttttttagagttatttttatgacttgattatattattatcactaattgctttcattttttgtttttgctatttcttggattaccaattcgtgtgtttatttatttatgacttaatttaattttgtaaaatttgggtatttatttaaatggaccaaaatttgagcttaatattaaccgactacatctttgggtagagggtgtggattacgcatacctcttttttgaattactcataaattgaaaaattctaattgattatttttattttattttttgaactggattaaccttttaaaataaaaaaaaaaatgcatgaatcgattttaattattactttaataaaatatgattgtaaaaaaaaaatatttttacaaattttattaaatgttttttaaattattttataaaagtatttcaccagtaaaattatttataaattataatctaaaaaaattgataattttttagaatgcaatttgctaattatacttatattattaaattaattttatgaatacattataaattaaaacatttttatgcacaatcaaatatagaaagtgatattcctatgaatcatacataaaatttcgactttttagttgaatgaaacgaaaacataaaatagaaataaaaatcaaatcaatgcataaaaaattaataaaaaaaattattaaatttttctcattttgcattagagtatcattctttctatttcaaattctaatagtcattctactaaaataataaaaaaataattctagtagaatgtcatttcaatactttaaaataaaaccaaacaaaagaataaaataaaaattattttccttccattacatttcattacatcgaaccaaatgccacctaaatttctagaccatcaaattactcacttcagcctaagaataggaatagaatggaataaaatttaaaatgcataaaaaaaattgataaaaaaataattaatttttttttcttgttacattagaatggtc

SEQ ID NO: 310242 - DNA, 1339 bp, Cannabis indica
cggttcctatgaaggaaccgacgccatagggtcgtctagggtatatcatctgctcgatcgtcttcttcctccccacttcactcagccaacccagcaaaccagagagcaaaaccctcgccgaacccacctcctccccaccatatattttaaattattagacattctactattttcaaaaaaattctaaataaattactatacaaaaataattttacaatatatttttaaaaaaatacatatataaattaaatatttgaaactgaaatgaattattctaagagaaatgttaaaaggcacctgtagtgtcaagcaccttcttactcgtcaatattgttattggtctaataagtatcgtgttataatagtttttagggagtatcgctagtcaatatcgcaaagcgacacgtcttaagggtgctaagtaccactagtgccgaatagcaatcctctaaattcaataaaagtaaagggatgcggattatataaaatatattaagttacctcgccgggagctatggttactaccacataagatgaggtttgagaggagctgtaactcttcaagcggtttatctggtacggatcaatggacacgtataaattcttcagaacgacatcgtttgagccaggctctgctgacagaacaatttttgagcacttaatctcaaaatctgactcttttggactcccttttatgtaattctttgctgtaacatatctattcattacttccatattttcttgggctgcctttggtaataagtgagtgctagagtagtgtgtctatataattatatatactgcacaacacagaggttgaagaaaactaactttctttctttcttttttgcttttataaaaagatatatttatgaatagaattaatattagataaaacttattaatagaccgagaagaagacaaagatcacagggtaaagaggacaatttataaaggagaaatccaaaaggtgagagaaaaacaaaaaaagtttactcaatcattaaaaaactcttgacacaaggttgctcgtctatttaaatctacatatatacgtggaagaatttttaatgttaatgctatggtataagttatacagtggttacattttcattagtttgtaatttggtatagatggtctcaatctaaaatttttaattagggctattcattgaaacaggaaaatggcaatttaaatttaaaccgccacaatctgaaccacactgaaaaccgtaacagaagaaaccatttttggtggtctgattaatttcgattgtggttcgtaataaataattaatggttaaaccggaccagaccgtttataataaataattgattt

SEQ ID NO: 310243 - DNA, 1318 bp, Cannabis indica
acaattaaaatatattttacaaatactcccaaccctattcagcaaaaaacaaaaaagaaaaccctgccaatcgccgccgccatctatgcccggaattgagccgtcaaccacgaacctcgtcgaccacgaaccatcgtcaaccatgaacccacagtcaaccacaaaccccacgaagcccaagagcaaatcagagagagggagagagagacaaaccgaaaaaaaaaatctcaagatatttacattgaaaaaaaaacttttacgatatagaaaatatgcagattcatagtctagaaattcctacccttgcaaacccaagcctttgcataccaccatctatggacaccacgaaattcccatctccacaaccgcaaactgcagctaaagtgggacgtcgctttagatgtaggaatgttaagcacgattaagaccttggagctatttagggtcaaaagttgaaagagtagaaagggatgaagatggaggaagagattgaaaggaggaggagacgttcttagactaagagggcggcttgttgaaagaaattaagagaaaaattagggttttatttaggttatgtatgaaggagagagaaatgatgtttttatttaaaaataataaaggtaaatgaagagagaatatagagaaataataataatataataataaatataaatggggtatagtgtattagtgcgtgagaaaagaaattaagtggtataatgtttttaattttttttttatgagagtaagatgttttaaattaataataaaaatactttatttatcaagtcaaataaatataaagtatcatgtattctttttctttttaaaataataataataatacaatataaatgcatattaattatgtataaaaagcatacctattataaatggattttatatttgatatcatacaatttttttttttaagaaatgtcaagtccaacatatttggactagaaaactcctcaaaatattttcctatagtccaactttagaaaactttcaaaatatttttctagtctaatatagttggacatagaaaatagacttagttttaaaaaatatatatatcaccccactacttgttttctagtccaaaattattggacatgataattttttctttcatgtctaacaatgctggactagaaatctactaaaatgattttatgtctaacactatttttattggacatgaaaaagggacataaaaaggttcttttgtagtagtgcactctctcgtccctctctctcttccctcttgaatggttgtttctcggtgggtgttggtggaaaaccgaagcacaaccca

SEQ ID NO: 310244 - DNA, 1622 bp, Cannabis indica
atcgataaatagcatggaaatacattaaagatcaagaaaacactgaaaatgagattcttgagaaaaataccacaaaaaaggtaggtcttttcctcaaaacggcacgagattttttatgtctctaactgctaaaaatgatagaccggttttggaaaaacggcttgccgttttttcctacataaagataaaaaaaaaacttatttctcttagaattctatcccaaatctcttcaaatgctatacaccacctaattgagccatacacaacatattctaagtggaaaaatcatcatcaagcttgtaaatcaaaaattatcattaaaggtccaagcttgagattaaaaacttaactcaagcttaaaccttactacaggcaacaaaaatcactccaaacaacttcaataaccttaaataactgcaaaaaataaacctaaacacccctaacttgcacagaagctaaaaccaaaaaaatattgcatgaaaacctaattttactttgaatataatgagaagaatgttagcttgatatggctaaaccaattccttaaattataggattaaaagcctctaatttatggtctaaattgaaaataaaatctctggtttgttgcccttagcttggctggacaaaggaagaagaaggagatttctaactgctctcttatttaactttgataataatcacttaatttattacttaatacttttaactattcagccaaaacttatctagagaaagctagatcacactaataactatttctaaggttaagggtaaatgacacatttgtccttactttaccatgaattattctcaacactttaggctaaaatggaccaaagccataatcttgaataatctcgacattccagatgtctaactgtagtgctcctctaaaaccgaggtacataaccatatttaagtgactctataggccaaatatcgtattccattattaccggacataaaaatataaaaaatatgaaattttatatataacgtaattaatacacttagaattcaaataaatctcctaaattgagaaattattttcaaatggcctatttctgataataagccctattttttactaaatagcacataattatatattaataattaaatccttaattatttgctaatctcaatgatttaactgcacgttcattataattttctcctgttaaaaggattttgttctcaaaatctaatatgaataactctggatattgagccctcatatcgaactcaaattcccaggtagtttcctccagcctgtttctctatagtaccttgaccaatgatatggtcttgttccgaaggacttaatcttttgtgtcaaggatttgtactggttgctccttgtatgaaagatctgttggaaaagttcttattacaagagagaataggaggattacaatcaaaatactcaaaacacaaataaaagtatttcatcaagattacaacaaggctagagaagaagaagaagaataacacacaaaaagcttgaccaaggctcaaggacctttgtcctaaaagtcatttcctccctcatatggacacttagggaaactctagaaatgctcttaaggatttatcaagcctcatatgctcagcctagt

SEQ ID NO: 310245 - DNA, 761 bp, Cannabis indica
tcaaaattacacatgattaacaatgtggcaatccacaaacggcggcggtacttgctcgaatcagaatagctcattgtttaactgaagggcatgttttgccaattataaactgcagaaatcttgtcgtgagccacatagaacaaagttgctttcgaaaatttagacaataaagttataatatcctcaaataacactccaacatgttttctttgttgatatctaaagagccaaagtttcagcttgtaatattgaaataatacttaaaaaacaggcaattccaaaaaaacaagtattagaagagacaatccttgaaacaaatttatcggcaaagtttctataatcgtaactaaaaataacaggtacttaacaactcgtgtgatagttaaagaatgtgttggctttattaacattcgagttgaaatcagtatgaatgttttgcagaagcattttcagctcagattgtctctaggccattagctttattcttattggtcaaataccaagttagcattttgtcttctattaggcacaccggtactcaaatgtgttttaagagttttatacatctctcaatttttttagtattactatgcccatatgaatatgataaaccatatgttgatattcatgtgaaagcctaacaaccttggttagaataaatactaacaaaaaaaaaaaacaaaaagctcttttcatatacacaagaaaaccctgcaatccacagcacaaatttgtacactctcactcactctctctctctc

SEQ ID NO: 310246 - DNA, 598 bp, Cannabis indica
tataacagatgatgcacttaaaggcattttatgtttattatacaaataatcaaagcataacacctttatatagagctggttgttcctcacattccttaccgcctttactttcaaaaacctgataggaatagtttttatttaattttttaaatttattacataaacaaaaaacatcggtttgggtacacatgtcgattatgactcagcatttattatatgaaaattattttaattaaaattaatatattttttttgaaaaagtattactcattaatgttcaacttattaacaatctgaatacatcaattattttatcatcaatttaggttaagttgtagattgttataatttcttttgtagcttgttgctttggatcacatgggaggcaactcatttgattggtgatgcaaggggataagatgcagcatgtgctagggcatcaacacatggtacgctggagaggagatagtttgggccatgtgtgcctttaggcctttgagaagagaattgcttagaggaaattacactatatgattttaaaaggaatttttacattaatatacataattacaaaatatttacaataataatcttagac

SEQ ID NO: 310247 - DNA, 700 bp, Cannabis indica
gatttctacttttttttacaaaaatatggcataaaaaaaccatataaatgtaaaaaaacaaaaaaatccataatcacttaactttatttatttatgccataaaaaagtaaactcttaaaagtttctcatattttgggtaatttttactatttatataatgtaaaaattattgggatccatcaaattgaaaagaaaagaaataaaaggcagtttgcaatttaagtgattcacgcagagaatgtgccaacttctgtgaaagctgaaatggaggaagagtgtcccattccaatgaaattgttatctctcaagaattgtcccactctaatgagcttgcaattcagtaatgttctgtaatttgtggggtagtgtcttctctttctctctctcgatctctctgctcatcactttttcttttattacaaatgagtgcttcagcaatacctatcaagttttgtcacttttgcaacccccatatgacactagagttaagaagactgtctcctttgtatttaagaaccgagtaactctttggccctttctttttgtttcactctttcctttttatatttttctccccaaattgtgaatattttactcagagcattgttatcgggcactagtagtgtctaacacctttaaacatgtcgttttgcattaaactatatgagacccgatacttagttggaccaatagcggtatt

SEQ ID NO: 310248 - DNA, 685 bp, Cannabis indica
atttctcataaaccaagaatttagttatatagccacattttatatagaatagatatatatttatttggggagcataggacaatctttaatgaatgatgtggaatttgtgctaaatttggctaataaatgagctaatattatatttaagagcatttcttttgaacacttagtccgagcatttctatatagtggcgtcctacgattagttagagatattctctaaaagttattttcttaagttatatgagactcgatacttaattatactaatagcggtatgacactgaggagagtatgccttttagcaactctactttaatgtaaattaactttatttttaataaaaatatgtaaaaaaaaatcaacaaatacattaaattttaattaaaagtgtataaaaatcttactaaatatataaataaaatgtaaaagctattaaaaccattcatgactagcaaattaaaaaataaaaaataatacttattatgatttaatatttagcctatgctatattttgtatcaaattctgttaatttttagtatgtgtaaaatttagaccatattatatattattattggaatttaattttatcaacataatccaaaaaataaatagaacaatttacggtgaaattctttatgttttaatttttatatacttaatttctttacttttttttttttt

SEQ ID NO: 310249 - DNA, 2720 bp, Cannabis indica
taataccacatatagttttacataaaaatattgcataaaataaaattcaataaaataaaatacaatacaatatgacctaatacggcattccaaacgagtcctaaaattccaaaataggaactactaatatcatccctcaaaacttacatgattaacgatgcaaaaacagaatccactcaactataaaataaaaaagacaatcattgtcataaataataatcaaaaggaagttgtacaaataaactaaacacattaagaactggtggcttgccacttcttgtattacataaaaatataacttgggttgggcttaatcacttgttggaaataccaatgccaaactgtattcatacacacacatacaaagcaagggaactccaatgaacacacacgaaagtacttcatagaaccaaaagcacaaccacacaaactaaagttgagaaaaatttagttttattgattttgagtaagctttacaagctgagaattatacttggttctctatctaagaaaatagagtctaatagtatttatatcaatctaaacactaaggaggaccaactgtcatgactgtcgagatggcagttatgacagttgggcttataacataaaaccaaaagcctacacttgacagattagatccacatttcaaggaatatgatgtagtaattctccaccttgaactgataatgtgtatcagattttagacaaggaatctgaaatttttaagattctaagacagtgttcaaattttgctacaggcagtgacttaataagcatgcctgcaacattctcttcaatgctaactttgacaacttgaaccttgccatttgataggacatcttgaatgaagtgtaacctaacatcaatgtgcttagttctctcatgaaagacttgattcttactgagatgcgaagcactttgactgtcacaatgaatacaaacagtctcctgatcaatccctagttcccttgttattcctttgagccacagggcttctttgatagcttctgtacaagctatgtattctgcttctgtagtagaaagagccacaatagcttggagattagatttccaacttattgtacactagtttagcataaacacatagccagattgtgatatcctactgtcaaggtcaccaccatagtccgagttcacatatcctactacatttgaggtattagaacatgttccatatatgaggccaacctcaggtgtcttctttagatacctaagtatccatttggttgctttccagtgctccacaccaggttgtcgcataaatgtgaccccactcattgcataactatgatctggtctagtacagatcataagatacattatactgcctacaatgctagtatagggtaccattttaatgtagttaatatcttcttcattggatggagcttgagaagtagatagcttgaagagttgagtagagggtgtgctaacaggtttcacgtcagtgaaaccagatttagataaaagtttacagatgtaaccactttgtgaaagctttaagcttatgaactttttgttccttgtaatctcaatccctaaaattcttttagctgagccaaggtctttcattttaaattcctttcttaaaagcttcttgactttgtctttttctctgatatgttttccaataattaacatatcatctacatataggagaagatagacaatataacttgagtacctaacataaacacaactatcataggcacttctcataaaagcaattctcggtatatattcactgaatcttttgtaccatagcctaggggactattttggccatatagagatcttttcaacaggcgaacatggtcttcctttccctttcttcaaaaccttttggctgcctcatgtagatttcctctttgaaatctccatgaagaaaagcggttttgacatctagttattctaattcaagaacctcaatagctaaaatgcttaaaagtaatctgatggaggtgtgtttcataacaggagaaaaaacttcattgtaatcaattccctttctctgtgtgaatcttctagctactaatctggccttgaatcttgcttgttcaattctaggaataccttctttgtacttgtatacccatttacagcttatcaccttacaccatactactttctttactactatccatgtgccattcctccttaaggataccatttcttactccattgctgagttccattctagcttgtaaatggataccatagcttcttcatctgatccaggtccctcaccatcaagttctgatatatttagagcatagaagatttaataatcatatccaaacctgtttggtggtctgatatttctcctttccctatctctggttaattggtaatcatgatgctcatcatcattcccagattcttcactagtttgttcattaattacctgtttagcttcttgttcaaaagtgtcatctaccatctgaaccttctcagtttgctccacctcaatatgaactctctctttgatcttattaatagctatgtgtgaaccattttcttttgaaagatccttgtacatggtgtttcatcaagcataacatctctactgatgaaattagtttgatgatttccttcctctatgctccacgttttataaccttttactccttcagggtatcctagaaatttttttttttagctctaggatcaagctttccttgtttgatgtgagcatt

SEQ ID NO: 310250 - DNA, 2008 bp, Cannabis indica
tggtaaaacatattccaacaagggacttctcaagtttaagtaaacaatacatataagaaattgtaagaggtcaaaaaggaatgatggaaattaaatttaattaacgaaaggatgaaaggaaaaaatacaattaggaatgataagaatgcatttactttctgataatccactatgagcttatctgaatatatataagttaatgtttgatgaaacaaaactaaaaaatgaaaaccctctcctgctcctcttcgtgtgacgagaaccccacttccaccactcatttttcttcattttttcagccaaaaacctagtgtttctagtgctattagtagctgggtagtgaatcattgaagaaggaaagcttgaggtaagaatcgatcctctttttaagttgaaaagtgaagttctatatgttgactttgtgttttagaatggttgtgagatttgtgatctcgaggttttgtttttgtaataataggggattggtttcaatatttacttgctagatttgaggtagttttgaagtagaaattgagtttgagcttttaaagttcaacgctcgagctttaatggtattttttatttaaggactcattttttatttatattacgttgaaattggtttatggataatatatatgtgtcctgtgaagtttagaatcaattggttaggttttggtgggattttgagaagtttaaaattgagttattttgttcctgtgaaaaattgtagaccatttttggagcagaataaaacggtctgatgttttcagttttttcgagaggatcgaaattcgtattttggctataactttttactcgagtgtctgttttagacattctatatactgttttgaagcttgcaatgagctttataatatggtatatgttttagagccaaaatataagtttattttagggtgtttatgccacagaatttggcagaaaaccctaagttatcttatgcaaacattaagcagtattttgggatagacacttattggtttaccgttgttgcgacatagggctaagatcatcagtaatgtttctctacttgggttggccgacatgcatgaatttggattaaaagtaaaaaaaaaagtacattgtactacatagcatgttatgttataatgcaattattattattgaggatggatggatattaagattaaaacatgattattgccgttatgtaatgaaaaaaattgtcttattaggcaacgatgtaaaaattttctgattagacaatgatgaaaaggttgtcttattaggcaacaatgtaaagattatatgattacaatgatgaaaatgttatgttattagacaacaatgtaaagattttctcattagacaatgatgaaaaggttgtcttattaggcaatgatatttggataccaaaaggttaggtatcaaaagtcatgactataaacaaaaataattgttaggtctcctacttgttgattgtctaattagacaatgacagatatatatggatgtcgagttaaggcattggcattgcctgattaggcaatgagacatgtggatatagggttagagcatcaaggttgtctgattagcaagcacagaaaatagttactttatgaggtaatgatataatttatattattaaatgggtattagtatatcattaaatgtttatactgaggttcattttggatgaatgactgtattgacttagacttatgcatgagagtaatgtacaaacgttgattatgaataccatatccaaaaatgaatatgacttctaatattagcacaataattttatattattaaatatctttatattgatgtttgtttgcaactgatgatagtaggtaatttagatttcatcatataagtaatgtgtaatcatctgatcctgattgtctgagtataaataataatattggaataacagactatatgattgttgttattattttcttgctgagtcttttgttggaagttattttaccaggaacttagatctactcacaagtat

SEQ ID NO: 310251 - DNA, 1120 bp, Cannabis indica
gtgcaaaacgtgacccagaggagagcgaagacagtgagaagaactttgcagacttactggcagaggagctgaagctaagggaagctgaatctttggaacatcagagacgggcagacatggctctacttgaggctaagaaggtgacatcccagtatcaaaaggaagcagacaaatgcacttccgggatggaaacatgtgaagaagcaagggagaaagctgaagcagcattaactgcccagaagagattaacagcaatgtgggagcagagagctcgtcagaaaggatggaaagaaggaatggccaagtctcatgctcagactcaaggaaatgtccagacagcatagaagaagcaccatatgacattgtgtggaacaacagcctaaggctgcattcacagggagattgcctccaccggtactacttttcacctacaaagggagttgtatcattaaattcaatatgctatatgtttacaaacttagaattatatgttatcaccatctcaagtcaaaatatagaatctttgaagtgtcatcatctatctcgccttctaaaagcaatcaatttttttttttgcaagaccaacctgtaatcttctcattcaaatccatgccctaatgaaatttccacttgtaatatcttggctaaaaatgaaagcccctttcactttattgttgttgaaaacgaaatgtgacaagctacattgttttggatgtctagtgtttggtatgtattacacccttagtctcgctgagcaacatagtaattagcatgtgactcgatgtaatacttcagcacctgtattttcaccaataccgtctgttttttattattactattactctaatagtgaggaactctaaaagttgttcactatattccataccactttttaattaatttttaattaagttttataattatatatattctttcgaaaaattggttgatgaaaaataatgtatactgattgttcattttggacaataatatttataggaatatgattttgtcctgtgatatactttcacggaatgtatttcggggtacattagatgggtctacattaaatgagtacatttccactttttaaccctaattatccctagatcaatttcag

SEQ ID NO: 310252 - DNA, 1113 bp, Cannabis indica
agaaaccatagatttcttactgttgttcctccatcgttgtcagtcaaagttccaccgtcagccgtcattaacttccagcttgctacctttgtgtaagtttcttgggttcatactgctttcattattcacttgcatgttagggaaaagtttatggtaatgcttttagttgaatcagatttctatggtgaatatgttttggtgaagtctatcatatgtcgtagttccttgtctgtattccgttgtttctttctaatttgcgaacggctcctccacttagggacagtctagagcatgaaacaattttcatgcttaggctcttcctttttcttttttctttctttttaattttctctgagttcactgcttttgggatattttcacccgatgtttgcctaagagaatcgttggatttctcgttttttggacagacattcggaggggccctccttccagcggttaggggacccccattccctccttgtacgttagggtttggtttgggggttaactgctggatttctctttttcaaatgagtgagcttctaaacgacctccacgagcacggttttttcagcttcgatcaggaaatttcagagttttaccaatctcaaggaatgtctatccctacgaccagagcgaagtcctcaggcagagggtccaataccatggccaccctagaggaggtgatgaaagggcccgtggtccaggaaaagtacacttatcgatccactagcttggaggcagacgagttcactcaactctgacttgcgcccaccaactagagaagattgtcacagttgccaggatcaggccctctgcttccagagtcttccaccgtcttcccagagacgatgaaatgcccaaccgtaactacggcggctttggggcttcgagtcaaacccacctcatgtccggggctatgttaccattcccggattattttatagattttttagtttttgttggcctcgtgccttatcaacttatcccccaagcttaccgcctactctcaggcttgtacattttctatgttgtcagggcctgctccgcccaactcggttgaaattctctattttacgaagttttatttgtccccaagaagggagaaaaact

SEQ ID NO: 310253 - DNA, 1537 bp, Cannabis indica
ttttgtatttttctgtttttttcccaaaaaaaaacttagttagctaacactaatttaagagaaggaaaaaaaaagacagacatataaggaaagaaaaaactttatgaaaattttgataaataaaaaacctgtaaaaaaaatagatagaaatagtatagatataaacaaatctaatataacgtttttttttaaaaaaatagcattttatctaaatgttcaggtttttttttaaaaaatactattattttaatttacttttcgtcctcttcattgaattattattctttttgacacttgcatttcatgataagacgcgatgatttaattgaacatatttaaatttaaataaataaatgagtgtatgtagtgtcacttattcccattccttttctaatattgttccatagaaaaattttatttttaaatataaataaataaagtacttttaaatgcttttagattgcttttaaacaaattttattttaggtaagaacaaaaaagccaacagaaaatgtatgcgcgtggattcacgaacttaagttttatttatgtaaatattaataattaataaatcataaataattaaataagaaaggtgagatttgaaatattgaagtatgtgagttgggttggatcaagggaggtggtgactggtgagtagtaaccgttgggaggtcgccttcccaattagccgttagcggtgccagctaagaatctgcttatgttaggtccggatccaacatattctcataatctttaaaaataagggatccaaaattttatgtttgtaaaccacataaatacaacgtttttttagcggcataagtatctaatatttataaaactttattttttttttatttcgtgagtacaaaaacttcttttttaaatttattaaaagaacatttagaagtaaccgatactgcatatttttatctagacctaatgataaaaaatttaggccttgtatatgccctgtttaaaagaataacagagtctgtactgacgaaattagagaaaaattatagttttgcaaatattaggtacttatgtaactaaaaataaatattgagtttatgccgcttacaaacattaaactttgagtacttatgcgttatttacccattaaaatatataaaaaaagttttggctcacattgaatttttcataaaatcattatttattatattttattttttaaagttttttagaacttgaaaatatttggtagtaaagaaagaaaatagagaagtaaaataggtaggggtgcacatgggctaggttggctgggttagaggtattttaataggccaacccaatgattgcggtttggataaggtataaaccattcaattttttttattgtacaacccaaccctacttagtacaataatataggggtggggttgggttggggtttcgattgggttggtaaatgaatattttaaacttttaatatttatgttacaaacgggagtaaattaattcaacctagtgtatacataaaaaaaataagatacatatatatgtgtgtgtg

SEQ ID NO: 310254 - DNA, 1711 bp, Cannabis indica
ttttttcttgttttttttttcctgcttttctctttggatattccacaaacttccaatcaataattgaattatctcttttgcactggatatccagttgctctgatcttgtttcttgatggatccttacacgaataagatgaaagactctatgaaactaacagtggatgaggaatttgttttcgattttactgatatggcttttgttgataatcatgctgcttctgaccatgtgttatatgccaaggttctcactaacaaaaaagtatagctttccacctttaagaaccaaatggcacaacattggaatggccggttccctatcacgattactgagtcttctgaaatgttttcactaagttttggttgcgcaggagacaaggcaagggttttacttagagagccatatcactttcaaaatcatcatatcgtactgcactcgcctatgcctggatagaatgttcactctggttccctcatcttcactcctttttaggttcagatatacaagcttccttttctcagcaaaactaaagggctggacaaagctcttggtaatatcattggtgagtatgtggatgtctatgaagattctctcaacgaggggtggggaccttttctgtgtgtcagagttaaaattgatacaacaaaactattgttgaggggtagaattatcactttacagcaagcaaaggaaaagttttgggtaaaatgcagatatgaaagactactcgaatattgtatggagtgtgggcgtttggggcatccttttgataagtgcctcatttatcttaaaaagatggacaatggtgaagaaccagatttggaatataggcctaccatgaagggtttaccactaccaatttcaagttatgaccgttatcgaactgacttctcaaagggtaatgcttgaccattactcactcgtttggccaaaaattccttaatctctgcaattccaagtttgaaaaatcgagatcctccacatccaagacaactgattagaggcaacctccacacttgaaaacacatgtcggaatatttttttttcaatttttttttcacaggagtgttcgttatgcttacaacatcatccttgtaaatttttaaaaaaatttcgaatagtttacagtgccaaaaatatgtttgaacttttttgaacacgcgtggtaaactggaatatcaggaactctattttcggtactgtaaactattcagaatttttaaaaaatttacagggatgatactgtaactataacgaataccgctatgaaaaaaatatttcagcatgtgatttcagacttggaggttgactaagaggttgtaattagtatttctctacaattaaatatttgcaactcgatatttatattaaattagtacaaatatactataattcgattaaactgaccgatgtacactcctacttagtaattactagtctacgtggcaattggtctcctgagccatataggcaaataatggaatcaggtgaagggaggaatattttttactaataggttgtagcttaggtagttttatcgtcaaaatttaggaattagagttagcaatttccccaaaaaaaaaaagaattagagttagaaattttcatcaaaaaaaaaatttccccaaaaaaaaattataaaaaagaatgactagctgcaaaacgacaagtaatttgagtaaacgacaggaaaaggttgcaggcttctct

SEQ ID NO: 310255 - DNA, 2478 bp, Cannabis indica
agacaaattaagaaaatccccagaacacccaggaggaacatcctggggaaactagggatgttccagaagacgaacaacagaataatcaaacacctcatcaaggagtacctcaaagaccccagggatttacgaatcaggggaatgaaaacaatgacgtgccagaatcttctcgtagaaatgataacatatggcatcccagaaccagggaacaggagatcgcttgtaataacaagagaaatccttggacataacctaggacaagtgggttaccacccagacacccccagcgtccttctcaaatcgaaagggatgaggcatacacataccccagcagaaggcgtgcatctaacctttccttaaggagaaggcctgtgcaggacgaggaaagttctagctcgagacattcaagatcccgagagcacagtcgatctggaagacattcgcgaggaggaggagataaacctctccgtaatgatgatcgagagagtatgagtaattcaaggagctgccaatctaagagttactcagaaacaaggtctgtgagtaaccatgaacgaagataaccagatcattgtgaacatttaaccgaagacaacctgatttacgtgagcgctttaatcagaatgcacctaatttacgccaataactcaatgctaattgaaagcaagaagatccaatccgatttacaatcattgagttggaagataaattcaagagataccaagatgaggaatatgagaaacgacctggttatgactaggatgaagaacccgagcctttccatccagacattatgaactctgaatttcctcaaggattcaaaaaccctcacatatcaccgtacgatgggacttcagatctatcacacacctcaacaaattcattaccataatgcgagccagcaatgtctctcatagcttacattgtattttattccccacctcgctaactggagcagcaagtagctggttcaataagtttacccatcattcaattacttcttgggaacaactgtctaaggatttcaagaaacagtttcaggcagcaagagatagacaacttgaagcatcctcccttactaacgtaaagcagcaaccaggcgagtcacttaaggcttacttaagttgttttagtactgccgctgctaaagttagaaacttgaaggatagtattcaacttactgctcttcaagcagggatcacgactgacctctcaactgttggacgcgcgctgtgggatgatttacaaggtcgcctagtgaggaacatcagtgagtttaatgaaagagctcaagtgttcatacagaaagaagaagcgaggaatgagatgaaattgttaaagactagctcaagaaataaacctagcactatcacagcaagcattgtcttgacaaaggctgaaaaatccagctggctctaacactaagagaaaagatgactctagggaatcagccaaagataaaaagaaacagaaatagcacaataagtatgtgctgatttacactatttataccgagcttaatgaaactcgagaaaacatctttctcgcacatgagcacaaggttgcatttcgcaagcctgagcccatgagacattcgagacacaaaagggatccaacaaagttctatcgatttcataaggacataaggaatacaatggatgaatgtcgtcagttgaaagacgagatagagagccttatctcgcgcagctattttcaacagtatgtaaaatgatagggtaatagacaaaaccagccaaacccgcccaataacccaggcaaccaaagattataacctcctcctgtggaaggagaggacatattggtcatctcgagagggtcgtatctcgctggacaaagcagtaatggccagaagagatatgtcaatgaaataaaaaacaagcgattagttttttctctaaaatcttcttaaaatgtcaggactgaagaacctacaattgtatttttggaggaagacacaaagcacgtgaggtatccgcacgtcaatcctttcatcattactattcagttcgccaacaaaagagtaaaaaaggtattggtggataatggaagctcagtaaatatcctttacaaggatagggcataaaatcccaacaaaggctagcttggccagacggtcaaactttgttgtatacttagtaactgacataccctcagtttgcaccaacttagtgaattctttccacttagcactgtgaacttcttcattgtaatacttgacgttgaatatctctcggaactcttcctaggtcattacagtgacgtcttgggagagggacactaactcccaccacacgagtgcgtcttcctggaactaaaatgtggcgcaggtcacccgatcatttccaactacccccatgaaattcaaaattcgctcaatcactgtgagccattgctcagccttcatcacattaggacctcccagaaacactagaggttctttgtaaagaccgcttagtt

SEQ ID NO: 310256 - DNA, 878 bp, Cannabis indica
actaattaataaatattagaaattatttcgtgttgtttggttcacatgattactctcgtaatcatatgtttaatatataaattctattaaattccaaaaatatagttactcatgattatagtgttgtctacagagtaaaaaatattcataattatatgcttcaaactaatttatcggtgtactagatttacacttacgtgataatcagtgatgtggtttacttacactttgataagtggtatgtcttcttaagggcattagtaaagcaaacttgaataaaatatatcaacaatttatcagactagagtgatattgaaagtggaaaaaatataataaactcagtattatttatttttaaagccaatgtaacttagttgatcttaggtcaattgatctaaatcttgggatcgttaagctttagcttaattgtactatacaagttcttggacttgtttgttagtagctcacccgtaggactagcccatacttacatgttgggaatttagtagtgcaattgagtgggcgcgttaatcatagatatggaatctgtagcttctataactatttagaagtgaaacgatactttgcttagagcttggttgaacgatatagatggaagatctcttctttcagtagttataataatttaatgaaatatcatttataaggagctaagtggagatagattgcatattaatgtaagtgaaaggtctatgattagttactagtagctgcctacttccttctagaaaaatatcgtagtgataggaaaacttcagaatgatggaatagttgtgtacttagtgtataccattgtacttagtacacaccattactaaatttagggatgtcctcatcatgaacttaagaaaagctag

SEQ ID NO: 310257 - DNA, 1619 bp, Cannabis indica
aacttttaaaatcccatagtaaatgtaattttctctaagtaatataaggatagatgtgacttgtcttttgatttatgttttctcaagaacacacactcagttcttaaactgtagcacaccattatctgagatagtgaataagtctttagcctttaataagtattacaatgtaataacagttctgactgttagttagtgctagttagttggtttctctattatattttccttttccactgtttgtggctcctttcagttatattagttagaaggattgtcagtggttagcatatatatatatatatatatatatattccttcattgtaataagctaattaattcaataataatatcctttcttttctctgttttctcctttgtttctttcgcaacatggtatcagagccacttgtgatccgttgtgagcctaaattgccaccggtccaaaaagccgtttgtgatccgttgtgagccaaagtgctgccagtccaagtatatatttccgttgtctcccctttaacctccatttgggacctttcgcgctaatgtgtgccaatttccagtgttggggtctttgacctgtttcaaaatccacaaatttcccgatgtatgcacccacaaatttcctgatatttggccttgtgggattctttcaaatgtcacgttcgttcctgtggtctcttaaaggtcgttcgttatacccacactttccaagcccaaacgtgaggagggtgtattaagagttagtctcacattgctaatgtgtaaaaataaattgtgatatatatagaataatggactactcctctcattgccaattggttttgggctactcctcacattcagcttgccgacaccttcaccaagcctctttcttccacaatactcaattctcacattcacaaaatggttgtatataatgtatacagtccatcttgagggggttaataactattacaatgtaataacagttctgactgttagctagtgttagttggtttctctgttatattttccttttccactgtttgtggctccttttagttatattagttagaatgattgtcggttgttagcacatatatatattccctcattgtaatcagctaattaattcaataataatatcctttcttttctcagttttctcctctgtttcttccgcaacagccttgcctggtaaggcctctttccaataatgtagattggagtgttatattggaaagtcttcctaccacaaacttaataccagcctcggtcatgtctaaagtcaactgtggagaaatttgcatcaaactgtatatttgtccctgacctttctaactacgggcatcatctacaatgttgacctttctaatatgataagtaatttcccaatcataatgttttaccaactctatccagcgtctttgctcataaatctttatgagtgaaaaaatacttgagactcttatgatcaatgtatatctcacactttttaccgtataaatagtgtcttcactccttgagtgcaaacaccactgctgtcaagttatgagttcgatatcgtttttcatactcctttaactgtcgagaggcacagacaagcactacaaaaaattgctacttttagtgacaa

SEQ ID NO: 310258 - DNA, 1091 bp, Cannabis indica
tttttttttttaaagggttggggaagctaccaagacataaatgaaattaaatgcttattcttacaatgaacacaacaatcaaacttgagtggaatcccagcaaaatcaaatatgcagctataaatttaattagttgtctgcccccactaccattttgttttctggtctcaacttttttttttggggtaataaattcttgcaagctggctccctgatcaaaaagcatggcatttgcagcctttaccaaactctaagtaatctaagtttggtatataaattatgccatgaaatgagttacctttattaactttaaatacaggagataaaaattaaaataatatacatatatatactttaggaataagataaaatcaactctaaacttgggttgggattaaattgcaattaaatagtgtacattgttttcaaagtaaattgtggggtttagaatgatggaatctattctttgagacccaaaccattttttttacatgggtgatggacatggttccactaagggaacttaacaatcaatcttaaattaatggatgtagtttttaatatatatatgatgagcatggcatggcagccctgtggaccaatattctaaaatggttttttttttaaaaaattaattaattaaattaaattttgatttcaatagctgcagagaggtagttgagagttttagtggggctttgtgaaaagaagagagaaaacataaagaatagtgtggtatgagtaaaggggtgggggtgtctatggaagtggcaagcaccattgcccagaaccctaaaaagagaacaaaaggcctttaggggcccatacccttgtgttgtcaaaatttaagtgccataaacctcaagaaagtgtactacttaggcttaatccaatgttgaggattattactaggtaggtagggtatcttcttttaacttttaaatattttaattcatatttagtaaaaaaatacacttaaagaactacaactgctcactagtactctcctaccatttaagctctttatacttaaatactctcttcaaaaacaaaaccaaaccattgtccttggagttggtataaagtttctt

SEQ ID NO: 310259 - DNA, 1242 bp, Cannabis indica
cttttccctattcatcatcttgttcttccttctcaccatcaatcattagatcaactctactacaccacaatccaacctctctcttttactctcttcttcttcttcctttttcactttgtatccaaattgtagaaaattaaaaaccccaaagaaagaatgtgaattgctcgatcatcggttgcctccaaaaccctaagaatcttttttgacacctttactatgccgcaggcatgctggaggagcttcgctctcccatcagcgcaagagcacaagtgtgccaaaaggttgatgataatctcgattgtgtgccaatctagtttcgtcaactcgagttcaatcaactaaaaaatcgccctagaatcgattatcttcatcctgtttcttccccagggacaggctttaatcaggacatggagagttgatttaattgtttgatgtgaaacacttctctcacccaacacttttttcgttatgttcatgaacatttcaagccttaaccgctccgttccactcgaagttgcaacatcaatcgccattttaagcacaaaaatgacctcaaatctcatatctctctcactgctatagcttaaaatccaagccaaagaatcaataaaatcactattttcgttcacaaaggccttaatttcatcattaggagtctaaacgagacgtataatacgaagaacttcttcaattccaaccacatttcctttttttttaaaacacctaataagaaataaagccatggctttgtttactccacgggatcgaagtcactcaagagatctaccagcgagtgaccacgggatcgaagtcagaagcatgcagggttaaaagggttagcaagtttcatgctggaatgaggatcaacaagacgaagaggaccaccatattggaatgtgaatcgtcagggttagcaatttttagagttagtattgttggaattatattttaccagaatctagatttactaccatgtatgttatttaacatcctaaatatgaatttctaaaacaatgtaacataaacacatataaagtttgagaaaccttacagtgggtgcaacggaattaaatgactccttccactcagatctataacccttgtagtgcagcggaattaaatgactccttccactcagatctataacccttgtatcctttctgtagcagagtatcaccaagatctgtgctcgattctccttccttgtgtttggattcttcacagtcttacatactatga

SEQ ID NO: 310260 - DNA, 1321 bp, Cannabis indica
cacgctaaataatgataccatgttctctaggaaccagtgatatatcacataagaatcatactgaattttcataatttttccatctttataatgctgaatgtttatgaactaattgatattaaatatatttttattagattaaataaaagcttattacaaagggatttaattcaataataagagaaacatacacgagcaacaacatcagcatcaacaaccggaatgccatgaactttgaagagagttgaaacagtgctcttgccagaggaaattccacctgtgagtcccacaagcctcattttctttccaattaactctgctgtcctctgttttctcacagattttcactcttgagaaactgatgagaagaattgaaacaagcctgagcctgcagtgtaactataaaaaatgaaaatgtctttcaaaaacattttgacataacttggagcaggaaaaaggcaacatgggatgctctattgtatttaatttttcaacacctaactatatgccaaaccctcagctctattgtgtatatttttccattgtaattggcctattcaatgtaatgcaattctttctaactaagctagtcaagctagtcaagctagtcaaaactaactaagctgaactaactttagatagttagattaactaactaaccaaaacaacttaactaactcctactggcagaaagtaaagcaaacatacaagcctagactaagattctctaacacaccttaataacaaaaatcccaagtgaggtcttttatctcaaaatccaaaatgaagtaattcatctcaacaaaaatttcaagtgaggacgtcttcctcaagattcccaaagagatcattcacctcaaatgtcaaagtaaattaatttttttacaaagattcgaaattacatttgacttgattcaaaaggatatgtaagcaacttaggagctaagactaagtgcaatcaataatactacaaaatggtataaaatacaactctcaaaattccataaaaggtcattcacctaggattttttctaaatgttcaaatagcgaagaaattctgaaagtggtaatctactgaaattcttatattcaaattctaaaataccgcattttgaactacaagtggcttgattctacgtaaagaagatatgtaggcagctgagttagccaaaattactaagttcgactgcaattccaaattctctccaattttccccaaagtttacttcaattatttaatagcatcgcaattggaattaaagtgtgttttctttaaacaaaaagattatcataaaaaatcattcttataatcttagatggg

SEQ ID NO: 310261 - DNA, 766 bp, Cannabis indica
aaataaaaatttaatgattttgaccaatcaagaattaccacgtaataatttatttaataattaacagctagatacttacagaagttctaaaattataacttaagtaataagtattattattactaccaaaaattatatttaagtatttatttacaactgagaattaaatttaaatatttataacgcaaattactctatttttaaaaaattataaaattatattaatacaaattattaattattgacaagaaagacaaagtttattatgtgccaaattttaaaatatattttacaacacaattaattaaagtcacatttttcatccgtatcatacaataatttataaaacacgtttactattctaagcttgttaaaaagtcaaacttgaatttaacacgtttccgcatatatacaaataaatatcgactatatattatttataattcataataattatgcactttttttaaatagaagtaaaatgagattaagtatataatttattaaaattaaaagctttagtcactataatcatattttatatatctatattacatacttatataatttgaattagaagcgaacaacattcaattcaatctaattgaaccgaagcaatttaattcaattacaaaaaaataaatatttatggattgaatataaaaaattaaaatcattctcaaaatctaattaaaaactgattcaatatccaattaaatatatttccccttacggatcacgggactactgactgtcacaatcaccc

SEQ ID NO: 310262 - DNA, 2521 bp, Cannabis indica
gagagtcaatgccattctatcttttgagctctcactactgtttcatactttgtaaatttatctctaagtagtcaccgtgtgggagagtctaatagagacgaaaacatacaaaatacttctctttcaagatctttatggtgttaaattttcaatgtaagaccatctatctgggggacgaagtctagcgtctcgagatcctattaaaatgttaaccatgtaagaccaataatgcagatcgaatatccttataactaaagttcattattttaagggattgtattttcatttgatacatattttaatatatttattttaatttaatatatttatttaattaaaattaataatttagataactctaaatataaattataatttaatatttataaattatattcgaggaaggttttagaataaaattttattttccatccaattaatttcaataaatatcatcaaaattacttaatttaaaatggtcaaaaattaatcaactcatttaattttccatgaatatgtatctctaattaaatttaaaatccaatacatttgaaaaatacatttttgaattacattaaaataaaataaaataaaattggaaaaattattctaatttatgttgatctaaaattaaataaattaatgttatatcggaaattcgacaggtacttcagaacacgtgtcaatcttaggaactatgaaccagaaaatataatgtcaattatattaataaatattaaatggaataactctttaaatgcataattcaatagggtatatttataactcgtagaccgcacagtctttagcaagacaaggatgtacgaactattgatttacgtattcacgaaaaaccatttagcatcagaagacgtaatcgcatggatgacatcgataatacatagcaaggcatctacctcgcaatatgtatagatgtgttgacaaggcgagttggctgataaaatacttagcgcataatatacattgataatggatactgagacatccatctcgctataggaaggcatgctcctggtaaactccagcttgctaccagggttattgttgttattgagaacccccaagacattattgtccagtctgcgagaccttatgggcaaagagaagcccttaagtttgcttagtacactagttctcatgccattgttggaagacttatgaataaaccaggttattcatgtaccaagcgagacgccccagcgagatacgctttgcagcgtgtcttaatccacatcattgttgaccctttaaaaacggtataaatcatagttgtgtgattttcaaataataactgtatttatttacgtgaagcatcattgtagcccacaatttcgggatgatatcattgtgagattcaaatttgattgtaattaactgccaacctatgttattataaataggggcagaatgtacgaaaaaagggatggaaaatccttgagagaaaaaagaatacactgattgtgaagattcctagttttgtatcagaaaagtctcaataagattgacttgtggactatgtagagtaaactgcaaaaccatgtaaaaacttggtgttatttttgtttctatcatttttcttagatttctataatttttgtgctaaacttataatgaaaataggctcattatcgttaacaaaaatttgcattaacagtttggtgctttcattgagagcctacgtgaaaaaagcttagaaaaaatccctccaaacaaaaagaaatttttttctccatggctgataatggggaaaatgacaacactcatcctgaagatactactcattgctctggaaaagagccagtgggctcccataggccccttaattcacgaacaacaaaatctacacggtcaacatgttcgagaagtagccaacgtgacagtgaccaaaacccagaaactaggaatgaagaacccaattccacaacgagtgagggtgcctatgaccccaccagatatgtaccgttggttgagttggaaaattgtcaactccgtcgatgtttggaagaggcaaaccagcaaaacgctgagttggaacgggatgcagctccagccaaggcagcacaggaaaataacacaaaaaaccaacctgattcttgagtgaggaggcgacgaggcagacctcgcaattcatgaaccaagtggtaggaaaaggcttaggaaaaccaccaaaacacttaggaggagcaacttagggaaattggggatgcacctgaagatgaacaaccagatgaccaggcacctcgtcaagaagtgccacgcagaccctagggatttacagcctaggggaatggaaatcgtgatttaccacaatcctctcgcatgaatgtgagtagatggcaaccacggacaagggaacaataaatcccttgtggtaacgagagagatcctaggactcaacctaggataggtgggttgccaccgagacaccgtaaacatccttcttgaactgatagggaaggggcacatgcaaatcccagcagagggcatgtatcaacccgtt

SEQ ID NO: 310263 - DNA, 2992 bp, Cannabis indica
ttgatcgtcatgtcgcactgtctaattaaaataaagctcgttcttccagaagctgcaatctcgtatcattcttcttggtgaacagtgatgtgaatgtatctcatgcttccttcggtgtctttgctggcttgatgtgctctagcatttcattttcaactatggtctgtatcgcaaagctttaatcttccatttctttaaagtggtttcatccttcggttgtgtgactttgttgccaccaacgatctcccacaagtcttggccttggagatatgcctctatgttcatagaccacgtgttggaactttggttgctaagtttcttaattccgcaccacttgaaggtcacccatcgtgcaagttctgtagtactaccacacgcgatcactctaaaaaacttaaccaaggactctttcagaatgaacttgattcggctctgatattatttattgattacgacaacacgtgaaaaacgtaattactttattattgaaaaagtgattgcaccaagacttaaacactttatcttaataacaacacaccaagcactcacaattttattttctactaaacacctttacaatacacctatatgagtcacactttgcaacactttgcttaccactaactcgtttggacacactttgaaacacttcttgttggatgcacaacttaggatccaaggtccctatttatactactcaaaagccaattataatatcgtagaaacttctacctcattgtgttaataaaatgaagtttccacaagaaaaatatttttaattacttttattataataggcttgacctctctaaaaaattctacagagttggtgatgattcttcaaggtagtttgtttttagtttcgattacatcttgtagttgatatataagcttgtagtctctaaatttttcaatcaacaaaattaatcactctttctattgcaaagacttaacgtcacatggtatgagagctccaatcgttctttaatggagattcgtacaaaagaaaccagtggagcatcaagattgaataattctcaaccacagaacaatcaacaagtcctactaccaaaatcgtatccagactctttcaatcattctattcaatcaagcttgacaaacataattttctcccatggcaacatcaagtacttaccctgatcaaaggcaatcgtcttcacaagtatcttgattccactcgaataccaacaaagttcttgactctcacagatgaaccatcgggcaatgtcaattcaatgtttgaagattggtgaacaacaaaataaccttcttgtttcttagcttctatcttcaatatatgagaaaaccaccgattgaatgataccatgactcaaatacgggtccttctcaatgaatactatacaaccttgaatgcaactaacatcggactctacaaaaacttagcttcgaagcaccaatatgacatggtctctgaatgactaccttccaaaaaattaaagctcttgttgatcttcttgccataattggtcatgctcaaactcctcaagatcacatcgaagccatattcaatggattgccacctgattatgatgtgtttgtcaccttcgttaccacaagaaaagatgcctatacaatagttgaaattgaagctctgttaatggcataatttgtctatatagacaagaatgccaaaaatcttgatttcaataaggttgaagccaatcttactcataccaagccttctggctcaaatttctatggtcaatcaccctttcgtggtcccccagcacctcctggttttaattctgttgttagtcatggcagtccctcttccaacaacaatggtggtccgccctctcattcaatggctcatggtggtccctcctatgatcgtggtcccccaatagcaatgctctttgaggtagtcctcctggctttggtcgtggtcaaaacaacacttaaggacaaaagctccaatgtcaattgtgccataaggttaatcacattatgaaatagtgtttctactaatttgacaagtccttcataggcccagagtccttcaacaattcctgctacagccaatatagctgaaatgcaagcaatatgtgctggtcctagatctatttgtgatgagagtttgtatcctaactctggtgccatacaccatttgacattagattatcccattcttggtgtcagcacctattattctattaatgaaaaaaattacattgggaatggcattggcttgctcatagaacacattggtaattcctcattcctatcttatttttcatccaaacaactcagttttaccaatgtgttgcatgttccttccataacaaaaacttattgagtgtttctcagttttctcaagataataacgtgcttgtttgaatttcattccttgtcttgttgtgtcaaggatcgtgctactcagaagatcttgtgggcttagaacacaattttccttatgttaatactgctctaactcaacaactttcatctcagtttagctcaccactctaatctggtgttcctcatctatcatctttagtgcaagtatctcatccatgtctcatttgtggtcctgttttcctgaccctattccacctccctcaccttcagagtctccaaattcatattcaccccttccattaccactattgttactaatgttttacttgcagtgtccacagcttcaactcatctaataacaactagacaaaaggttggtataagtaaacgaaaaagttcttgtagtcatttgtgaaccaaaaatagcgaagtcaactccttaagaacctcattggaacaatgctatgaacactgagtttcatgctctagaaagaacaaaacttggattttggttctctaccagcaaatagaaccccaaatgggtgttcaagatcaaacaaaatgcatatggcaatttgaacaagtacaaaacttgactgtggctaagggcttcatcaacacgttggatttgattttttagagactttcagtc

SEQ ID NO: 310264 - DNA, 2297 bp, Cannabis indica
tttggaagacttactgcgagcctgtgtcatggactttgagggttcatggagtaagtacttgcctttaattgaattctcctacaacaatagctaccagagtacaatagggatggctccctatgagatgttatatggtagaaaatgtcgttctcctattcattgggacgagacaggagaaaggaagtacttgggtccagagttagtgcagaggaccaatgaagctattgataagatcaaggctcggatgcttgctgctcaaagcaggcagaaaagttatgctgatccgaagcgcagagatgttacatttcaggcaggggaacatgttttcctgcgggtttcaccaatgaagggtattaggcgcttcgggaagaagggtaagttaagccctaggttcattgggccatttcagatactcgagaaggtcgggcaggtagcatatcggctagcagcgttattggctgttcatgacgtatttcacatatctatgttgaggaaatacgtatcagacccgactcatgtcttgagttatgaagcccttgaactgtaaccagatttattccatgaggaacaacctgtacagattttggataaaaaggaaaaagttcttcgaaacaagactattgaactggttaaggtgctctggaggaacagtaaggtggaagaagccacctgggaattggagtcggatatgaggactcaacatccagagttagattttgaggacgaaatccttttaatgggggataattgtaatgaccgcatgattagattatggattagaaaaggcaattagcattaattattgatattttataattacatttgattttatattatggtgggccccatttttagaaatggccattagagttataatttctcaattctagagattttattaaactctaagagtgttatttatgttaattatgaattatgcaatttttataatttttgctctacaacaatggaaaatgtgatggatggccattagtcatataggtaagtttagaacctaattcttagtgagacaaacataacaaatactaggaatgtcggatttagatggggttatggtttggaccattttacccctaagcttataagttgcttatattggaagtaagggcattattttggtttgggggattaggtggctggtttgtagcttgacaactggctattaggtgttaattcagccttagtttttggattagttagtgaaattagttaattaaaagaaaaagaagaaaaaacccaaatttgttctcctccacccttaccattttcgaacccagctaaaaccaacagcaaccagggatttttgtgtgaatttgaggagtgttaactggaatcaagtggagtaattcaaaggtaagagccctagaacttgctcttttaagttttgttagttgttccttagctttgggcatgcaatttcgagtatttaattatttcatgctatttagtaaggttgttttaggcttgaatcttgtggttttggtgcctaattcttgtgatggagttttgatttttgtgcatttttcttactattactgcttggaatcattgttggatgttagtataggtgttttggaaagtttgagagaaattagggaaaatttggctgagtttcaaagtgttggggtttttaggtatgaaccaattaactcgtctgtaggtaatgtagaaccagttaaccatttcactaagtagaaccccagaaatccaatttttcagagtcttagttttagtgtttcctcaataattagggtattgtcatgctagttatcgatagggaaacttttagttttgaatttagatccccatattaggttttagcaagttgtttacctatttacgtgatggtgacatagggcatccatccagcgcatgattttccattcaggtcagtcgtcacacttgaacttggaacgaggtaagactagcatagaacgtatttatatatgaatatgtatatgtgtaatatatgcatgctatttgtgattcgtacattaccaacactagtacggtagcggtactgagtgcaatggtacagtgcatgatgttcaatgagtacaatacgtgttaccaacactagtacggataggtacgtagtgtatgtggtacaacacttagtggtactcgaggtacggtgcaaatcctaccaacactagtacagtagcagtacgtagtgcatgtggtacggtggtcgtaccttagtaaagaacgttcttactcatatgttaagccttcttgataggtgtatgggcacctagatacaagtcggtaatata

SEQ ID NO: 310265 - DNA, 2379 bp, Cannabis indica
ggtaagattagtataatagttaatatatttacatgtttagcgtgcacattttatgattgcctaatagataacatatcaataagagcagtataaatgtatgtagagttatactgaataccgacagatatatgtatgtcaaagtacggattgacgctatcacatcggcatgagtagagtaccgagtataggctgatattatggtcgatcatactatcgtacgaatgttccacacctagtatgtgttggacatgggataaagttgtgtttacgtgtatgggcgcctagtcataatttggtttatgtttatgttatgtttatatttttcttactgagtttatcgactcacagatattgttatatgtgtaggtaaaggcaaagaaaagactaagcaacagtgagtttgagctagatgaagattgaacacattgaagcaattagacttgcattgttcagatcttcgggacagtgggctttattttgatagtcgctaggcgacaacttttgtaactgtggtattttgaaaactaatgtcactttataaacgggatcccagaatatgctttatacttatatatttaagatcaagttaaatatttttttttaattattcatgtttttcaataaatatttaattagtaaatgagtgcacagtagtttcaaatcacgataacgtgcctaatctagtagggtgttacaatttggtatagatccacttgtctttcgaagatcgtcacaatatgtacaatcatcattatagataagctcgactcacggttcagtaagcttttgaatgctttagtagtttgatttattagtatgaaataagaaaatatttttgggaagcatgttagtagtccaattactgaatagacgcatgttttaaattcctaagtgaggggtaattaaattttaaccttgatcgcagtactaggctaacttatgattttgcaggttagtccaatagaatggatgctagacaaaacatgagaaatcaaggaaattcggtcagatccagtggcagtcagggagttgaaattccccctaatgttcgtggtcgaggtagaggccgaagaggtatggcttgtggtcgaggtaatgttaacccaccataggctacccagggttaggagcagaggtttccagaaatgcaagcaagaattaatgatcaagatgaagaaatctgaagcctaaggcagcaggatgctcctgcgatgcctgttcccgaggtgtagataactcctgcccctattgtgcaagtggagccgattactgttggcaatcatatggaaccattatatgaaagattttgtaagcaagcatctcttgtttttttgggaggttcggaggttatgaaagccgagcaatggctaacatttatcaatagaatactaaatttcatgggtgtcactaacaatgattggatgacttgcgctacctttcaattctagaaggatgccttgatatggtgggatatggtgtcccttactcaggacgttaccagaattacatgggaagaattccaaaactttttcaacactaagtattataatgaagcagttcgtagtacaaagagaaaagagttcagttagtggctcaaggagagaatatgtcagttacaaagtacacgattcagcttgatagattagcctgattagcctcaagaattgtgccaatctatttcagcaagaaggaaaagtatttagcaagattgaattctaagattaaacatgatttgatgattaccatggatgactcgactttctatgctactatggtagataaggcactgtgagctaagggtggaattgagtgtatttaagagtcccgaggggctcaaattattggtggggccactactcctcctacctttggttttgctaggggtagtagtgagtcaactcctaatcaaaagagaaaagctccatttttgtccggtggctctagccaaaataagaggttttaagggaaccaaggttttggtaatcgatagggtggtttagagagccattacacttacccagaatgccccagttgtaagaagcatcacctgggtgagtgtaaggactgagcatgtttttagtgcagtgtaactaaacattacaaaagagactgcccacaattgacgaaagaaaacaagaggacaaaagcctgctctacctatggtgtttgctcttacccaggctaatgctgaagctagtccttcagtagtgacatgtcagctttcaatcaacaactctttttactctattttgtttgattctagagccacacattcctatgtggtagccagagtaattgataagttgggtaggccatatgacagttatgaaataggatttggaaccctgctgcctgacaaagaattagttatctccaaaa

SEQ ID NO: 310266 - DNA, 959 bp, Cannabis indica
aaaaaaaatcttctattttcggtacctaaatctatacagtaaaaaagttttatttttttttctcatatttcattgtaaattgagcctattgaaaaaagttggtagttataactccgaccatcaattttagtggaaaaaacgttaaatctcaacgcctattaaggtataaatatgattttattcattttagtaatgtacattactttatttttgtttttgtaatttttttcatttgattaatattatgttgtagtgtaagtgcatagtggccgaatttttattggaattgatcgttgaatagcgtttataaggtaaaaatttaaaccttaatatatagtatatatgtatgtattgtttattttattgaataaatgtgtatatatattttgtattgtgtatttatattgtgtaatatttagacaatatatattttgtgtattggatagatattgtgtattgtgtctatatatactttgtattttgtgtatatatattatgtaatgtttagacaatacatattgtgtatatacattgtgtgcatatattgtgtattgtgtgtatatataatttgtattgtgtgtatatattttgtatttggtagttttaattagtttttagaaacgtaagtttttaaaattttgttactattacatatgtatgtatatgtaaattttttaaaaatttatatatataattttctaaatagtactagttattttttttttcattcatattcatattttttattactaactagttactcgttagtaactagttacttataaataatgtaactagtaagtggttaaataattaaaattttaattttgttgtatttcattatattataggttattatgagataattttgaaggttccaaataatttagagttgatcgaattttagcttactacaggtatataaatttactaactttttgttattaattatttatcaa

SEQ ID NO: 310267 - DNA, 1836 bp, Cannabis indica
aaaagtgttatatatattatatataataggcttctttccttgccttggtaaggatgagattgtaaattgaatatatatgggcataaatgtttgaaatggccaaataatcacattcaaaactcctcacaagattgtctactttggatctagcactagacacggggtaagttgaaatatacttatttttttcatcaattaatcaaaaatagctttattttaaattcaattgaaatgtgcccacttttataactccattaccgattataccctcacacctatacaagttagagttaaatggagagtcagagtatccttagatgataggagcacaattaatagagttgttgaaaaaagagtagaaatgaaaaatatagaaagaaaaagtaaaaattatacacaacaatttaaaagaggcataccatctaatttcctcactaaacacaggtcggtttgctttcgctcgtctctatccacattcactacaactttaatgtgataatcaacttacactaaagcccaatagacaaatagtaaaaagggggcaaatgaagaatataaacaattgtaaatatgagataagtattattgtataatttgtatggtatgaataaaaaatagcttcggaacataaatcaaagaagtatctaagaagtttgttagggacttaagtaagcttttgtttaggtttgaagctgtacaactggctgagcgttggatctctgttctttgacgaaaaaagcaaataaaatatttgaggatgtaaaatttttgaatctagtagatggtaaataataatttatgtatagacatcacgagaagctaaaatagtcagactatctacacctagctagaacaaggttaagctactaaataatactattaacgttcgtttggtacgcggtattacattgtattgtattgtataatattgtattaaattgtattttgtgcaatacttttatataaaactatatgtacttataatttttatagacacttaaatatataatattttaatatacattaaagtttaacatagtattatataaaaatatgatatataatttaattcaatataatacaatcaaaagcggagccagaattgaattgtaaagggggctaatagcgcgagcaacatgtacaatgacaagacttcatatatagttattttaatgaccaaggttctttttagatgatgctaaatatttatgatgatctaatttaactcagattaatttacaatttttataaatatttttacacactagaacaaaatacatgaatcaaataattcaatagttaataagactcataagagtaatattcattatcaacctgtattgactagaaagtattttatattatttcaatgtttaaaataaatgattaaattgatggtgggagcatacttaaagatagtcagtggctaacaatgtgaatagtgttaaacaaaagaaaaataaaatttttgtataaatattttatttatttagtatagtagacccacaattatatttattttcttttttataaatatacaatataagatagtctatgactatctatggattgaatatacaatagtgcttgagttataaattttgattttgacttttcaactcacttcctttatatttgtttcaatacattagaaaaaacaatagtcattattgttgagaatcatgggtttccatctcaaaaccaattggtaatagaaggagtagatcattcatcttatctattctattatctttccacacattggcaatgtgagactctctaacatcccccctcaagatgtagctatttactttgctcaccatcttggtacaactc

SEQ ID NO: 310268 - DNA, 1973 bp, Cannabis indica
aaaataatttccaacataatgctctcacagccattcacaatccctggtgaaagtctgctatggatgctgaaatctttgccttgcgaaacaataagacatgggttcttgttcctcgacaaccgggtatgagtgtcgtcgataatagatggatttttcgggtgaaacttaatcgagatgggactgtgcaatgcctcaaagctcgccttgtagccaaaggtttccaacaacaacctggtattgatttctttgaaacctttagtccggttgtcaagtgtgccaccattcgagtcagcctttctctcgctgccaccaacaattgggatattcaacaagtcaatatcgacaatgctttcctcaatgggattctcactgaagatgtgtacatggaacaaccatttggttatgtcagcctcacacatccatcttatgtgtgcaaactgcaaaaagctctctatggtctccgtcaggcccctcgggcttggttcgatcgactcaaaaatgtgctcttctctcttggcttctgcaattcagtctctgattcttaattgttctactacaaaaattctggtgctgagctatatcttcttgtctatgtagacgatatcctattaactggtaacaacactcaaaaggtccaaacaatgatttcccaactccaacagtttttctcgctcaaaactctcagttttgtcaattattttcttggtttcgaaatcactagaggggcgtatggtattcatctatcaaaaggaaaatacactactgatttactcaacaaaacacacatgctgctttctcatgagagtacaactcccatcttagttagtgacaaactcagtgccaaagacagcaagctattcgattagcctacattttttagaagtgtcttgggggaactccaatacttgacccttagccgtcccgacattgcattcaccgtcaacaagttgagtcaattcatgcataatcctacacaacatcactggaatgtgtgcaaacgactgttaaggtatctaaaagggacaatcggacaaggcattatgttcaaacaatctaaagatctcaatgtagaatgcttcagtgatgccgattgggctggatccatcgatgatcgaaaatccacaactggttactgcgtttacttgggaggtaatctcatcacttggagctcaaagaaacagaaggctgttgcaaaatcatccacaaaagttgaatatagggccttatcacaaactgccagtgaagtggcctggcttaactctttgttcaaagaacttggcataccacacaaactgcctgccataatctggtgcgacaatgcaggcgccaaattactcgcctccaatcctatcttccacagccgcacaaagcatatagaagtagatgtacactacatccgtgatcaagtgaaacaaggaaaaatagaaatcaggcacattcccacttctgagcaaacagctgacatattcacaaaggctatctcaattcaacagttcaagtacctgaaaaacaaacttgtcgtggtggctcaaccacgccaagtttgagggagcgtgttaaatttaacaagtctttgccgcaccagatcactgccctatttcggtgtgctgtcaatattggattctgtagatatttcccaatcatgagctgtcataatatctcctaaaatcttgggattcttttgtatgtcagccaatcattgatcaagagaatattttcttgttaaggaaaatattcctttccttgtattatatatacacctattattacatgtaatcactcactgagaaatcaaatagaatacactttgccgcatattgctactatactctgtaacattttactttattatttctctgctttatttccctctggtttcagtcttgttcttacatttttaactgtaattaacataatacaattatttaaataaggcaaatgagtcttcacaattggggtggttcatgtgaggg

SEQ ID NO: 310269 - DNA, 2812 bp, Cannabis indica
ttttcttagtctaccactgctaggggtctttaactctcttcagacatggctcactgatttttctctaggcttgggtgtggctatgtcggaggttgttgatcacgcttcttatggtttcagtgggggaggatcgatgtctgttatcgttaaatgtttggggttttattttggggttgttggagttggcatcgttgggatccgccacgaggtttcatcaacgaagatcttctggtcgttgtgtcttgtttctttcttttgtgggagtcattttcttctcctatgaggcggtttgggtgcgacatttctagatgggtggttctagtcgctttttcgtgggttctggtgggtcttgtgggtgtggggtgcttttgcacttcgtggtgtcttttttttttttttgaaaatgaaacgtgcataaatgaaaattagacctcacggtcattacaaaagatattgttcggaataaaagaaacacacaaccgaccaaatcgattatttatgaaagcccacttagccacattatgggccataaaattacaagttctactaacaaaataaaaattacaacaagcaaaaattgagagagagtcttttacaaaacttagcgtagttctcaattttccaacgagattctagattgttgagcgaattgataaccaccttagattaactctctataataatatacttccagctatcccctttagcaacttccagcgccaagcaacaggcagtctcttcactgcaaagagcatcagagaactgtatgcaccccgcaaaccaccccaaagtgatttctagccacaactgcaatgcacatgctttatatcctaactttaacatcacagtttagcttaacccactcaagagggggtggaagccaacttgctttcagacacggggatggagtggggaaaatagaaacattgtaatcttcataagagtaattaatatagtgaatacactaataaacattggccatacttctattatgtaccttgttattctgcgttcgctaaattctatcgacaacgattgacgcataaagaaagacttcatttgtattgatgccttgtttttctgtccccagatgaatttgactcaatcccacaaacgaatgccagaattaaaaatgggaaagatcccccacggggacgaccaccacaaatgaaacacccaattaagtgagaaataagtgctctaacgtttcttcaccacccccacataaaagggcaggacacatcctctatatggaatctcttagatagaatagcacgaacagggagggccttagaaagtatacaccaccacatcatcttatggcgttctaagatgttactattccacagtttgttccagagggatggagctacatcatattgaggggccctatctaaagcttggatgagataggctaatttacatgaaaaccgcccattactctctttcgtcgtaatccacctatccgtaccctgaccagagggtctattcccttttaggatggtcgaaaaagattctttatcaaaaagataattctaattctgaatatttcaatccccataatccgtaaggagatcaaaccactttgttatgatctgttactctagcatctttcgccttaggatagaactccctgccatgggagatccagggatcctcctcgattctcgtatccttaccatctgcgatcattttacatgcccattttctcataatagccttggctttcaccacattcttccaaaaccatgaatcagagtctttatacttgtaggtaaggtaatcttttcctttcaggtactttgcttccaatatccttcaataaaaaaaagtgactcctagttaataggttccacccccacttagccagataagcctggttcatttccttagttttctaaaatccagtcctctatgggatttgggaagacacagtttatcccaagccttaagatgcatcccatggttacctttctcaaaacctcaccagaagtcccgaaccatgccatcaatcttatgaatgagacgatttgagagtttggtagtttgcatagcataactaggcatggacagacccacatacttaataagagtagcccgcccaactttcgagagagattttgctttccagtcttgaagcttaatagtcaggttttccaaaatgaagttgtagtctgcatcctaaatgttgataagttcgtattgagtactcccaatggctttctgtgtttgtgtatttttagttttattttatttttaataatgccttattatggtttttgtttttctacctttgtgtggagttgtctactcaccagcccctaataagggtaggaggttgtagccctcctaaaaaatattgtacgtatttttctctctattaatgtgtctactatctatttttgatagtatggttttttttttttatcacagttcatgtcactttatttagtaactcattcatgtgacaatattgatgtctgtcatgattttacttggggttttaaatacacttattacactgttaaaaatactaaatatatattgtttgaccttttcatttgttataatttttacatcttcattaattaaatggttctcctattttttttttcaaaaaaacatgaatatttatactgcaataaaataacacctaagagtatcgttgcttcttatatattattgggtaagtttagattacatcttttcaaaagactattttaatacagctcttatctatttcgacttccacactaaaattttttgggaaaaaaacaggaatattctaaaaagggaaaaatattacaacaat

SEQ ID NO: 310270 - DNA, 1397 bp, Cannabis indica
tttttttttttttttgtcatcaaaaataaagaagatacaagcaaactcagagagaaaaccacaatcccaagggcattaaaattgagcccagtgcctaggttaacaattaacctggtacgctggtttcgatcactcaaatgtcaattcaggtccaagcattctctccgaaacagtcaagaacgaggtaggagaccttgtcctcaagttctagaaacttggaagcatcaaaacgacctctgaaaagctctaaaataagccgtcagtgcccaagttgacaaatagcctggtgcgctggtttttgcttacctgattctgattttgtctcgaatgttcatctagtttttcatcaaaattgagagccatgaagttagaagagcctaattcataacttcatattttcacttttctgacaaggtgatttacttgaaaactgggtagttttgagtctctcgtttccgcagaacagcaacatctctgagaactagtgaccagctttgccagagcacagaaatggactaagtgatatcaaaaattacttaggcatcaaaaaatacatctttggtgcattttcctactcaccagcgtccaggttgatatcacatgtcaacttgggggcgggatgtcaacctgggcactgggccagaatagccttcagtaaaatggtcataactagctaaatattgttccaattgatgcgattcaacttgcattttgaagttatttcaattttcaatcaattaatgtctcacacctaaactataactctaaagtttttgacttcaaattttactcccaggggagctacaaacttaagctacagcttgcacggatcaggtcctgctgacacgactcaaactctgaaacttgaatataaaccttcgtagttaattttcaccatttgatcatcatctagggtcaaaaatagcttaaatgtatttttctttattttttagattattttattcccatttgataggaccttcttcacctatataggagagctccactagctcatttttaaattttagaaaaatatccaaaaggttatagcatctctctctaatttctctctctagaaattagagcatccagacttagctattttttctgtaatccatctcgtgagaaataaaactcaaagtagcatagctctattattggcgtgacatagggaatgaactactataaattgttgtgtctctctacttatacttactttataattcattcttgccaatctagcgagcgaatgtgactcagagatctgtgtccaaatttttgtgtcaacatatattaaattgttttgaagaaaacatttgaatcaaatttctttagaaatcttgagtcattgttagatttttattgcataacttcttatcgatgtgataagatcatat

SEQ ID NO: 310271 - DNA, 477 bp, Cannabis indica
tcttagacacaattactaagacatacggtaagtcccatgtcgtacatttaaccataatggacttataatctagccttatacaaagttttcaagagaaaccacacataaggccacagttgcatatgcctccaagcccgtcataggcccctaactatggttcaaatggggagaaaactggctgccaacttgcagccttggtcttggccagctagggttccaagtcctagaggtcggccgggttccaggtcatacaggctggtcaaacaccaagaccctgttgggttttgtgccctaaataaaacctatttcaatataatcagatttactaattaataaagatcagaaatcacattctatgttgcatggttcacatgatttatttcatgttcatatttaatgtataaattctattaagtccagaacatatgtatttgttcgtgattatagtgttgtcagcacagtggaatataatcataa

SEQ ID NO: 310272 - DNA, 1550 bp, Cannabis indica
tcttacctcaaaccaatatcgagtgtgtgggctggccgaccttagtggaactacgctcgacaatcccaggtcctaagtcacgataacaaaactcgataaacaacttattcaaaaccttagaataaccctaactttgcaactggatttatctaactccccagtggtttcgaacaactcaaacatcattaaaatatcctattctaagctctgggaaacaccccataaaaatcggtttcgaagcctaaaattagggcttcccctactagcaaaatcggttaaccggtttcactgtgcctgtgaaaccggtttaccgatttccctgctgcagaaacgagaaatcttgatttttactccaaaaccgaaccaaatctcctccaatcctaatgaaacctttcagaacataccaataacataaaaacaacatattcaagacttcaaaacacagtaagacatcaagataacaaattcaccatagttgagtaaaatttgagttctcaaactcaattcactcaattcaagacctaacaaccctagaatcataaaattcaaacttaaacaaccttgaatcaaacttagaaatcacgttctgaattcaattaaacctacagccccaaaattaaactaaaccctaagcaaaagttaatccaaacctcaagaaatccacaaggaaagaagaagaacttacctcacaatttgcatagcaacaaaagttgggtagctcagcctagaattggttgaaattgtaaggaaaaaccttggttcttgctggatttctatggccacgagagggagaaggatagagagcactatgtgactttgttagttaggttttttctttttcctttttaattttctagaaaagaaaacatttataaccatatataagttaacttaaataatatttagccaacatttactagaaatccataaaagacaaattagggtaaaatgaccactttacccctcccattaaaacttaagctacaaaataacctaggggtattttggtcattttctaactttcctgatttaacctaattaacagattttaatctagtctggtataattccaatacaacacaacttaattgtcgtgacatttctgaccactccgtcgagtttccaaggctaccgaacccgaaaatattttatttcgaaaatggtatctataatacctacataactcgataaaatttccgtaattaataaattacggtttatttattcattactcatatatcactaattaacttgtaattagcttaagtaaaattataatcctactctaatgcccacataatcacatatttaataaaatatgtccaaatacatattattatatttttcgggatattacaagcttattcatcctcttttcatcaccttcaaccttcgaaagtccttctgcattgtaataccctagagttatgaaatggattagcaaaaccctaactagataattatgaataattgaggaattatattattatatagttcattatatgcgaattaatatgattttttgatatgttaagaccctattggtgagc

SEQ ID NO: 310273 - DNA, 741 bp, Cannabis indica
aaaaaaaaaataaaatcacgtggtgcacatttgtttttctcattttgacaatctgatagaccacgtattactattagttatataaaagtcttatatacctcaacctattttaattaatcatttcaaaaattcttattacttgaaggccaaactttttttcaatccttttcaagaaggtatatatatttatagaatttccctagaaaaacgaaaaaagaataaagttagttattatatatatatagtgtgacaaaatggaatgaaactagaagaaattagtcaaataagttggacaatttcacatcacatatataatatatgatatataacattggaaaacttatatatataaataatatataaaaattggtgtatatatatatatggaggggacatgaatatatggtgttcaaataaaacatggttatgtggtctttaattaagctctggaccatttactacgcacgtaaattaaccatataatatattcttcgtcaattttgatacactatatatctatggtggctcatacataattattggactttttaattgtgtaaggattttattttaaaaggaaaatttgattttctatacttacattacatataccttttttcataaactaatacttttctacattgaaaatatatgaccacttttccaaaatcccaaaaatacccctctcaaaaactcaaatcctttctacattaatttttttttttcaatttttctgggctt

SEQ ID NO: 310274 - DNA, 1226 bp, Cannabis indica
tatttattctgatttaaaataacaactattttatcattttccacacgcattataaattgtcgaagaagaagatcagccaaattaattaacataatgaccaaaatctattttttccaaaaaaaaaattaaataaataaaataattaacacttacgaataatatatattagatcaaaagaaataatatcgcatgcgattatgatattattgtgtgtaaaatataaataaaccgtatatatatttttctaaaaaaaagaaagagagtagaaaactggaaatattcccaataaaaggtaaaatgaaatgcatgcagccctaattgtggtgatgatgagttaaatcttcataatatatacagttttattagagacaaaatatgataagaatccgtatatatatatatatgacggtatgagaaagaaaaaagaagtgaaaaacagaaatattttctgacagatttctgatgaggaaaattacaatagtaaagttttgttgaacaaaccacaaaaggaaataaataaacaaataagccgtacacatagaaatagaaatagaaaaagaaaaagaaaagaatagtgtgatgagttttgtgtaatagtgacaaacttaaataatcaaaacatatatattttagatctttgagagcctcactacttaccagattcaaacctttaaattaatgggtttttgaaattagttgaaaaaactaattaatctgaacaaaatataataaatagagagaataataaagatccaaacagtataaataataacctaaaagagatggagaaataagtagttgtgtaagtaaggattgggagaagagaattgggaccttaaaaatggcgaataagccctttggagaagaagagaaagagttttgtttttttttaggttttccaggaaacgagagaagaaaggcacaaagaacaagaagataaccaatatctcatacctcctatcaaatatcaacactttatacacaaaggtcttattttataatattttagtcaaactctcaccatccccactacaatacataaagggaaagagaaatggtaaaagggacgtggtgccaagctcctttctatgtgtcaatgtcgttattagtccaactaagtattgggtcctatataatttaatataatagtttttaaagagtatcgttaactaatcgcaacgcgacatgtcacaaaggtgctagacactactggtgcctaatagcaa

SEQ ID NO: 310275 - DNA, 1024 bp, Cannabis indica
ggtaaaatatttccaacacctatcactttcacggaagaagacacaaaactagtgggtttcccccaccatgaccctctagttatagaaactcccattaccaataaggttgtggctagagtattggtagataataggagctccgtaaatctattgttcatagaagacttcatgcccatagggctcataaacagggacttgtcacctagtggttcccagctcacgggattcaatgggatgacactcatcccaacgggaaaagtaaggcttgctgtcaccctgtgtcctgacaccctgcagagcactttcaagtactgcacctttgctgtagtagactgtcccatcgcctacaatgccatccttagccgatcgaccttgctcaatttcggagcgatcacctccattcgacacttatgccttaagttccctacccgagaaaccggagtgggaacgatgagggggaaccaaggagaggcgagaaaatattataatgttgcagtacatctgtcagtcttggtggtacaaagggacgaagagcccattgtgatagaacaagatgagttggatccccgtgtgggatccaaaacaactatagaacctatggaggacatcgacgaagtaagtacgtgcgacctcgactccactaaaattatcctcctaggaaaaaacctagagccggaagaaagaagaaagaccatatagatattaagggcagccaaggatgtctttgcgtagtgccaagggcatataactggaataaggccccacgtgatcacccatgtcctgaacgtcaacccagacatgcctctgctgcaacagaaaagacgtcctcttaacatagtaaaggtcgatgccttagagaaagaggtggataagttgctaaccaatggcctaatccgggatgtgtattacacagaatggctagccaatcaagtattggtgcctaaaccaaacgggaaatggcgtgtctgttggaaattattttaccaggatctagatttactaccaagtatgtttcattaacatc

SEQ ID NO: 310276 - DNA, 2658 bp, Cannabis indica
taagatcaactaggtgatatggacttagaaatatataacggtatgtgtaggatatctttaccaagttcaatattggtccaatcaagtgtatactccatacatctgatactatcatactttaccaataccctagaaaggacataacacttgtccaatgtaagtaaactttatcgttgattatcacatcagtataaatcctgtgcactgatgaatcatgggacatacgctttgaaatataatcacaataccttctactgtgatgacatcactgtaattgtgaataacaatatgttcttgatttatcaaaaattttatattaaaccataatcatgaaaataacatgttaacttaaatgaattataatcttttattgataacaaataagactatattgaaataggttttatttagggcataaaatctcaacaaccttggccctagggcaactcaaagccttgcctaaaggccctccaactagatctttgagcttcgaagccatatttgtaaaaataaagtaacaaagttacaaatattcaatacaagaaaaaagtaggtgcaaaaaactatcaactaccatcatcctcagaagaggagtcatctgaatcattagcggctgccttgcccttgcatttaaatgtaggcgaggggagagtgagcctaatagatttctagctctaggcttgattagtagtgttgcgtccccaacggtgcctccacgagctaggtgttagctggccagcttccatgagaagaccccatggctgaccaggtcttgaacaagacccctatggccgacaaaggtgtgttatagatcaaatgtgtgttttccaagaactcaaacatggtcttcgtgttcttcgtgaatcaaagagtcaagaatcacaacgaaggtcaaaatcaaatctttttcatcaagaaatcacacatgatacatcctaaaactatcatgcagatcaaaatactaaaaagattacaatctaacgtgggaattagaaaattttcaaagagaataaaagcttcaaaaaaaaccatggcaaaattaaacaaacaagtgaagaacatgatttgaaagcttacccactactagaaaatgttgatgaagaagatgggaagttggaatcgtcaaaatgacgcgaaaatcctgagagacagagctctatggggcatcagtctctagagagaaggaggaactttcaaaagttgctttttgtagagagagattgaaatgttgaaaatgagaagtgagttcaccccatgagcttatatagcttctatgggaccccttctcacttgccatgcagcatgtaactaaaaacatgtagaagagtaatgttgttaacatactgctaaggaatgtgatcagacagtcaagaacaagtattccaaaggctaaatatattgcaagatctatccgattaaggctacatcagacccgattaagctgaaaagtccctatctgcacaaacgtccacacagggacaagggaaaaatattatcccaatttttcccacctaacgtgacatgtccacgtggccaaatcaataccacgtgagaaggttaagccatctactcagcacttcaaccaatgaggggttcgagtactaaggagggatgatgaaatgacaaaccagccacctcaagggggctagctagctacccctggccgaccctatggccagcataggctggccagcttccagataccatatggccggccagcatgcactctggctggtgcatggccagccaactttttgcctggcagcttttaggtgcgcagctttcatccgtggatagcaagtcaaaccacgaaatgggccttaacaaaataaagggaaagtatcagcaacttccatattttttaggggcaatttagtcatttgaactttattaatttattatgtaaataatagctttagtttcctattcttaagggatattagggatgtaagctctactattaaagagcattattcacaccctaaaatcataactctcaaaccctaagccttaaactctaagtctaataactcatctcatctctctctctctctgcatagcctgtctctgtcactcgagaatttccaactctgattctcacattgtaatctcaagagagccacttcagatcccattactatgtgatcttagtagtattatctctggtatcaatacaactaaaaggagagtatgtcattacccggtaactaaggaggtcgaacctctattaaatgtcatgactatttattattctgttctaattgtgtaacacatggccgtgatcattaatattaaatttgaatctgctgtcagttgaccaaatctaaggtcaacaaaaataatccaattgtatcggaatatccttgtagaacaaattactacgatgtagctacaaaaaatttattgtacggggttgagggtggcaatactataagcatgtatgacataagagatggtgataagtgtatccaatgggatctatgtgaatcgttacacaatggtccattctcaaacgtagtacaatggtgagacaaaaatctagtagtaagttcagctaaaagagaagtaacaatatgggacgtgaattatgatgcaccaagacccatcctgaaaataagtgtgggtgagggggagatcatggtgttgggttttatgccc

SEQ ID NO: 310277 - DNA, 1419 bp, Cannabis indica
cacacatatctgcacggacaaagccttcttaaccggtcagtgtacagtccgaacaacatgccaacacttagtaatctcaacacttgtatcatgaatcacagaggcaatccctatattcctgggatcatatcacagagatatggcaagctgtccaaatcccttaatcagtgtattctatatttaatgtgtaatcttgcaaattatagtcattgtaaacatcaggtaaacttttccctcaaagcttatagcccaataaatagtgatctatcctcactggacaaagggtctaaaaacttatctaagagatatactcagagatatcattgtaaaagctctaagagaagaatcactgcattctttactcctaagtcaatacaaatcaaggggagtaggctattaccgaactgctcggggtcgaacctctttaaaagctctgtgtgtttatttatttcattatattacatgtatattatatccttaatcacttacaattttgactcatttatgttgaccaaaagcgaggtcatcatataatatcagccccaaatttaaattaatggataagccttagttgacttcattgtggagtgcacagggataaatgacgatcctaaaatgtcagtcccaaagagagaagtctaaaagatatatgtagatggaacatcaaatgaaaaagattccagagcaaaaatcattttaatatctccactaacctttagcttcaaagtgaacttcctttctcgttcggagcttccaacaatgaagctgagcatgaggctataatcgttgtattacaactatcaaaacaggttagtgctaaaatattgaactctatagtgattcacaacttttagtcaacgaagtgtctggggagtaccagaaaaaaggagaaaaaatggctagttacgtagcaaaaactcgagagttatcgcaacaattttagccatactatatgaagtaaatccctagagataagaacactattgtagacatgttggcaaaattagcaacggatacagaaatagaaaaataccacttgtccccatcgctcatctgatcactctgagcacaaaaaaactgggggtatctggcatcgaccactcaacttcttggatggctctgatattcaagtatttaaagacatgtactctcctagaggatagagttgcttcatagaagatgtagtatcaagcccccaaatacgtgatcatggatgagaaactatacatatgtggattatcaatgtcgtatctaaggtgcatagctcgaacggagataagcactattatgcatgaaatacataggcccgaccctgggcataggcggcctaggcctatgcttagggcccacctatcgcaggggcccaaaaaaaaatatttaccttttaaaattataccatttttttactgattttgaaaa

SEQ ID NO: 310278 - DNA, 936 bp, Cannabis indica
agcattttcatcattgatctacgcgttggttctggggaacattaattacgaggatacacatagattgttggactcgccgaccattggatgaagacttgtgtttctggaagtaggatcgtggaccgtccatctctttttcacgtggatgactttttgagtataaataccccttgtaacatccaattaccactttttcccacttttcaaatatataacccttcaaagctcttaactttctctaccctttccaaaatcaagaactaaactcaaaataaagttctcttcttcaatctaaaaaatattatggattttttccttcatctgctgcaaaggattaggacacagaagttcccacatcatcaaccccccgtgattgagaattttacagtaggagaaattgtgagcctagatttcaatgctgaaattaattcgttgatcgcttcagcatctcgtcttcgcaaagggtccgataaacttccccaaccagaccgagcaacgataagcttaacatcttctctatcaatatcaggtatgttgtttcttcatctatgaattgtgttttctgatttcgtcgataggaattgtattttcatgttcagttctgaaatgaaattagggcttttgatttgtgtggttgccatcttaagtggatttgagcaccacgagtagtttattttttgaattttcctgtttagaaatttgtagaattggtcgatttgcagtagaagtgttggcaaaatattcctttcgcccaaaatccttctagttttggggatcgtcgttaatttctatagtctttctctttgtgttgttcctgactttctatttagaacgaataactcatggaagttcttgtatctaggtagtcaatctagttgggacctctttaagcagtttatgggggaagaccctcagctccctttctatgctaggtag

SEQ ID NO: 310279 - DNA, 1083 bp, Cannabis indica
ggtgctaagatcataacaaccaacatttcccatcctaagaaatttgtgttatgagaatatttggtaactaaaaataggtatagaacagagggaactgtctcgttatagagaatgttggtaaataaacatttgcactcctttaaattgctaaagttttctgtgaaacttgaaaatatatcggttgcattattttatttatgtttttcttttgtaacacaatttgtcagcatgttgttatctgattagtttttatcatcttaaagcctctgaatagggatcatggatatccattgcgtgttgttgtccctggtgttattggcgcacgctctgtcaaatggcttgattctataactgtgattgcagaagaatgccaggtttggaaatgttttagtatctcaaaagttgtgttttttttttcttggtacacattatgttattcaatctgcacaacagggtttctttatgcaaaaagactacaaaatgtttccgccatcagtgaattgggacaacattaactggaacacgaggaggccacaaatggatttccctgtgcaggtattgacatatggtagtccttgctcaatcatttgatgctttttacgacaaatatcattcgtgcttgtttttgctcaagtggcaaatattatagttgaaagatgtattgagtgaaagaaaaatgctagtttgaatgtactcgtttctaaggaccttctgtcagcatccaatttttgtcgtagagtagatttggttctttcaagtactgtttaatttgatttctgatctatacatttgcctattgacagtgtgtaatttgttctttggaggaatcaaatgcagtaaagcccggaaaggttagtattaagcatggttttatacctttctagttcattatttcaaattcatacatataaaaaatattcatttcagcatgatatgtgaacaagaaaacattctcccatggaatatttaatcttgtaaaaaatattgtatgggacaaggctgaagatgtttcttcttatctctacaccaaactccattttgaggagttctaagatactgattgattgctgacaatgcaccatg

SEQ ID NO: 310280 - DNA, 515 bp, Cannabis indica
agagagagagagagagttgcaatattgtaaaactaattcttgaactagatgagaagaaaagaaagaagattactcagttgatgtctaacaggatcttcttttggaggctgtgaaattgttgatcaccatagtagatgaacgagctgatctgaagagagctcaaagaggaagtacgcaagatttggggtgaacctctataattctcatgagtttgatttctctctgtgtgttttctaattccctgatcttgtttcgtatgcatttaattatctaaatttttgatcctaaccaaaacctaatctgagttttcaaagcaagttcatctcagaagtttcgagaaagaactttactctttttgtttgttccagtcactacaagaaatgtcacttttgcctacacatttttgtactagcaaaagttagtattgtgctggtaaaatagaatttacttgtgatgtgttggtaaaaaggggttggcaaatcaatgttggtattagattttagccacttcaaatg

SEQ ID NO: 310281 - DNA, 1590 bp, Cannabis indica
tcaatattgagtagtgcaatagtaagttttttataatactaggaatcatgggtgccctttagcatttctctagtgcaatgtgtattgtgaaacggggccacttctgtggggccctataggtgagtcagcaggcatgatttcatggatatgggcatatgggctgagggaaataccataatgaataatggggaccaaacatgatgaaatacaggacagttgcactctgcttatgggcccacctaacaaaggaaaagctctacttacctttctttgtctcttgttctgcaaattccccacttctctctctcggcccttattagttacttggaggagacaattcaattcaattcaatacagcaactattataaataccactgcctcttacgtttctctattttgataaaaaaaaaactcaaatgactaaaagtatctattggacaatgagctactatagtatgggttctattttctaataaaaaaaatcagttctttcaggtttattcattactttattaatataaaaaatgtaatgagatgggctccacagttactaactgtccttcttagattccaacttcaactaaatgagtgcttaatttagcacataggaaattaattgcaataagtttagacatatatgatcatttgttgagtgaaataacccatgcctaaacatgtgtacaattagcttttttttgtaatttttgtatatttagtgaaataatctttagataaaatataaaattaatgagcaaaatgatgaaagagagaattgataattattttataagataatgcttctctagtgttagaaacaattaatgtagagttccgttttttaaatatgtgtggttgttttattttatgtttatatttaatatttatttcttaatttaactttttatatatatctattctatataaagtgtgcctatataactaaaattcttggtttatgagaaattcatgggtgactttttatttttatttaataaaataataaaatattatttatatataataaaataataataaaacaaatcctattaatatttgaactgatatttagcatatttcaactctacatataatcacaactataactctagaaattaaaaatatatatataaaataaattgatccttaaaccgcatatacaattagtttgttgagagagatcaagaaaaaaacgaattataaatggatttttttttttaccaaatcatcccccaatttttaagattaattttttattttctaacattttgggatttttgtctccttattgaatcttttcaaatctgcattgtttctatcaaaattaatgagctcacatcgttgttgtgttatacggagactaaactatgccatttgttatgtttaaccttcacatcaaaaaacatgttgttatattctatatttggattatgttaaaaatttgatcttataaagaatacgtttaattagcttaatgtgttttactatgcagtatattcatatacagtcttttttcttttctatcttcgaaaggatagttaataaatataatatatagctttttttttttttgaaataatatatagcttttt

SEQ ID NO: 310282 - DNA, 1953 bp, Cannabis indica
acatacttgtgagtagatttaagatcctggtaaaataatttccaacagaaagacccaccactttgagaactcagtaatctgtgataacaaatcaaaatgcaagaagagaaaaaaattaaccgcatgtctcagaaacggttaggcctatcccagtatcctaaggggcatgcgactgcatgaacattaagttaatgggatactcccaccattttgagaactcagatattttttattaactaaagtgcataggattaaaaccctgaagctaactaattacctaagatctaagagtcgaagctcaaaaaacaaggtcaaaaagttatgctgggttaaacaatcccaaaaatgcgagtatgtaaaatggtatatcataaagatgcaggtattcaagagttcaacataaaacccgcgagtattcaagtttcaggcacgtatttcctagaaaagaataccatattttgcctaaacttttaattctatctatgggccctattcatttcatactttgttgagggtgcgatagtctatgcatagtatcaaggtcatgtccttcttcttctggaacagcacatgcacaccaaatggtgcctttgatgacttgatcaaccctgatcttaacatccccacttgcttcctctttagctcatcaagttttggtggagacaactggtatgccgctttagttgggggctttacacccgacacaagttctatttgatgatcaactcccctcctaggaggcagtttctttgggaattcatctggcatcacatccttctattcatctaacacctggtcaatttcaggttgagtggactcctctacttttgcatcatacatggcgggagcaatgacaaacattggccttttcttcttcagacccctcttcagttgcaaggtcgataaaagcttattttctgggggtagtcttactttcgtagaaaccattgaaggtttctcacccataataagtaaattctctgttgttagaattggaatggcccatttttaagctagaaactccatccccaataccacattaaagtaatccatgcaaactgctacggcgtccagttgcccctcccatccatcgatcttgacatgcactttcttggccactctaattgttgccatagcctttgaattgactgctttcatgcgacctgtatccttctctagttgtaggcatatcctcttagcttcgattttggaaataaagttgtgtgttgcgccagtaccaatcaacacactcttggcctgctttccaattaaagtggcctccagaaacatcaatcccctccctaggactttctttcctcctgtgccatgcttcttgagagcattcaacaattaaatgacgctcatgtgtacgcaatcttcatcttcatcttcttctccacattcttgctcctcttaagtaatggatgcctttatgacactcaacttgactggtgaggcaagcagacgccctgtgagggccttgacaaagacaacacttaagggactttttcccaatagcggcatcactcttagaggaggagctacattcaggagtcttctggtcccctcccccacttttaccctgccaatgcttccccgacttcttactcccagcattgttggagctagtttagggattcgtcttctttgcctgcaaattctctgaggtgtaggcagttagctgcttggccgctgcttcagcagtggctaggtctgacgcacacgaccattgcaactcttgattagcccatggcttaagtcattagaggaaatagaaaagcctatcgacttcgttcatgtctttaatgtcaagcatcaatctagagaacttatttacatattctcgaactgtcccaacttgctttaactctctcaattggcgtcgaaccaagtaggaaaaattttctagcaggaatcgggcattcaattctttcttaaggtcatcccatgttt

SEQ ID NO: 310283 - DNA, 3070 bp, Cannabis indica
aaaaaaaagaaaaacaacaaaatattgagatgaaaaaaaactcatcacatcatatgatttaaaatagagattgtttataatatttaaagaactaaattaaaaacacgttatatcaaatgatctaaatttttcttttttaaagcttctttaaacatgctctacatttatagaatattatttattactctaaacatattttattaactgtttgatagttttagttttgtttttttttttattataggtatatgtataaatattaatagagtaatatgtgccataaattcttaagtttaattcctgattgtaaataaatatataagtttaatttttgacagtaatattacttaagttatatttttggaactccataggtatctggctgttaaatgtcaaatcattatccacgtgtcacattttctattggtatatttaaactaattttattttttttttaacaagaataaaaatttaataacttggaccgatcagagattgctacgtggtaatttattctgcaaattactcatataaaaatttaaagtaaaataaaaaaataaattttcgctatatattttaaagaatagaataaaaaagctgagagtgctcgtaccgttttttgaaggtatttttttacatggaggctttttccttttaacacatcaaatgcaaagtcatttataaaattgtgcaaagtcatttacaaagtttgagagaagtgtttctccttgaaaattcaatcagcaccattatgcctctggggggttctctttttctctcaaatgagagtgttggaatgtccaacttgacttgaatgtctattccaaacagtgaagtcttttcagtcctgtctcttcaatcccttaccttctggctagtttcaagctaattcgtgtaccagtctatagaattcttaaaagctttgctttgttcttatttttaaaagttctctcctacccttgtcctgttctaaaagttgtcgattctttcgcaatattcctttctagcactattccattaaaaagtcttttgtctcttctcagttaaggcatgggagatagtggtggtgtgtctcgtgaacccatgattgaggaaacaactgttggtgctggggcccctgatggtatggttgtggaaggtccttcccacctacctcattcctctgtagtaaatagggatgcaactcttaatgatacagcagaggagttggtggactccactacaaataataatgtcaatgagccaaaaggagatattgaagccttgcgtaacaatttcttggagtcaatgtcactggaacttgaacctgactttgaacttactgctgaagtggtaaacactggtgtattggcgagttttttgggtggtaatggtgtatccaggtctagactaagagaaattctcagtcagatttggaagctaaaaggattttggaagctcaagtcaatgaaaccaggggtgtggggtattttcttcgataaacaagaggattgtaaagccattctcagaaacagaccatggataatcaacggaaagcttttgatcattagagagtggcccgaggatggggactggtacaacatggatatggggaagtctgttttttgggtaatggcctctggtttacccactccgtatctcaatgctgtcaataccagaacgattgcttctaaagcaggggtcttcataggaagtgatttggcaaaccaaaggaccattacaaggaggggatttctaaagtttcaagtagaaattaatacttctttccaactcatatcaggtttctttcttgacataaagagaggtaggaaagaatggatacaatttcgttatttcaaattaccaaagttgtgctataattgtggctaccttggtcatgagaagaaatcttgctttcgcacgactgcttatgcataccctcctcaaggtgaagcggttccagcttatggaccttggatgaaggccgaaacggcgttttttagttgtttcaacacgcgcaaccaacttgatttttacagagaagatggaggtcggacggtttctccgacgaggacacctaccatggctggctcgcagtccaaaaaagaaggaaaaagacctatcaatggcagtgatgggaaccagaacctgcagcaaacagcttgcaaaccaaagaagaaggtaatcagggtcaatgaaagtggcccaggtgctgtttttggcaaaaatttgaaagttgtggagagttcaagtgtcaaaccaacgggtaaaggcaagggagttatgtcctgtgatgttcaacggcatggaaatcctggaaaggaaagaaaagtaagatcagtttcacctagaccactgcgaagacattctcaaggtaataaaggtactttatctgatgaggatatattaaaaaagttctcttctaggcctcctcctaatccagcagatagtggcatacttacaactattatggccaacattgggcctacttatgatcaaatggtggataaggcccatgttgagctttgtcaatctaggcagccccataaacaccctgagcccacccactttccttggcccatctatgctgaagaaattggattggctgaagaattaatgggcccagctcctgttgataagatggaaccaatacctacactctttcatgatccagttgatgtttcggacttagtacaccattgtcctcaaccccgaaagcgaaaggccagtttaactttgatcccgtgtgtccaacatacagaagaaaacaccattgagtttacaactgaagtaccagaccttcctaaattctctccggcccctaacacccctttcaagatgggctctggtgcctcatcctcatctctgaagaacgacaagcgtcgaaggaaaggatcccgttcaaagaagtcaatggccatggatactaacaaccgtggtacacactccacctctgaagccgatcctgctcctattgctcaggttggttctccaaaaaatctcattgacacccttaatttgattgaagttcatgttgaaagttctcaaaattttcttacgggcgaggaggcggcccttatcaagccccccc

SEQ ID NO: 310284 - DNA, 676 bp, Cannabis indica
aaaaaaagaaaaaagttaaaagtttcagtatgtggtataaaaatccctattatcttaaacaatactttttcacttcatgagtcatgaatttgaaaagggatcataattacattataatatggtaaaattttatggttgtctccctaacaaagatattagtggtgcaccccttatgaccatatttggataattatagttttaatatttttatgtgatagtctttatatagttatagtagtcattttaacaccttttttttttatttgaattatttgctatgttaacaataaagtgtattttagttcaagagcgaaacaatatgaattttagtatttttgtaaatttccctaatatttatttatttatttattaaggtaatacattttgagaaaaccatattacctcttgatagaccaaaaaaataaatatattaggtaatgaaaaaaaaaattaaaagtaattttctccatatagaactaaacctaataaattatatattttctccatgtaaattgggctgacaacattttggagtgggcccaaagcccaacaatgaatcttttctttaaattaataagcccaaatgaattgtgtttgttaagttggaaaataccacttttattaatcaattaattaaatttacctctaattttatatttaattgaaacatacctct

SEQ ID NO: 310285 - DNA, 712 bp, Cannabis indica
aaataatatctaccaattatataaatagaaataaataataacaaacttttagaaaatgcatgaaaaatacacgcatgataaagtaaatttaagaaaataaataataagtaaaacttatctcatgaaaatctttaaatttttgaataatcactacatttaattaacacactaaattaataataatattaaattaaaatatgagttttaattttaaattaaaaaattaatgaagaaaaacttatctttgataacatctttcttggccaaagttacatttacctcacaccactattaggataattgttaaaaagacttaaactagcagatggtactaaacaaacaaggcacaccaagtacaaaaataaattaccaaacacagcacaactcaagccacaatccacaacgggtataaacaaagtatcataactataaactaccaaataaaatataaattaacaataattataagaaatattattggtaaaaagtaattataaaaataatattaaaaagtaataaattaatatttatcaatgtaaattctttgtatacaaaaagtctcactatttgaagaataaagcccaattgaaaggtctgagacgacccataaagcacttgattataatcaaccttacaagcctacttgggtattgaacatttatctataagaactgaattttaggcaatgtctaattgttgaaactccgaaaag

SEQ ID NO: 310286 - DNA, 2067 bp, Cannabis indica
atggatgatggctgagccacgcgaagaagaaaaaaattggtgcacaatggttgcatactgaaacggagactgataagcattttttagatgagttcgagtcctcaggtgaagcaggtcatggtgtcgatactggaaatcagatatcccgtgaaataagggactttgttggcaaaaattagggtatgaatggtggcaaatttcgcaccatgcatgatggagaaaataatggcgttaatagtggaagaactggttacaaccaaaatagttagatgttgagagcgggaagagaggaaaatttgaatatacctaccttgattgtcacaaatacgaaaaggagaaggacaaataaggaaggtcatgatgttttgagtgatggtgaagaggatatgagccctcactctattgggctctcaaaaattgggtcattggtgggtcctggggtccaggcccactaaggattatgagtatccttagttgaaattgccgtgggcttgggaacccacaggctatacaattctttaaggatcttgtgatcaaaaagtggcccaagtttgtgtttttgtgtgagacacttagtaaaaaagaatctcttgaaagactcagagtttctttgggttttgaaggactctttgctatcaagggtattggaagaagtggaggtatagctcttctatggaaaattcaagcagatgtacatgttatgggtttctctagcaactatattgacgtgagtattcttaatgatgagaatggtgtttggcgtttgactgggtgttatggtgagcctaatggtagtaaccgtattaaaacatggactttacttagaaatttggcggagcaatatgatcttccctggtatattataggtgatctcaacaatgtggctagtcatgatgataaaaaaggtggtaactcataccccgagtggctaatcgaaggctttaatcgcaccttgaccgactgtatattgtgtgatattgagttgactgggtatccttttaagtgggagaaaggcaaaggcactaacaactggattgaggttcggttagacagagcccttgcaaattaaaaatggctagacatctttaactcagcaagactccttaatttggaagggtctagttcagatcattgtcccattctccttgatacctgtattggtaattttgttgctactaagaaaagatttagatttgaaaatgcttggctaagagagccaatgtatactcagattataggaatcatctttcactcatcatcaataggaacggacagtgtgacatactattatatacaatgaatgtgcaactagggattgaatgctcaaatcaagagaaagggtagcttgtaaagttggatatatatttatttatatctttttatttaaatattattataaaatctataaataaaaagatttatgcccgcgaactctagatcccgatcgttattcgctaaatcttctaatggataaacttttacttatgcttgttctggaacgggctaggctatagtagaacggatgccgaaatattgttcaaatctatctatttcatgcttcaaggattaaaactgttctcttcaacttcggcttgcagcctagtgagttaggtcaaaaatttattgttgcggaatggaataagttgaaattcaaagacttctatatgccttgggttttacaaggagtaatatgccttttttaagtatttgggtattcttatttgtgcgaatagacttttgactgcacaatgctcatgtatctttgagaaatggtggctcgcattagagtgtggagctcaaggaatatatcttttgttggaagaatcactcttattaattaagttctaatgtccattaattcattgcaactaggtccaaataatgttgctctcaaagaagattcttgaaaaactgtatttttgtaaatgtcaattatatatacgaaaatacaaaactgtatgcttctgcagaagcagaaagtaattctattactccagaaaccagttttgcagtgacaaaacaaaacaggcacaatatagaaatatttgcagaaaaataaataacttg

SEQ ID NO: 310287 - DNA, 767 bp, Cannabis indica
gtaagagataagagtggatgctcccaagagagagagagagagagaaagtatgtgcttattatctatgtcaagtcttaattgtacacaagtaaagaaatgtgtctcaaagtcttgtaaaagctaaacaagactatgagagaaagctttatttaaaagggaaaagatacaataagaatagaataaagaaagcattcttaatagaaaaacaaatagctagctgtctttaacagactctaattgacaatacaacaaaactagttagctactatattatctcccccatcaagcgaaaaggtgtagaccacatttttaacctggattttaggtagacaaatctatccttaagcaaagcttttgtgagtatgtcagcggtttgatccacagaggaaacatatcaaacctccaattgtcttgcaagaatttgatcacgcatgaaatacatattaattttgatatgtttggaccgagcatgaaacactaaatttacagcttgagaagtctcacttgattatccacctaaataattggtactacttttggagtaacttgcagctcatgaaaaacagaagaaagccactttatttcagctgttgtattggctatatacggctcgaaattctctttcgatacttgacctggctatagcatgttgctttttagtaaaccaagacaccaagttatccccaaaaaatatagcataaccccaatagaatgttgttaggttatttttagtattaattttagattaagtttagtatatttttaat

SEQ ID NO: 310288 - DNA, 834 bp, Cannabis indica
ttttttttttacatatttatgagatttggatgttacatgttaagtggagtatgcattatatgaaatattgataaattacgagttttaaaaaataattggaattttcttctagaattatatttatctaaaaatttaggaaaaattatgcaactttactttttatggatctcaatttcgatgaaaattgagtgagttatgaattttttaaatttagaaactatggcagccacacacttggatgacatccgagtgcatgcacgcggatgcaagcacaaatgcctagttttctgggtgcatcagctcgtgcacgcgcacagaaccaatgaggccatgcactctcatgttttccttttttttttgtttcttattttatttttgccatatcttttgatagaaatgtcatttttttcagtttttctttttactttggggagggagatcaaacttgaacctcctctttatgtggagaagtgtagaactactaggctattcctataaccacatataaatgtcctttttggatgtttcaaaagccaaattttattaatttttcgagtactttccattttaaaagtcaaaattactaaaattaggataaatctatttttttattattttttaattaatagaagataaattttagttttaggattctttttgacttaagaattaaatggaatattttaaatatggttagatttgattttatattttaatattaaataataagatgagatattttaaatatttgatattttaatgttgaccgagtttttcggcaactattaaaatataattataataaggagctgtaagaaagtgagatgaagactt

SEQ ID NO: 310289 - DNA, 2950 bp, Cannabis indica
aagatactaaagattatatttatgtatattttatgagatgaactgatattttagaaatttagttgactacctaagttgtgacttcactggatatattgatcacataaatcaatattcgattacatccttaagattactagtaagttgtatcgtggagaatcttaatttctatttccattattgaagtcagattcatttattattttgatgatacatctcgtatggtgtactgtagagtttcatactagacctagagtttagcattttatttttaggtcattaggaaaatttcgtgataaattcaactacaatatttatggctaagaactatttaagtaccggtcgaaactagcatatcaacattaagtatttagtcatagcgtaagtggtcattaagcacgcaatactaaattggatgattgcaatatcattgactaaaggcatgctgcaacacaaatttttaaggatcgtaaagtaaatatgagattcagttaccccttatgtagttttttgttgtacaactaaaattattaatgaaactcttattttgatattttctcgtatttatgcacatcttaattttacatttgagaaaattttagaggaccaaaataaacataaaatttagagtttatttacttaagtacattgccacataaagtgcattattatgtaataaatatatcgtaatacatagaagataatactcgagaaataatgaggacctatcgctatgattctataaacgcagatttttatcaaccaaaaatattaaccattttgtaataaatataccacagaattaattgtagtaataaatgaacaccaaaaagtttttaatgtagttttgaagttgatttttcataatccacgagtccatcttattagaaaaagtatagggagtataaaatacaatagtatcaatgacaattctctctagatttttcccttctttttaccctgggttctgtccctatttatatatgtgtagggtgacagttattcccttaatatctattcattcataactgctcatgaaatgtggacatccccacattttattattgtgcacatgggataatgttaaataactgtttaactgctcttctgtcattatccattaacggttatgctgactatactgaatgatccttgccaagtgtacattatccttctttaccgtctttatagaaaaaaatgctaagtatagagatgtaatgcttcccacagttctcttttatgaccttggaaggtattagcgaggtggttacttcaatgtataaagagcgagatggacgaatgttgttattctttgtacatacaaatatgtgggtcaattaactgcaagttctttagtcatgagtatgtgggtcaatgaattgcaagctcttattcccgagtatgtgggtcaataagttgcaagctatttgtgtaccgtcttgaacaacttttattatgtattctgtttattccgagatagtcttgttgtcccgccaatcttactcatttatagttattattcttatctcatacttgcctaagtagcagtgagtttgaatatttctatcaaacgtaattcttaagatgagttatttactgtgcatttaataatgcaattattaagttgattcatattccttctggtacacgtgttagtttctggttgttagccgaaattaaggtataccaatttcctcctaaaaagtgcattttaataaaaaaggaccttttaaatgtcttcgagggtattattgtatttttctcatttaaaatttacatgctttgattttggcaattcaaaactttgaggaaaatcatttctttattaaatgttctgactattcttttctcgtacagctatcatctgtttgatcaattttcttttgatcaaatggttaccatcttttaggtacaaatttcaaactttccatcattttcgctatttcaacccacgaaaccttccagctttgaaaatttctcaaccaacatcttctctaaacttgcatgccctctttgtctttctattattcacgttttcaaacgaaagacacgtgtcatgattaagagaaaagatgtattaatttagaggattaatcagataacttataaatctctcccatagatatctcgacgagtcgggggatatgcactgaacacctaacgagaagagcaatctatgaataaataacatctatgggaccgggaggatagctgaagtatatggcctctgggtggaggcctcccgtgtaatggtcgcggggcatgacagtagtctcaaggccaagaactacgtcaacttcgtatggaaattgctctataggaggttatagctttttctaacacaagatcaaatcttaccccccatgataggccattgtagtgcgcatactcacctctagacatgcattttgtccaacggcctggttagagagtattttgtaaaggagaaacctttgaacgatacgtgtcctagtttgtacaaaatctcccactataggtgtacaccacacgatggaaaagcttcttatcaaccaatggtcagatcgtcttgacggtcgtaccaacccttgttgtgagtagagcacaaaatcctaggtaggtaaagagtgtgcctttgcgccatgtctaaatacctctactttctatgaacaaaaggtgaacaatttttaaatttttatattaaatatcatattttttctcattaaatttccttatttattgttcccatatttatataaatacccaataacataatagtagtaacataaatatagttaaaatatctaatctgtaaaaaaaatagagattttttctataataaactgaaaatggaaaaaatttacatttatgacctacatagagaaaataaacaaaaatagaaactaaaagttgttatttacaaaaatacctaccaaaaaaaaaaaacagaggggatcctccttcttcgtga

SEQ ID NO: 310290 - DNA, 1394 bp, Cannabis indica
aggttttgtaggaaactaggtcaaggtggcattggaggtcactatacttattcaaaatgccctcgatgtaagaagcatcatccgagagagtgtaaccgtaaaacatgtttccaatgcggtctagtagggcactttaagagagacttcccacacctgcagaaggaggaaccagagcaagaggcaaaacccactccatatttgggtgtttaacactacccaaaccaatgctgaagatagtttttcaatagtgtcaaattagtttctagtcaactattctatttactctatgttaattgattttggagctacacattaatatataataattagggtaattaataaattggataggccttgagatagatatgaaatagggtttggaaccctgttgccttatggaggattagttatcttcaaaaggtggtttaggcctatgccgattagagttaaggatagaaagttgaacactgatctcgtattttgggtatagcagagtttgagatattactcagaatagaattaccgtctaagtaagttgctagtattgattgcaagcaaaaatggtaacttttcaacctgaaggcaaaggatcgttcgtacgtattatggtatcgggtcgagcttatcaaactccagttatcatgatgttaaaagctagagatctatcgctggatagatgcatagaattattagcagtggtgttagataccacctagttaagacaattcggcttatggacattagagtggtataagaattcttcgatatatttctcagagaaacttctaggattatcactatagcgagatatactttgtttcttgttttgacatttgaagcagaggtggtttctaaggcaccatatagaatggctccaacaaaactcaaggaagtaaagtggcaacttcagggaatttagacttagggtttacctgacctagtatgttactgtggagctccgatgttatttatttagaagaaagatggatcgtttcatatgagtgtttactaccaagaactaagcaagttggaaattaagaataagtaccatctgtcaaggattgtgctatgatttgtattacaaaatataaatatgttaatgtatattattaatgtagtattgttttttttttgaagggaaaccgatacaagttaaaattacaaaggtaacaaagttacgcaactagaggaggattttcttattccatctataacaattcattgtctattctaagggcattcaaagataccccaggagaactagacaataaaaccataatatcaaaaaagaaaacctcaaaactgagagttgtcacttccaatccactagtagaacacctacaaaataaagagaaaaaaattaatacataataaatatttaataaaaaatgaaa

SEQ ID NO: 310291 - DNA, 1002 bp, Cannabis indica
ggattcaaatatttttgttataaaaagaagaacttttccaagattcccttcaaaatatagaatagcaaaagctcaaaaaacaaaagtaaatgtcttactcaaccaatgtgaaattggaaccaaaactgccttcaattcatagttcatacctaccaaaaggctttatctatatataaccttcatatatgtatatatatatatatatttctctttcttcttatatacttgaacaaaaaatatagttaaactcttattatagctatataatactctcaaattgcttgccaaagaatatgaatgaaattaactcttgatgactctatttaccaaatttgtttctccaaaccccaagcatttcctcctcggcccgaaccactttggttgttattaaccggtgcgcagttccactgcctcctccttcctctatatccatattctctctgctgatagtgattgcccgaaaatcttgtttttcgatagccagagttctgccaagcatagtcatcgttgttcttccaaccgttcgtaccccatgtctgtctccgttccctagaagaagtatcggctttgaaatcttcttcagcatcaccccatccagttggggcaatgtggtcaaggcttaggttgatctggttgaggttatgagaattgccaaggttaagaaccttctcatcgtgattagtgtaatcagacggttctggttttctctccaaatcaagaagtagctcgggatcaatctccgagttccaatcaacttcatcaatgtagatatctggatcaggtaatactacttcagatgcaaggccattaatgtgtgcccaaaatctgttttttgcttgtctgaacgcctcttctgaggccgaatcgttccattttacaatattctcatgtaaatgaatgtactttttcgtgtccaatactttcctccatggaactgaaccaactgtgtaacagaaatccttttcccatttcgggacagttgactgccaaatctctacaaaa

SEQ ID NO: 310292 - DNA, 1347 bp, Cannabis indica
aaaactgttatgttaagtactaaccagttctcttcttgtccattaagtggtgtcgatcgattcaagaggcaattcgcccatctcgaggaacactttgctaaaggcgatagaagcaagagtggaaaaagtactccccttcaaagacaacatgcttcccttcctaggtttgtatcacttataactcgatattcgattgattggtatgaggatattttcttgttgattttatttctctttttgatcagaggacgtgttactgtcccgaaggaaatcctcgacgagcaaaatgatgatttcgaaaggagaactaatgcttctgttgcctcaactcttgatagtccaagagcacaacagcctgatggtttacagagcgtaaatacagacacgcccagcaaagcaaacccgaacgttcgtagcttgttgaagagtaatagcattagcgcttctaagtgtataggcatgaaaacaacaacgaaaactgattcagaggtaactgatactacaaacttgatactataatgtatactgattgcttaaactgattacttatcgatcattgtatgttcggttattttatgcaggatgaaccgattgctgaggttatggatgaggcagttgacgggttatctcagaacgtagcagcgcttcgtgcttgattctgtcacatgttccttcattatgttccgaaggggtgtgtttttcgccacaattttattatgaagaacttcattttcgcttcgagtttgatcctaagctaacaatatcgaaaagatgaggtttttctcctgtaatttttttactcttattgatttttggaaagaaagaacaagagataatattttgttgcacaatgtgtaaccatagaaaagaaaaaaagaaaagtactaaagtgagaaacattgccattttgtttttaatgtaacaaagtttattttcactttgttaaggatttttattatatatatctatataatagaaaaaatgttttttttttctgttcttttttatgttattaaaattatattttttatttcatgcacttgttttgtttttctttgttcgaataattaattttttattttatttttgttgttttataattgcttatttatcttagaactttaaggttaaaaacaaacttgtgtagtcatgtttttgaatttattggatccaatccaacaagttgtgttgacatgagattttttttatgggataatttaaagagaaatttgattttatatacttaaaaaataaaaaaaatttattattaaaccaaaacttttcaaaataaaagaaattatgacatttttttcaaaccctaaaaatacccctcacaattctctctct

SEQ ID NO: 310293 - DNA, 949 bp, Cannabis indica
ttggttgaacagttgtgcaatgtcaattgccttcaagtcttgtttccgctggccctccttggtttttaaatttatcattcgagggaacctagtgccactacaatcagcatacttctttcccactttctttatggcttcatctgctcaatattgtatggcaggtacatagccatgtacggtatactttgcctcctgagcaatcttcttgctctttttcttatcaacgttcttcttgtaacgtgtcatgtccttactcatagaccacatcaactttcaaaaagcacgctcaccccacagatttttgaagaagaattcgaggtccttaacaaatttcaacatctctggccaaacttggacatttccttcttttgaaaccaatacacccttaataaaagcgataagatcaagcctgtacacatcttctactacatcacatctctccaattggagcaatagtgtgtccaactacacaccactcttcccttcaaaatacatcctcactaaatggtcactgaacttggcttctatctcttcctctgtagggccactacccataggtaagccagtaatcaatccaaactcaagctgcccgaatctcatgtcatttttaccaacataaaaccatatctcatcttccttctctgtttcaacttttatcttctacaggagtaggctgtggaccaatgtgcccgggaaagctaattctccagcttcctagaatggtctgaaagggctggccaaaaccttttcagtcaatatcattgcttcaaacttggctttaatatctttaaacctatttgagccccaataagttcgatggcctgtgaaatactcggtcactagcagcttaagttcaggagccatctgcaaaatttatgacaaaaaaagagaaactattattaaaacacataaaaaaaaagtgttccaaaatatcgtaaaataaatcgca

SEQ ID NO: 310294 - DNA, 2155 bp, Cannabis indica
gttccaaatttcctcataaattatctttcccacattcattttcttgcccgccaggatacaatacaataatagaggcgtgtctgactcactgtggtgtcatgggtcgtgggcatcaaagagcacttaataaaagcaagccaaacacacgcttcaggccgtagagatgagtgtaacaaagtgcggtggcttgaagaagagacagaccattcagaacctgggtgagcaacagtacgaaggacggtgtcaaatgggatagaggctgggttaatcttccaaatagcaaactcatccttaagtggagctgcctatccatataagtctttaatcacatcaggaggaaaggggacactctgacccctcacccgaacgacttcaggatactttggatcaagtgcagcataaaattcaggggcaactgaggccacagcaggtttaggaattgcacaaaatttctcccacttttgctccgcaatcaaatttgtaatatagacaagtaaagcctctggggcagggagaaagccacgctcgaccaactggttgcgggtttgcaatatctcaaactgctcttgatggcggacagggtcggctttggctttgggacgagtagtgggcttatgtttaggtggtgggattgtggaagtggtgcgcttaggctttggttggcccttggaggtagagggatctgttttggcagttggagctttgggtttaggtgaagagactttacggggacgtgtacggggtggtgagtgtgtaggttcgagaatggttggtattggagtgggagaaggcaaggcaagggttgatgggattgtgttgataggttgttgcagtggaggtgtgagcgaggtgttggccgaagctttacgcttacgagaattggatttgttggttgccatggctcaatatcacaactataagctcaagaacctgtgacagggggcaaagatatctgctacacaatctcaacaatatcacagaacatcaacaaccaaccaaaaacacattgagtttagcaacaaatcaacccattgaagtgacaataacaaccatcccaattgaatatccaccactagaatcaaaatcattgttcaccacaattaatcctaaagtattttgatattccttcttcttctaaacagtgtagattctcaaaatgcaatatcccaacactaaaattatcatcattaatcaaaaatgggtagcactttcaacattattttcacaatatattagaatagaattctatcccaacaatattacacaccaaaataagagagaacgatctcaccacagaaaaaattcaatgaatgcaatgccggcactgagatatcgtggagtacgcggcggctggtggtcgggttctgggtaaacggaggaggaagcactgggggtcgcgactggcactgctggcgaagggttcgtcggactggggaggtcgggttcgaatggtggtttggtcgaatgggggagggtggtggctgatggaggggatgggtttctggtgtggacgggggcgaaatgggggttggctgggtgtagtcgcaccttagtcgggttttgtgaaggttgagcaagggacgatgggggcaggtcgaaggttgaagaaaggggggtgggtctgcagggttaattttttgaaaaaaactttttcttttgaatgtaatattaatgtatattaaataaaaatattattaatatataaactttttttataataatagtaataatatatataagtaaaatactagtaatatgtaatatataggcctttcctctcgtaattgaagtgatattacgcctgctgaagcaaaatttctacaaaagttcagcaaaaatcttgctgagtgatctttcaacaggtatctcttttgctaaaattttgctagaaaaatgctacagcatgcaaaggttctctaaatcaacgaaaaattcttttgtgcttcaaagaaatgctgcagcaaaattccatcaaaaatttagcaaaacctctaaacttccaaatcacctccaagactccaaattgtgttccaaaacaacctgaaacatcaaaccaagtgtaaaatccacccaaacacttaaaataaaaattaacaataaaataaaataaaataaaaataaaggaaaatgaagaattatatatatattttttttt

SEQ ID NO: 310295 - DNA, 1384 bp, Cannabis indica
tggttttttttttttttgaaacaacatttagtttctgatattaagaatattaaatttaaaaataaaataaaaataaatgtaatgcatcttaaccctccacgtgtccatatttatgagttaatggaagtggtagtaacgatataagaaaattgtaacattaggtatttttgcatccaaaaataaacattaggtatttaagtgtataaaatctaaaacattaagtatttatgtcttttagtcttattgttttatatttcatctttgtaaaaaaagagaaagtttcttatataaaaacttagagtgttctactaagtttatttttttttttttttagttaaaattgttatttcactgtcttagaatagtttgaagagcttcattgaacaagctagagaagagtctttgaaagaagatttctcaaagactcactttggaggaagtgagtgcgcacatatcaaaagctgaattcagttttctgtttggtgtgttcagagatcagattgacaaagtgaattacaaaagattgtgtcaaaattttagagggagtataaacatctttaagtcaattataattgtaatttttgagactttactaattgattttattctatgagcgtggctcggtggactattagtatttaaaaggatactaatataacacgtataattttcttgtgtgcaagttttcaattttgcacaatttatttatatttctgacttgttactgtaagtccgtattttgaagtagcaagtttccaacctgttactgcaagtcattactgttacattttaaatatagttattgaagaaataaattggtaaatgcaaaaacattatttttcgatgtgtatcaaagcgagacactaaacgatcttagtgtggtcctttgatatttcttgtgtgtttttgcaatatgccagttttacataaggaagttctattcctcgtctcccacttctcaatgattctaactatctttattggaaggatagaatgaggcattcatcaagtctcaagataagaaagcttggagatatattcagtctggttggtcacatcctgttatgatagacttgaacggtaataaaaaactaaaacctaaaattgaatggtctaatgaagatgatatgctgtatgcttgcaataataagattttgcatgctatttttaatggagtatgtgaaggttttattaagcttataccttcttgtgaatctgctagggatacttggcaaattcttcaaacttagtttgaaggaacttctaatgttaaatgcgctagatttattatgcttcataccaaatttgatgatcttaagatgactgaaaataaaacattgtctaagtttgtgcttgtcaaaaaaattgttagagttgttccaga

SEQ ID NO: 310296 - DNA, 1987 bp, Cannabis indica
tcctaataatcaacgatcctctaaagatgatctacactgagtagagacaaatttaccgttacacccttcaaattttatagattttgtggtaggtttacctaagagcaccaaattttatgattctatataggtaataatggacagatttaccaagtcagcgcactttctacctgtacgggtaacctatactatggatcaatatgctaatttgtacatcaaggaaatagttcgactccatggtgctctaaggtcgattgtttcgaatcgtgatctcaaatttactttaaattctgggagagtttacagaaagtcatgggaaccaagttgaaattcaatatagcctttcatcctcaaacagatggtcagtctgagagaactatttagatattggaagacatgttgcaagcatgtgtgatagattttgagggttcctggaacaagtttctaccattgattgagttcttgtaaaataatagttattagagtaccattgccatggcaccttacgagatgttgtatggtaggaaattttgatcacctattcactgggatgaagccggtgagagacagtaccttggacctaaggcagtttagaggactagtgaagccattgaaaagattctatctcatatgcttgcttcacagagaagacaaaaaagccacattgatccaaagcgtagggatatcgaatttcaagtgagagattttgtatttctcgagtattgcctatgaaagggatatgtagatatgggaagaaagggaagctaagccctagattcattggtctttttaaaataatggagtgaataggccaggtagcctatcagctagcttcacgtctcgcgttgtctagagtgcataatgtgttcatatctcatgctgagaaagtacgtttcaaattcgacacatatattaagctatggtgatattgatattcgaacaaccctatcgtataaggaacaacctgtctaggttttggaccaaaaggagaaagtacttcagaataaggtaattccactggttaaagtgttgtggagaaacaacaagtttgaaaaagcaacttgggagttagaatcgcagatgcgggaacaatatcccaagttgttcaggcaaattttgaggacaaaatttctataaggggggatggttgtaatatcccaaaaacctaattataaataattaagatttattatataatatgggtaaatcaagtagtaatgagtaggattatgatcctactaatttaatatagtgtgaattataaaatttttctacaagtggataaataagcgtaatttattaattacagagattatttagaatatgtgggtataatgtgagttatttgtagaataaaaatattttcagatttggcgaccttggagacccgatcagaggctaaaaatgtcacaacgagtttagttaataattttaatgggattattgtaagttagctttagaattatcggagtatttcagggtactcggagttgaccaaatgctctagggttagagttttcttagtggccaagaaaaaaggtaaaatgattggttttatattaaaattaaagtaattttattattattattaggggtgtgcataaatcgatccaattcaatgaaaactgaccaatccaattacaaccgaccgccaaatattggtccaattgtgatcagatcggattagatgttatttttaaatatccaattggatcagatcagatgttgaatgggttgtccaaaaatccaatacgtccaacattcaatcaaactaattagtatttttatttagtttggatgcgcaattagatttgatattgtgatacataaaatatatatgtatgtatatatgaaaattaacattaaaattttactatttcttggattggatggatccaatccaatccaatacatactggacctaaaatattagatggatccaatccgatccaaaaaatactagatttaaaatatgggataaacccaa

SEQ ID NO: 310297 - DNA, 1857 bp, Cannabis indica
aaatattatattaatttactataatcatctcaattattatgcactgatgcatccctagctgttttggcaatccagtaaaaaatttagtgtatttttttatagtcatgtatgttaaaattatttaacacatattgtaaaattttgagaaatttggaataatttacaatgtgaaaagtagtgttgaatagtctatctcacacgtgtataatataaaagctaagtaagagttttgtcccgctaaattattgagattattagattcaaggacttagtccaattctattcaatttgactaatgtcaagattgtacatgtataagattgtgccacatactttgatctttaccaaatcgtgtccctcaaactttgacatataccaagtcgtgcccctaaactttcatccacatcaaacttcgattaatgaaattggacaaaagtcctcgaatctaacaatcttaatagttttgggagaatttttaatgacctaaaagtttgggggaaaatcttaattagcctaaaataaaagattcatgcgtgcaacaagttgtttgaatccatttttcggcgtgttaaatatttcttaatttctcaaaatttacaagttgtcttaaataactacagcgtaaatgaccataaaaaatgtaacatttttctttttcatgtgttatctttgttttcagcaaggaacacatggacgccagatcaacatttaaaacccatcagtaggctcagaaaagataacttgggtcaagtccaagtcagacacgaccttctaggaaggtacttaagcatcatgatcagataagcttctgacaagtaatccctacctccgaaagcaatttcagtaccgtgatcctgaaaggccgacaacatgttcctagaagactagtgtagttttcctttttattcaagtgcacaaattaaggaattaatattcctcaaatctcgatagaaggttgtatcaagctaaaaagggaaactacttaaaataaagatcaagtaattaattcataattaattacccataattataggacacatacaacttaatcgtatcccatctgcctagtcagcaaatcgaccctttcgtgggctgggcttaaaaaagacagccccatcttatgtatttttatgtaaactccccattagagggaaaaaaataaaccaaccaagtataattctcataatactataaataccccttgaatcctttggactaggggttgaattctcttacaatattttctcatgtaaaaactgagaacttatactcattgtattctcagagggttttttagccaaaaatatataataatattgactagtggactaaggcttgttaatgccccaatcacgtaaaaattttgtgtgttgttcttgtttctttttctaaaatatttacctttttagttttattttattataacaggttctctaaaaatctcggtaaatatattaaaaatattttattttgaaatttgagtttgaaaattagaaaaattcgaaatttatgggaaaatcccacaaaaaattgcattaggggagtggttgcccaggaggctgcacgtgcagcccagacaagctacaagcagccatgggcacgcgtggatgaagcttgctacagggccctgcattgagaaatcttggcatttgcagggtttccgtgggcgagctgcagcctgggacgtgggcatgtgtgcctaagcgagggagcatcagcggcttcaaacaaaaaattgtctgggacacgcatacggagaggcttccttgtccgaagtacctagtgcgtgcgagcaccatgctcgacacctatgaacctgaaaaaaaaaatacaaaccttcataactttgttaatttt

SEQ ID NO: 310298 - DNA, 2403 bp, Cannabis indica
aatgttatgaccatccacgtttttcctagtcttgggtccataggtaatatagctcaattggcaccaattttgctaacaatattggaatagggcatatctaatgccaattctacggtagaggtaagacaacactcagaattttaaattttgtttaaacttgacttggagttcttatgtacataaatattcttttgactattctttagatatgtgtatataggaattctcaaggactcattacactatccacacgacacgagtccttgacatcttgtaacatcattatatattcatattaaagttacgaagttactcctaatacagaagactaagacattgcagtacagataaataggaatatgttagtatatcattgtattgaggttttatgatgtggtagctacgagtaattaacattaaatgagtcctgtttgtctaatttgttttgcataatacattgaacttgaatggtttgtcttatttctagtgttagttcattgccactcccacaaatctaatatgctggattagtgcacctagggtgtactgctacaccccatttatactaacagttactgaataataatattataaactcaatttttttttccctaagaatatagtgcttcaatgcacccaatgggatgtactgattcaaccctatatattttggcattcaaatgaaattttttagtcaatatatatgtacatattttgtggttgttatagttatttaaggctttttataaatttttgaaaaatttggaataatttataatacagtgcggtgttcaatagtcgattttacacgtgtatcaaataaaaaaaaaagtgtacatgcggcattgtttgaaccatgtttagtctttttacttattgtgaaaattaatgtacgcaagtatacacaataatacaattaataaagtgataagtaagatcgtctctagacggattgcaaataaaataaatgtaaaactaactagttaacaacttaaggtcttttgaaagaaaaataatttgtgataatcgatgattgatgaaagtaaaacaaattggtgacaatgaaaataaactcaaaataaaataattaatacttaaaaattatctgcaacaaaatgtatctatggaaaaatagacttaaattgctaaatttaatctatccaatttttcagtattgtttcagtaaagttgtacagagttaacaatatttcttctatgtttatgagaatttttcataactcacaaattaagttatatcacttagttcattatattcctatataaaattagattgcagaacaaaaattaatcatcaattttcaagttatgtaaggtaataaaaatattcatatccatttactaagaaaaatttaaatctaggtattcacttgcatcatccaagttgtaactactagatctagcctttccagaactagatttagcttagtaaattgttactcatggccaagtaataacaatcaataaacagtaagctcacttgaatgaacaaaggcaaagttgctaaaatatacttaaaaataatcatagcaaacataggagttcatagccattcaagcttcaagaggcttagctcatgttcaaaccaaaaaataatatccaaaataaaagttgatcatccatgactgctacttgattctttacaatttaacaaacttcaagtatttaaagaaagaaagagaataaaagaaagagaatagaaattcaaacaaatgaagcttgtgttctccttctttttcgggtgagttcctcttttaggctcttcattttcggtactgtactttctgctattaattttctctaaaaatggctgcttagctcatgctgaagaagatggtggctgtacttggtaaattgctagctccttagggtacaatgtaataccctaaaaatggaagctcattccttttcaatcttggcacattaggttttgtctcctccctctataacagccaagttacgccaactggctgttacgtacgtgctgatgtggatgaatgaaatttgttttgcaacttttttccacgtcactgtccagaatgctgaatttgttgcagcaatgcttcagcaattcagcccaattttagtttccactccccgctttatcattgcatcattttcttttccctagtagtttaattcttatttcctaacaacaaacaaccaatatttaattaaataaacacaactaaaaataactatttctacaagatttagaaattagcttgctaaataaaaattgaagataaaactaattaaagttgatcaaacaaacacactttcactactcttttcatgataattttagtttaaaggcacaagaaataattctataccatggagttattgttgggatttatgtccaaaataaaactcatttcaata

SEQ ID NO: 310299 - DNA, 579 bp, Cannabis indica
acagctcagcgtccggctatatgacgataaagacagcgctcttgggaggcaacccaagtgttttcttttatttttcagactttttggttatgtttttagcttatgttttagtatttcttgtattttaaatttttagttaagtaccagacattaaatttttttttccagttgaatcatgaaaaatgtgaaaaaaaaaattatttttggaactaggaacccagtggtcgcgaccacctagtcctgggtcgcgaccctggtcgcgacttgaggttttacagaaaccatgaaattttttggttctagtggtcgcaacttgggcctttggtagtcgcgaccctagtcgcgaccagccacttttccagaaacacaaaatttttgaatttaagctattcacgaccagcctttgggctggtcgcgaccagcttacgattttctataaataccccaattttcccccccattcaaccctacaccaatttcaaattccttcttcttctctcagcgaaccctaacccctttccaatcaaaaatttcaaatttccttccccaaatcttcaattctttcatcttcaatccaat

SEQ ID NO: 310300 - DNA, 996 bp, Cannabis indica
aattatatattttaaaaaataaaatatctaaaatataatggagcatttaattaaaaaaaaaagtacggaaaagagaaaaaaacaaaagacaatttaataacatgtttactaataaacaataagaatcaataataaggaagtcaatcccttattatattaaatttataaagacaattttatcttttaaaatatatattacaaaataactactatataatatagtttaatgcaaaagactaatttaattaatttaagcattccaattatgtttcttaaataacatattacaaattaattttgattattttttatttattttattatatttttctattattttatttaaattctaaatactgtggagcaaacttctcaactgataatatcataatttataaacaatatatataaggaacgacttgggttttttatttttatacaactcgtatatttgtcacttgaaataatttgattgtgatcaattaataatcagtcttatttaattgacaaagaaaacgatcagcattgcatgggagggattaacattaatattttcaaactatttgatacagaattaatattggtcattaattaatggtgacgtaatgaattaatgttggaaatggcagtaggtgattagagtgaagattgatacgtaccgttttgagtttttatggatattaattatatctatatatatgtatggtgatgttaatttcgtagctgtgttcatctctgtccccatactggtaaaaatttattatgaccacacatatatttatctaagtgatacaagtcacagtagttaataatgtgagtttattcatgaactggagttagagtgagtgagaggaataaacaataaatagagaagtaaaattaattgttccgtatctaatttaagctttgaaaaatgatcagaattaagttggttttagaggaagatatatatataatatatatatatatatggactttcatgagtgaaaggtaact

SEQ ID NO: 310301 - DNA, 714 bp, Cannabis indica
agattggctatatgtatatatatatatacactcgggggtgtgtattagattttacaactgattgctgaagaaaacccaaaaagaaaatgaattgtactcagaattgtcatagttaatttcgagttcttcagagtgaggaaatagataatcctgtaaaattatatgttgataggtagaggaatcgagttacacttaaagaaatgcaatacaagattagaaaaatgtatgttaggaatttacaaaattctcaattggatttgatcatatatagttttatgcaaggaagttttgatattcatgttctttgttgattaattacatcaaatgttggggaaattagcagctaccagttttgagattatgtttgaagctagccatttggataattctgaaagattctcataaatcttttgaagaaatatttttattaatgaaaaaaaaaaatctatcaaagcttggctgtgaaacgctgtttaatcatgcttgcgtttttctcctctcgtaacatctgtatgtatggatttgtgcatctacatgtgtgtttatatgtgtattaactctcttttgttatatttggtttaggctgatcctgaattggaagctatcagacagagaagaatgcaggagcttatggctcagcatggcatggtaagcctaatggctcttcgttattatgagtacctttttttcttttaatgtatagaattttttttt

SEQ ID NO: 310302 - DNA, 1497 bp, Cannabis indica
tatcaactagtctaccttggagaagatcgctgatgagatcctagcctctcccagcagttctttcattgaatcaccttatcaggtcgctagcttctctgttgcagtggtccagctccgcctggtgagatcagaggatgtactcttggtcatccatccatctcaaaattttcatctctattgtgcaaatacatcacaatcaacaacgtgtggttcttcagtttggctgacttggcaaatggtttctctaagtctaactaactcaagatcttctcctaagtctacatggggcttgccaatgtctggctcgccgattcttggccccgtctctccaacataatactggggatgagggacgtttgtggtgcctggaggctactccatgtgggtccttccttcagtgggaggcaccagtgtaaggtcctccctaggaggcatgggccgatttttcaaatccatcaaaatggttgtgtcaacctagccaactatggtggccaaatttgtggtgtctaccatgatggcaggagtggccacatctgtggggttcgtgaagattctagttgtaattggaatacgaacattaggatctacagtcataaggtcttaaggaagacccgatgaggtagatatcgtagtcggagttctccttgtgttaaccatgacattttattagataaattaacaacccactttcaatgaaagtaccaaactattggcctcaaatttggccaagcgacagcaaagtcaaatttaatactgatgtttgctacgtgttacacaattagaacaataaagtaaataaacacaagattttatagaggtttggcccctctagttagagggtaaggacctactccccttttagttgtattgatatcaagagattatactatttagatcactatattgataggatctgaagtagctctctcaggattacaatgtaggaatgagagttggaaaatctcaagtatgagtgtagcagtgggcgtgacagagagaaaggtgagttcttagacttagagctcaggatttgagacttaatgacttagggttttagggttcgactaaagctctttatataggagagcttacacccttcaaatcccttagaaggtaaaataaactattatttatatattaaattaataaaatacaaatgactaaaatgcccctcaaaaataaatatattctctctattttcatgggttgttaaggcccaatttgtggtttgacttgttatccatgtatgaaagttgtgcacaaaaatcttgtcagaccaaaggctggccggccatgcacctgcagggtgcatgctggccggccatgcacctgcagaatgcatgctggccggccataggatgttcagaagctggccggcctatgctagccatagtgccggccaggggtggccggctagcccccttgaggtggatggttcatcacttcgtcatcctacttgagtactcagacccctcgttggttgaagtgctgagtaga

SEQ ID NO: 310303 - DNA, 1591 bp, Cannabis indica
acatcgggaagaacctggacgagcagctcaaatagcagctaataagttttttgaaggcaaaccaagatcaattcgcctggagccatggagatatgatatggatcgaccctaatataatctgccatcatttaaatgttaatccaaactacccagcgaagagacagaaaaggagacccttggatattcaaaacaactttaaatgttgatccaaactacctatcgaagagacagaaaagatattcaaaacaaatttattctatacataaattgaatattcttatatatgtagtggtaacatcttctcatttttttcatataaatttctctctataaattcatcatcttcttcttatataaatcacttaaccactcattctttgaaacattaaattcattgagaaaatgcctctatttttcttcaaactcttctattgttaaggaatcatagaccacatttttcaagatattcgttatatgttcatatgttttgtatccccccaacttttcaggtatcttcttcattatataccataaacaccaacgatgccgagtcttggaaaacacaacttctatagcattttcaattgctttggcttgatctgtgattatagcctttggtgcacattcattcatacatataaaccatattttgaacaaccaaataaatgtactagtatcctcatttgataacaacccacaccctaataaaatagaatgtttatgatggttaactcctacaaatggtgcaaatggcaaatcatatttatttgtcaagtatgttgtgtcaaacgtaactacatcaccaaactcttcatataatcctctactcctagtatttgcccaaaatatattttttatttacccatcattatctaaattcatcatttaaaagaagccagaattcttagcttgcatactcataaaataatcatggattgctttagcatctcctacccccaatcgtaaacgtttagctttatcaacaaaatttctgcaatctttttctaagaatagaacgttatcatgacctccagcttaaactacaaatgtttgataaaaatttgccacactaaccccagcacaatcatttaactttaactttctttgagctcctatacatatttctctgttgcatgtataggatcgtgatttagggacttaaaccatgattatgttcgagcatgacagaatttatcacgtattttctatcttcatacaaagtagtattaatttttgctttgcaatccgtttttgtctgtagattaggggtaagaaaattttgtttcatgtgttgtggttttctagctcgagaacatgaaatacaaacaaacttcactttactagataatgaattgcgacttgttttcattttcacaccaaaaccttcttatcttctatattttttgtagtatatatacatgtcttcaaatgaatcaaaatacatacctaatttagttttttctactatcttatttaaatgtattgtacttccaacttcctcactaatatcttcattagtagaagatgttagataaattaataataaatccaagatcaatctgtatataacatagaacacaataataatata

SEQ ID NO: 310304 - DNA, 935 bp, Cannabis indica
aagaaaataaagctaaaactttaagcataaattcgactatattttgatcacattttaaaacataaaagttttagatctcttttgcatctttctaacgaatcttgaattaactcatttggagtttgtatttgaaagttatgcatattttaccgagagaggtcgaagcagaaaactgtgtggtcgtgacgagcccacttttggtcgcgactaattgtggtcgtgaccacaatacatttggttgcagcaagggactacaaccccccccccccttcactttttacagccgccacggcaaggctattggtggtcgcgacgacgactttgtataggacatgggcaactttgccttttctcaattttgggctgaaattctctattttaatgaaaaggaatcgcgaattttagagaggatagatagaatggaaccctaaaaatataataagaataagaaggctcttggagcgaacgtgggcgatccatgacaatcctccatctagtttccttctcctctcttgatctcttatgtttttattttgtctactttaattttggatttgattatgagttaaactcccaatttagacatttgatggatattgtctaagattatttcatgagttaacattagttaattgttctttcttccttgattgtatgatttattaatctttgtgtttattacatgtctaagcttgatcactttatgcatgatttatgattctaatgtgaaatatgaaaagtgaatgttaagaatgctctaaatgaagaaatatagattttgatgtgaaacaaaagtatttacacagcttatgtgacttttaaattatgacttaatgtaaattgtatgttattttattttaaagatatagtagtttgtaacgtccccgcttcaagcctccattgggcccttacacccacggaatgaatggctctta

SEQ ID NO: 310305 - DNA, 924 bp, Cannabis indica
cttccttggctaattgattaaatgagtcttattaattaattaattataattttttttttgtcccaaaatatgtatttttctccttgactaattgattaaattagtttattcatttaattagttatattttcttttaaaaaaagtatctattctataatagtctattaaaataagatacattttatattttatataaaaataaaatatatttttcatcttattttttaattttcgtgagaatttcatattatttttcacatgatttctatatctatataataatataaagtaaagtacacaaaagtgtaggtgctttctataaatttttcctttatattttctaactttttgagaaaactatgttaatgtactaagaaaatataattattcaatttacattttgtaataatctcatattatttagaaagtatagtgggacattacatatacattataaataaatattttctcatgccatttaatttgtcccaaaacatgtatttgaacttacaatgtattttctttttgagtgtaagtgtagtatcactaacctatgtctatgactacttttaaatgataatttagactttatgttttgcaacatgaaatataacaatatcatgagtccaatattactgaaaataattatagttaagatggattcagatcataatgttaatgaaggttaggaagagaaagtattaaggttagtaaaatttttttgaattataattagacttagtatatcgttatatatttttcttttttgacgcggtgatccaaatcacacatgattaacaaagcagtcaatccacaatcggcggcggcacctcctcgaaccaggatagctcattgtctaaccgaagagcatgttttgccaaaccatatgctgcaaaattcgcattccgagccacatgggacaaa

SEQ ID NO: 310306 - DNA, 796 bp, Cannabis indica
ataatttttttttttgactaattataacttttagccacaataaaaagttacttgtgacaagctgccactaataattttagttacaacaagtattgtgactaaatatacatttagtcacaacaaattgtaatttttgtgactaatattttagtcgtggacatttagtcacaattttttttacttttagtcataaatttgttgtgactaaaagtaacattttttgcagtgatacattatagttattgtagacattttgccattttcgaaaacttttcagtagtttacaatactaaaaatgaggtttaaattgtcagttgcattgcatgcgtgcctatttttttataagcgtgcaacaagctattctgaaatatattttcaacaccataaattatttagaatttttcgaaaacaggtgaaatggctactgtaactacaatatacaccatataaaaaattaggttatactttcttctaagtaccaaaattagaaaataattttattaaaggagcaaaagtgatgtccttacctaagaagcttccaataaatctttatctgtattagaaaaatttaaatccaatttctctgtatgctgtaacatgttaagtttattttctcaataaccctacatccagttcaattaaagttgcatagattttaggtgggttcgagtttgagggatttcgaaatccttagtggatgtttgatatcataatgacaaaacagttttttgtttttgaaaataattaagcttgtttggtcttattttttgaacacaaagttacaaaaaaacaagaa

SEQ ID NO: 310307 - DNA, 2244 bp, Cannabis indica
attgaaaaagcactgtagcgtgccttagcattagggcgttacaattgggataggtgaaagacatgaaaatttattatttaacctaagatttgttttttctccttctgttatatctttttctgatactaaaataaatgtagataacttttggcattacagattgggtcacctctcatgtgtaaatttttttcctatcaataaaagattgcatttcaaaaacactcattgttctgatttttattgctctacttgtcattataccaagcaaagaagacttccttttttttccaatcacaatttttccaaacattgttttgagcttatacatatggacatttggggaccttttcataccttgacacatgaaggatataggtattttcttactatagtggatgattgttctaggtacacttggatacaattatttaaacataaattcaaacccaagacagctattctagacttcattaaacttgttcaaaattaatttaataccaccataaatggatttagatcttataatgcaaaagaactgcaatttacatatttgtttaggtctctagaatcgtacgttatcattcttgtgtccaaagacctcaacaaagctctgttgttgaaaggaagcaacaacacttacttaatgtggctaaagctcttttgttccaatcttatatccctttagtctattggggagaatgcattagtattgcaacttaccttattaacaaaattcctacctctaatctcaaacataattcccctttccaaatcttacatggaaaacctccttcctatgatcatttgaaatctttcagttgtcttgcctatgcttcaatcctgaatcaaaacagatataagttctcacctagagctatatcttgcattctcttggaatatcctattggaatgaaagcttataagtttttggatttacatactagtcgtgttttctgttccatggatgtggaaatttaagagtttatatttccttttgttattgtagatggtcttccatctcagtatgaggatcttttactccccttgaatctttgcctgatgaacatatcaacacaacactagcagatcaatcccattcccctgtaatagagttatcggcctttagttctcgacctgtagaattactcaaaaatctttttatttacaagattatcactatttcttgtctcaatctcattataatccctctcactttgctaattcttctactgttcactgtctctcacaggttcttgattactccaaattatcccaacttttaaagccctggtttgctctatttctagctagtcactatgaacctacttcttacagtgaagctattgggattcttgtttgggacaatactatggataattaaattgatgcacttgagaagaaccacacatggctagttgttagtttacctactcatcagcatgctataggctgcaagtgggtatataaaatcaaatttaatgcagatgggtctgttgaaaaggaaaaaagctagattagttccaaaaggttacaatcagctataaggcattaataatcgtgatatattttcccgtattactaaatttgtcacactgaaacttgttttagcttttgtagccatttatggttggcatttacaccaacttgatataaacaatgccttccttcatagtgatttgcatgaagaggtgtttatgactctccctcaagggtatagtcttaagggggagatgccaaagaatgtagtgtgaaaactacaaaaatcattatataggctaaaacatgcctcaaggcaatggtttgagaagttttccactgctcttgaggaagaaggtttcgcacactctaccacaaaccactcttttttcatcaaacatcttaaagctggtttcatagctctgcttgtatatgttgatgatgtgatagtgattagcaacaatttaagtgagattgagatctcaaaatcaggttggatcaaaggtttaagctaaaagatctaggacagttgaaatattttttaggtcttgaagtagcaaggtcaaaacaaggtatcttcatttcccaaaggctatatgctttacaaattcttgaggacttagggtcttgggatgcaaacctgcaaacactcccatggaagccaatttaaagctatgccaggatgccaaagatgacaaattggctgatactacaagaaaactctttttcaatgactaaatttttagtcattaaaactcattaattagt

SEQ ID NO: 310308 - DNA, 1119 bp, Cannabis indica
ctcgtacctccttctactgatacttttacccactcactgtgtctcactttcagactcgccaaaccttctagcaaaattctagacccttcagattttcttttgcttttcctatgccattgccaagtgaactattactgacatacggtggtttcggcactcccttcatcttcttcaacatgtaagtttttacttttcttttttcctcttccaaaatgttatgtttgtgtagcaaattgttgttcatgcatttaattttttttgttgatggtttcttccgatccttcatttacaattgcatttgttgtcgtcgtggtttttttgttctgctctattttttttagaaaagaaaaaacctctgcttttaaaccctgttagaaattttcaatactagggtttacaaagaatcgttagtgtttactgagatttttaaaagctaaatttaaataataagaactgaagaataaataatcaaaagagaaagtataaaaagagacaaatattttttttatgtggttgggaagttaactagccttagtccatgagtcagtattattcaataagtctttagcttgtaaaagcctttgagaatacagagaatatatgttctcaagtttgcctgagcaaagtttacaagagaattcaacccctaatccataggattcgtggggtatgtatagtgacttgagaattacattaggtttcccctttcccactattggggagtttacagtaaataatacccttaggctatctcatgaaatctagcccatcaaggagacgatctactaactaggcgaatcggatttggtttgatctagtcaacactgcgtatactgattgagggcaattaatctgaattaattgcataatatttgttataggaagtttttccattaatcttgatacaatactctgttgtgatctgataactagaatttctttatttgtgtgcaagaataaaaaaggaaaccagaaggatcttctgagaacgcactgtctcatctctccagtctcatggtactgaacatacttccaaatacgactcatcgagggtggaaggctttgcgagtgcggaaccaagatatgttcctagaaggacatatctattgggttttgtgc

SEQ ID NO: 310309 - DNA, 1489 bp, Cannabis indica
aaaagcagcttgccctttccaaaggaaggctctacattccaaaggaaggctctacatatagcctttatgttcttcaagatctcttaggcataatcatcatttggctccaataagcttgaatagctatgagcactgagtttatgagagttattcttgcaaaggacaaatttctcgagctccagatcttgattctagcagtcatcttttcagccaacaattcacaatcctttccagatatttttttagatgaaattggaattccaagataggtaaaaggtagtacctgttattggaaaccagatttttccagcaaccattgaacttcccttcgagacatgttgctgcaataacaagctgttttgctaccattcgaatttaatcctgatgtacttgagaacagtttcagtgcttgtaacatgtacttaatgctcctcacatccccattacaaaataaaagcacatcatccgcaaatgcaaggtgattaagctttaactttgagcagccattatggaatttaaagtcatcattctcccccaatccttctcattaatctagacaaatattccatgcctaaaacaaacaaaagaggagacatagggtctccttgcctaagccccctcttagattcaaagaaaccatgcaatgatccattgaacataagagaaaacttaggagttcaaacacaattcataatgagaggaataaaggccttaggaaatttgagtccatcaagcatttcctcaataaagtctcactcaacagtatcatatgccttttgaagatcaagcttaatcatgcaacttggtttgttagctttccttccataatgtctcaccaagtcttgacagatcataatgttatgcctaatatatctacctttaataaatcccccttgggaaggagaaattatttcaggtaaaatatttcggattctagagctcaagagcttagttgcaatcttataaataacatggcaacaagcaattggcctaaaatccttaactgtgtttggacatttcaccttaggtaccacggtaattttgtagaattgatctcttttaaaatgttagtctaatttaggaatgataagactgctttggtaaccttctccccaatgatctcccaattatcttggaaaaaatagctcgagaatctatctggtccaggagatttagctccagaaatactaaaaacagttgccttcacatcatctttagtaaactcttaaatcagcatgtcactttgctaattggataagcaagggccattagcaagcactttaggatgagtcttccttgtattgtctaacctggaaccaagcagctccttatagaaatcaagaaaagctgctgttatttggttaggatcatgagttctactcccatccctctgttcaatagaaagaattcggttatgtctcattctttgcttgatactagagtaaaagaaagcaatattgcaatccccatcttgtaaccaagcaatttt

SEQ ID NO: 310310 - DNA, 3119 bp, Cannabis indica
accattgatattgacttagaaagatataacggtaattttatgatatcttatccaagatcaatatcggtcccttccaatgtatactccatacatctgatactggtaaactttgccaatgccctggaaaggacataacacttatccacggtgtaagtataccttctcgctgattatcatgttggtctaaatccaatgaattgagaaatcatgggaattgaagttttgaacatatgatcatgattatattgcactgtgctgacgatactataatcatgaacaaatatatatgttatggacttaataatttatatattaaatataatcatgaaataaatcatgtgaaccatgcaacataaacaatttttgatcttttattatttagtaaatctaattatattgaaatgggttttatttagggcacaaaccctaacagtacaccattaagaaaattccaagggaagaaaatgtagcagctgatgcattagcacgactagcaagcaacacagtaatagacaaggaaaacttagtcccgatacaatttttttaaagagcccagtatcacatgcacggagggaatcaagatgatagataatacaccaaagtggatgactcccatatatattagcctatcctaatattggagaacttccgagcaacaagaatgaagcttgaaaaatgatgataaaggttgcaaggtacatagtagtggatggtgtgatgtgcagaagaagtctctccatgccattgttgagatgtgtgacaaatgaagaagctagatgactcttaactgaagttcatgaaggcttttgtggaaatcattttgggaggcaaagtttatctaagaaaatactagggcaaggttacttttggccgacaatgattgaaatttcaaaggcccatgtgaaaaaatgtgacaaacaccagatatcagcttcgtggtcgaggaagtccatgtgcaaccaaaaagatcctgtgcagacttatgggcaaatgatatccaagtttctaaaaaataatgtggcatccatttaggtgacacgtagagtacatttcctaacctaggtggatgattctactgttagtgagccacacaagaagaattgattctcaagctcacagaaaaaagttgtgatatccgagcagaataagaatatacatccgactggcttttatcacacaggttgtttgcatgcaccgaccagaggatgcgagttagaaattttagggacatatcttgtatatccccaaggttgcaagtcacagcataatccttacattcatgcgatagatttgtgtcttcggaaaagaaaggcaatcagcctaaatttcctactttccttaatgtagttatgaaaattaaacatgtttcccattttatttcttattgatttatggaaaccaatctcaagtaattaatacctataaatactggactcatctcactattcaatgacacaaattttattcagagagagaacacttaagaaagaaaactcaatataagagtaaattactcagagattgttgtaaaagtttttgagagagatcaagacattcttgctcatcttctcacaagtcaatacaatcaaagaggagtaggctattaccaactataaggggccgaacctctataaatttgatattttctttacttttttattatttatattctattatttaattattctcaatctttttaatttgacccattatcattggctaaaagcaaggtcagtaagcctgaatcctgagtaatcatgaactcctgttcatgtttttagtttctttgattcatttattaaagtttctctaagaagatgattcttacaacttctattttgagaatctaataatatggatggctgggaacatgatctagaattatacaatcttgactttgctaatgaattgaatattgatccctaagtgttcatctagaactgaaaagttgtgcataaatttagattggatctaaattatactttcatttgtcaattaatgatactaaaggatacataagtaattagaaagataaaataataatttgaccaaaactaattacaaatcgactcaaggagggctaatcaccgaaatcgattatatcaataggcactgtagtaaaacttcgtaaatataattctatatttagtaagagtttaattatatatttatagtaggataatcatagaattaataaacaacattatttagttgatgagattcaataaataatgtaatttattggagcttagaattgtaggtctataatctccagatcgccaccttgaaagactttcaagggtagggataaaagtcgtatatgaaagttcgaaaaaatctactttgatttgtcgaaatcataattcattgtctggataaaagacaccaccaatatcttgttaagacataggtggcaccacctgcactgtgttaggacacagtgataggcggccctagtgtagggatgtctccacttgatttttttgtggttaattaattaattaaaaagataaatatttatttaaatttgaatttgaaaagtaattatagatatttagttggttgagatatttcctaaaagtagttgagagattctctccaagtggttgagatattctctcaagtagttgagagattttcttaatcgtttataggaaataaatgtctataatggaatcggttataaatatttagtgaaataattaaactaatatgatttaataattaatttgaattaaataaaatctttattggttttaatttgaatataccgtataaatcctaaaataaatacatattattttgttgctgtaaatgacttatccttttaatttatgataacaagttttgttctaaaaaaaaatatacacattaatctcttttccatcatcaaaaagagtttttctcatatgttgataattaaactaagaattcaatatacaatttatattctactagcccacactagtccttctgtgtagtgaaagatttagaagagtacgacgtgagtttttcgtcatcaacaattgatacaacttacaaaagaaaacaaggataccctgataggctttaagaggtaaattttcttttaatctatttattccagatttaatatatgt

SEQ ID NO: 310311 - DNA, 595 bp, Cannabis indica
tttttttggaaaaaaaaaaaacagagcagaagaagaaatcaaaggctcccctgaggagtaaaaaagccacaatgtgttaaagcattagaaaagagctggtgagaatcaagcaacccagaaaaaaataaaggaaaccctaatcataatcatgttaaagaagagtgagcagccatagtattgggaagaagaagaagaagaaagctttgtatttttgagtttttgtaagaaagagagagaaaatgaaggaaagagagggaaaagacagtgatctctgtggtgaaaacagtgagagaagaatagaagagaaagagagagttagagagagaaagcacgcatatcgacaagagagagagagaaagagaattattaaataaaataaataaataaataaaatagtaaaataaataataaataaaattattttttaaattaaataattttcggcgcatttacgttattgtccctaatgttgttgagtgaaatgacatattagacccctcaatagtcatagtcatagtcttagactgttgtttctgtcaatctgtctcattcaaaacgcttctcttctctcagttaaaaaaattaaaaaacttaa

SEQ ID NO: 310312 - DNA, 1530 bp, Cannabis indica
aaaaaaaaaaaatccaaaaattagagctaaaataaccacttatgattctaggatagtgaactaaaaaaaaagtgtcacttgtgatcgagatgttcaagattggtgagccaataaaaaaaaaactaccttttgagggagaatgttagagagccccacattgacaatatgtaaacaaataatatgaataaccagatcaaaatttgcttgaagaagacttgggaccaaattgaagctcactttgtacttttgatttctaccactttcttgctccaaatctaatattgagccaaaaataaataaattaaacatttgtaacccaaatgattttacaattaaaactaagaaaagatttaatttaaattaatgttaaatacacaattaaagctttaaaatatgtaaatttaagccaacatccaactactttattgttagtctttagcaattcaagcattaggttaatttttttttaaaaaaattacacaagtatccaaataaaatgttagtacaagccaaaaagaactataaaaattactaataaatttagagttgtgagtgagtgcaacaaacttgaaccttcttaccccaaaccatagcacagaaaaccttaaaaaatataccaagtaaaattctcaactccattagtcttacaaatcattaaaaatatatatatggcgaagaatttcactcatgggattgaaaattaaagaatgaggactcatggataaaacaatttttaggactaacaatcaaataatcatggaaacgaaaatatgtaataaattatttggacaaaccatcatgaatgaaaccataaaccgattttttgggattttagaaagaatactacaatcttttatatttattctaggagtcataataaatgaaaaattaaatgatacatatatattgaataagaggcttgataaattaatagtgttaactcagattttcgttaacaataaatgaagtcttgtaaataaaaagtaattacttataatatataattgtatatgaaacacgaagagttacaatctatatactccacgagtcattattatttttgagtatctcttgataaagaacttagattatagaagaaaactatgaatattcactcaatattatagagtttctcctttctaagtatttaccgagattttaaaaaattgattataaacgataagaattgaagaaacgaataattaaaagagaaaaaataaaaagagacaaacaattttttacgtggttggggcattaactagccttagtcccaagtcagtgttattcagtagttctttagcttgaaaaaacctttaggaatataaagaatatatgttctcaagtttgtctgagcaagttttgcaagagaatttaacccttaatccataggattcgatgggtattatagcaatttgagaattacatttagtttcccttttttctttattggggagcttacagtgcataacgtgttggaaattattttaccaggatctagatttactagcaagtatgttggattaacaacct

SEQ ID NO: 310313 - DNA, 1349 bp, Cannabis indica
aaaaaattggaaccaggatccgtggattgctggaacaagttgcaagttagtatccggagatagtttgtcgcggcgagaaagattaatctcgaagtcagcgccttgactaacatcaagaaactacccataaaaaccttgaagaattttataaagaggttcaaagaagaagcctcaaaaactaagaaggttgatgacggacaacaacttgcacttcttcaagctgagatccgtacagggaccccattctggaatgaattacaacaggagggagctgccaatctccaagacttccagaagagggtccaaaagtacatcaacttggaagatgcccaaatagtggcctatggagagtactatccaattggagtatcagggtatgtacccggagcacagctctcagggacccttcctccggttactccacaaatgagcggaatacaattctccgctaccccaggatacaatcagagcccagccttggctcctgcatcatcgcattacgggaatcccctaagtaacccctcaaggatgagcggacaagccccgtctcactccgcttctactgcaagcctaactggacctcctcagagctcccggagcaagaggtcctcaaaaggcagcaaccggacgaaggacaagcgtcaaagaagggggtatactccccaatataccctttacacagagttgacggacacacaaaagcgagtgtattttgccacacgtaaaaacacacactaccgaaaacctcctcctttgtacagggacagttcacgaagggataccaacaagagatgcgaatagcacaacgaaattggtcacagtaccaatgaatgcaagaatttgaaagacgaaatcaaaaacttgatccggttgggtcattcgtatgagtggattaagaaccgactaccacatctccacctggttccggcagtaggcctgttgcctcaagaggcaccagggggtgcacccagagcagtaacacccgtggtacacgccggcgggatgatccctcagctgacccctgggctgccgccaagacccaacgggagagtggccatgatctccggtgggccccatattgcagggaccaccagaaaagaattgaagcactatgctggggccatctaacacgaaaaagtctgggaagtcacccagcttccatcacaaagaacccgactcatggatcagcctattacctgttggaatttgttttaccaggatcttagatctactcacaagtatgttgtttaacaccctaaatatgaactttctaaaattataattaaacacatataaagttaagaaaaccttacattggttgcagcagaataatgtctctttccactcag

SEQ ID NO: 310314 - DNA, 1102 bp, Cannabis indica
gcaaatttagccaacccgtcagcagcaacattagctgagcgtttgatatgtgaaacatttatattagggaaaaatgataaaagactaaagatatcaacaactaaatcctgaaaagatgaaattgctgatgaagatttgcttaaagaattcaccactttgagagcatctgtttcaattaaagtgacaggcaaatgaagttgaagtgcccaggatagactgtataacaaagcaattgcctccatttcatgagaggtaaaacagccaagaaccggcttggaaaaggctgcagcaaccgaaccatctgagcgtcgaattagagcacctacaccagtgattttgcgcgagatgtcaattgctgtatcaacattcaatttcagcaaaccaggtggaggaggagtccaaggtaacagagcagccgatgaaatagattgttgcaaaggaacggcagcagtagcagaagtagaaggagttgaagctgatgctgcagaggtgcgtttcagttgggcagaaatgaaattgtggcagtaattttgtgcaaaaaaagctaaatcctttgctggtttagcttgatgtccatgaagcacacggtttctctcagtccagattgcccaaagagaacaacaaatttgttccatctcttgcttcgtgtacatagctgctaaatgcactagataatcgcctttatgcattacacgagcagagttccagtcatgtgtgatattagaatatcgccaaacagatcgagcatatttgcaactaaagagagcatgcccgacagtttcccaagcttgttgacagatggaacaagtagaatccgttattattttccttttaaccagggcagttgcaactggaagagcatcattataaatacgccagatgaaaatcttgatcttttgtggtaaattcagagaccataaaaatttctaccaagaagctgatggtgaagaacaagaactatcatcaacttcttcaagagatgcagcgaggtgataaccggtttgaactgagtaaatgtctgaagagtgaggtgccaaaccagagtatcatcattgcgaaagaaagctcagcgggatggttaaaaattcgatccacatcagga

SEQ ID NO: 310315 - DNA, 1550 bp, Cannabis indica
atatgtcgagcccttataagaatcatttgtattgaaattttggttttttatggtgtagcattctgaagtgggagatctgtttttttttttttttttaagctttgtggttattttagcaaagtgtttcgccataaatgctggttctgtgaacttgagttaattgagttgtttgattaaagtcacagactttttattattattgttatttttattacttatatttttgttattaagtcgtgaagaagaagaaattaaaaaaatttattttggttttttattgtaataaagttagataatattttaaaataatttaaattcaaataaaatattaaaatacgtacgagataatttagtcatactaaaaagtattttatgtccactaaatttaggttttataaataagaggtgatccttttaaaataataataataataataataataataataataataataataataataataataataagaggtgacaaatgatcattattaggatctataaaataatgtaatgtatactacaacacaagcaatatgttacatatgtaataaattcagataaaaaaatatattacatattttccttttcctttttcttgtaataggaagagaaacaaaatttgggtaacggcaacctctctcttttgttttctttttctggggtttgaaaaatagttattccattacgagtgtcagctgttaggttctcaagtctaaaattgctgcatgcatatctctctgaccaccaaacttgtgtggtcctcttcctatttcagtgggtatattattattattattattattattattattattgtattaatttacatctaaaattaatataataataataataataataataataatggtccctcccctacgtatagcttttcattatctgaagtagctatcggacacttcaagatgacaaccttcttaagtatagaccacaactttttctaacccatgaaatagacttgtctaactctggattttctcctcttttctttggagagagtttttgtagttattatgtgtgtattatctcttctctctcataacggtctctttaattggccacattttgtctttttcaaacaaattgcctggatatgtttttatgggtcattactattcaacttaaatgatttaattatgtatcaaggaattttcgtgtatgacaaattactcatgttcatcacttcttctctacggattcaaattattaccatatacttttttgttagattatgtatataatatatcttcatatataaataatacataaggaaggatatatataattggatttcgaccatatatacatatgtttaattaaatcatttggatatatatgtataactttcatgagctacaaacatatatatatatactagatagagttacgtggcgtcccacgtaaatattagttttatataagttctagtggtttttgtttaagaatttagtaactaagcaacgacaacaacaatggtagatagatctatttaagtttttcatatttgtaaagattataaa

SEQ ID NO: 310316 - DNA, 3788 bp, Cannabis indica
gacgacactataatcatgaacaaatatttatatatttatatatgttctggacttaatagaatttatacattaaacataatcatgaaataaattatgtgaactatgcaacataaaagcgatttttgatcttttattaattagtaaatctggttatattgaaatggattttatttaaggcacaaaacccaaccaggcctctcttacaaaatcagaagatacaacaaagacctttggagatcaaactacaaagaaggcacagacgacacctaaagccacttgaaggtgcgcccaagacagggacaatattgacccctattttgaggaaattaactcaggcgttggtccgaccgaggaactcagagaacttcctctcaacacattggacccaaccaaggttgtcaagattagaacaaacctgacggaggtcttaagtgagattctcatggcttacctcaagagaaatcaagacatcttctcttggtcgcatgaggacatgatcgatatcgacccccaggtcatctgtcatgccctcaacatagacaaagtcaacttcaaacctgtacaacaaaaatgcaggctccttaacaaaaagcgctccaaagctctcaaggaagaagttgaaagactacgggagaaaaacttcattagggaagctttctacccaatttgggtatccaaccctattttggtgcctaaacctaatgaaaagtggaggacctgcgccgcctttgccaacctcaacaaagcatgccctaaagattgtttcacaataccaagaattgatcaactagtggacacgatagccggccatgaaaccctcacattcatggatgcatattctagttacaaccagattagtatgcacgcaccagacaaagaacagatgaatttccaaactggcatcaagctttattgctacaaagaaatgcccttcagactcaagaatgcaggtgcaacttatcagagactagtcaattgtatgttccataaccaaattgggaacaatataaaggcctacgttgatgatatactggtaaagttaaaaagatatgaagaccacatcaaagatctagaggagtgctttaatatactatggtaatataaaatgatgatcaaccctctaaaatatgccttcgacgtccaatcaagaaagtttcttggattcattgtcaactgaagaggtattgaagtgaattcgaaaaatgtcaaggccttacaagacatgaagtcaccgtcgtgaataaaagacatgcaaagcctcataggacaaattgtcgcgcttagcaagttcgtctcaaagtcagcagacaagcttgtttccttctttaatctacttaaaggaagcaacaagggatttgaatagactgatgaatgcaagcaagccttccaagctttcaaacatcatctagccaagcctcctatcctatcaaagctaatagatggtgaagaaatatacgtctacttggcaatcaccgagcatgcagccagtgctgctttgatgcgtgaagatgaaggaatataaaaccctgtctactacatcagcaagtgtctcattagggccgagtcaaggtatcccccattaagaagttagcctactgcttggtctgtgcctccataatactaaggccacatttccaagctcgcactgtgaaggtgattattgaccaaccactaaggtaagttctgatgaaaccagaagcatcaaggcacctactcaagtgggcagttgaactaggtcagtattagatcacctactagcctcgaacatcaatcaaagggcgggcattagcagacttcattactgaatgcaatggccttgacaaagatgatcccatggtatgtgaagaccaggtccatacgcttgagactgcagcttagagggacactgaaccttaatagaaattatatgtagagggctcctcccacgagcacggttctagtgctggactcatcttagttactctaaaatgattttgaacttatagtgctatggggtttgagttcattgcaaccaacaatgaagcagagtatgaggcactcctagcatgactacggttagcactagcaatcaaagtcgaatcactaaagatctacaatgattcacatctagttgttaatcaaattcttggtgagtttcaagctcgagggtcagacatgattacatacttgagtaaagctaaagatactagcccagtacaagcactactccatcaaacaagtgtcgcgtgagcaaaatgccaatgcagactcactagccaagctggttagcactacagattttgacactcttagtgttgttcccgttaaatacctctccaaatggagtattaatgaggactcaaagcatatcctaatgattgacaacactccatcatggatgatcttggttacacaatatttaaaacaaggtattccttcaactgaccagaacgaagctaagagaccaatgaggaaagtagctcgcttcatcatcatggatgaagtaatgtgcagaggaagcttctaaatgccacttctaaggtgtgtcacgaaggaagaagttggactcctcatggttgaggtacatgaggcctttttggcaaccatgctagggggcaaagcctttcaaagaagatcttgagacaagggtacttttggtcaacaatgacagaagactcaatgggctatgttaaaaagtgtgacaaatgttaaaggttctccaaaatacccagagctgtcacaaatgaactcaaaagtatgcaaacaccctggccatttactgtctagggaatcgacctcataggctcactacctaaggggaaaggcagagttcactatgttgtggtagcagtcgactacttcaccaagtgggccaaagcagagcccttagccaccatcacactatagaagaaaatggaaaagttgaagcagtcatattaaggatacgctaaagaagttcttagagcaagcaaaagggaattagcccgaacaactccccgaagtactatgggcatatcgcactatagaagaaacaacaataggccacactcccttcgctctaaccgtatgggtacaaagccataatacacatagagctcaaacctccatcccatcgaaggcttacatacgacaagcaaagcaatcatcagctgctggtcaaatccctagatggaatggaatagataagagaaagttctaagcttagaaaggtggcgtatcactaaaaggtcgcaaaacactacaactccaaggttaaagataggaaatttaagcctggagacatggtgctacgatgggtattcctgaatatgaaagacacaatagtaggagtactcgggcctaatttggaaggaccatatgtcagggctgaagcacttgaacccgaaacttacaagttaagacgttatgactacaacttgaatctagtgtcagtactaaggtattggaacagggtgcatctacgatggtagtaccaataaaagcaactgtctccaaaatagctcacttcataatgagattcaccttacttcgtgtaagtgaatcaatcgccccttgactgataggatgatacaaagttgtccttaggttaagaggtccattgctaaggtatggctcttatgctaaaagtcaaacagggaattagcttagtgaggatcacttaaactaagcttggatgaagaagaaattatgcacctactacttcaaagtgtattatttcttctttcaacttagctcacagtaatgtaattgtatttaatttaatgagaaaaagcataagtaaattttttttggtacttcatttaaattaa

SEQ ID NO: 310317 - DNA, 2592 bp, Cannabis indica
accaaactgtctgcacttagtttgtatatcgtcgctaagtgtttttatcgttattatttctctttcacgcaacgaggttgaagcctcgtcatgcgcacttgcactcacatggtttctcgtcaatacataaattagcagttcgtacgtttctatctcgcagaagaccattcagccagccgagttataaacatactctgcaaataaagcaataagaacacaccctgatgattgtaatagcctactcatctttttgatgtattacttatagagaattatcaagatcacatgtctaaccaggtgagtttcttaataatctcgagaaaaacttacaagtatttttgcaactactctttagaatgcagaaaaaataggatccctaaacagtgatatggttctactatttatagtaaaaagacattacaattatcctgagttaataggagaagaattatatgaaaacataaatatcaaatcccatgattttctcaatcatataaaatcaatcccacaaagatagaaattctaaataggctataattgtggagatatttaagggaaatatctttgaggatctttacacctgctttcttgatctactcgaagtaatacgaagtttgggatcttctcgaatggtgattgctgaagattcaaacttagctgatttggctctaacttgatctgaacgacactatagataggtatactccatcaaagccctaacatgtgcaacacgtgccacattgtataaaatttgggatagcatactctttctttataactcaataatatttgtttctctttattttatagtacttctaaaatgacttcctacgacaaaatcaattaatatagttcaggatgaatgggcataatttatgagggatgacatactgtatttatggaggattgatttttgtttttagtatgagaatacttttgttatatcattagtttatttagttctattctagtatagtgagtacacattttgttattagttttattataaatattattattataaaaggtattataaaaacttattgtattttgtgttattgaatttattctgaaacttgataatgcaagtggagaaattaatagaacaattgtagttttttctttattcagtctcatgacaaactgatactaatgaaccttgaaaatactatgagtgtcggttacaagcctacgcatacccataagcgtcggtttgtaagtgataacaaagaaaccaacttttaaacatcgatttagaactgatgcctacactcaatagtgtcggttctaaatagacgcataagaccttactttatatgttggtggaataggcgttagtttcttgagctgatgcaataggtttagtcagtttacattgacactaaattactttactgtaatagttaatgaatcaaataattttgattctattttaaaaaagttgaattagcaaaaaccaataaaatattcacgttaaatttgcaattcaatttggattgatattataaaaatgtggatttgtatattcaaacatttcaatattaattataaatagagagaagatacctaaaatgtagatttggattatgtaggaaactcctatcattattttttcaaaaaattgtttaataatctgcaacattaaaacaataattttaattgatgtagtatggatgttattatgtgattgtgattgtgtgtttctaatatttcttgtttttatgttggatttttttcagagattttattgttgtggctagattgatattttcttgctattcattttggctgatcaattttataattttgattggcgtgcaccttaggttctcgaacgctcaaagtctcgaaattgtaaaaaaaattattaatatataaataaagtattaaataataaaaagttatagtaaatattttttagtgtaatagtaaagagtcttactttaagttaatttaagaggtggatcaattctcaacttctacttttttatttttttaaaaagtatttaatgtgtaactatgaaggaacaaatgttactcttaaaccaaaccactagaattattgttttgataataattaaataatacatatatatagggtcctaaaatattaatttggtcttaggtcacatatacctatagggtccttaggaccggcctggttgggaatatgtataattttgttgttggtttgtagttttcaataacctttttgcctgcaacaatggcttcttggcaggaaatgaagtgaagaaggaaataggttgaactgtattttcgaaaaataaaataggtggactgtataaatgtttaaattttggctaatttgtaatttttccttctgaattttaacatatactaaatcatgccccctaaactttttttgccgttaaaaattcctcttgaactattaagattgttagatttaagaacttttgtctaatttcattcaattttattgtttcagtgattatttatgtactaaaccatgctccacagactttgatatctaccaaatcgtacccctcaaactttgatatgtactaaatcatgctccctgaactttcatccatgttagaatttttttactaa

SEQ ID NO: 310318 - DNA, 905 bp, Cannabis indica
ttaccatctccaactgtgagtttgtccttaccactgtaaggagctttgttcttcatgttttcctgatctgaggttaggtgattactcgcaccagaatctgcataccagccttcatgatcgacaacttcgggtgttgcaatgtaggcactaggatcttgcttgttttggttgtgactgttggtgttatctggtgggaaacccatgaaactctcgtcatatctgttataacagtatgctgcagagtgaccataacggccacaaacctgacatgtaggtttagtgttccttcctctgccacggccacgacctgagttgccacttgaactaccaccacgattctggtgtcctctgcctcctcgaccaaaattgttgttgttgaagtttggatgtccacggccagaaggatagttaggattgtgaggctgcttgttagcaagtgcagcagaggggcctgcaccagagttattgcttccttttccagctgaggtaaaaatattcagacgttccagtttgctatcaaaactgagtaagatttcttgcatttcctgccaagtgagaccgatttttgcctgtgcttcaagttgacagacgatggtgagatactcagcatcgagaccactaagtacatttgcaattaaatgtgactccaagtacgggtcaccagcaagtgctaagctatcagcccatgtcctcttttgtcgaaggtagtctgccattgttgtacttccttttcgaaccgtttgaatcttagttcgtgtatcatccatcttggcacgcgagtgagctccatacagattctctaaagccacccatagagatcgtgctgaggtgcaacccatcacctcggttgctattccctcagtcatcgatccatacaaccatcccatgagcaattgatcacacac

SEQ ID NO: 310319 - DNA, 1626 bp, Cannabis indica
gggactcccattcccctttttgatcacagggtttgatatggggactaactgcaggattttctgtttcagatgagtgaagttctccgtgaccttcacactcacggtttctttggatttgaccaagaaatcctcgaccttcatcacatccataccatgtaaaacccctgcaactaccagagcaaaatattcgaagaaggggccaaagaagttggccactttggatgaagtaatgaagggcccggtagtctacaaaaactttgcatgtcgctccaatggctgagaagctgatgagctacattagacactcacttgggcccaccagttggaaaaaatcattactatttttggaatcaaaccctcaagcttgggggtctaccactgtcttcctaaggacgaagagacacctaatcataactacaacgacttcggggcgtggagccaaacccacttaatgttcgaggccatgcttccgcttcaggattattgattttttggtcttcgttggtctttcaccctaccaacttattccataagcctaccgcctgttatcaggtttgtatattttttatgtttccaggaaattggccccgcccagttcggctgagatttcgtacttttatgaactatcagtccccaaaaaggggacaagtttaaagacggtttttacaaactctaggcccatccggccaatgagggcccggtacctttcatctttcagaagaacgtgaaggaataccgccatcagtttttcttttcctccaacttcaaagcctttgagcttccggatctactgacagactaggtcagggttcctcccatgcaccgcaccgcccccactcaactctttgtaaaccatgcacaagtttttgctggttataaaaagaaagagttgaacgtgggggacctggtcacggcggccaactgtaggagggccaagttgattctggagagccattttgtggatgacttcaactatgctgacctaaggctagtagaatttgataaccgactgtatagttttctaaaataatcaataagcatccctattcacttgaaaccaaccaaaaatgactcaacattatatttaaacatgctcatccatcacaaacaaacaatactaaggctatgatattaattgttgaaaagaaattttacaatatcttattattttccacataaattgtcatttaacttaaataataattttctataacatacatgcatttgaatctctatagaattatattgagttagagtaaatttatagactaaaaatatatcttattttatattatataggcggggttattctattaactaaaaaataataaaaaaaaagattaaaaattaaatttgacttaaatattttttttatatattgcaaaaagaaatattttttgatctatctttttaattaagtagctaaataaacatgaaaactcaaatttttattttattattcaaaaatctaaaggtttaatatttttaaaattaataaaaaaaagagttatgggtaaataccattttggaccctctattttacaaaagttactaattggaccctgtgttttgttaaatgacaaaatggaccctgtattttttaaaatagtacaaataggaccttga

SEQ ID NO: 310320 - DNA, 1427 bp, Cannabis indica
ttaaatttaaggacttttgtctaattttagtaaaaaaatctaacatggatgaaagttcagggggcatgatttaatacatatcaaagtttgagggacataacttggtagatattaaagtctggggagcatgctttagtacataaacaatcactgaaacagtaaaattgaacgaaattagacaaaattccttaaatctaacaatttcaatagttcagggggaatttttaacggccaaaaaaattcaggagtatgatttggtatatgtcaaagtttgggggaaaaaattactggttataaaacaactaaaaaaatactttattattttattgaaaatttattttgtaaataaaaaaattcaaaaagtaaaaataattttttttttgtgttgatatattttttgtaattttttttaatatttttggtctattatatagatttttccatatattttctttcctaactattttttaccttaaatgttaaagttctgaagtatttttctttctggagctaatattcagaaaaacttaacaaattctgacaaaaaaaaaaaaaaaaaaaacttaacaagttcatccatcaatttaaatctcctgaagtgtttgaactttgaatggtggatttaatattaaatttattttgaatgggagggcgtgaatacaattcaatgaatcctaaaggaaaattctttctaaaaggtagaaaataaatatcatatgaaaggaaaatttgacatgcatcctaatacctcatttttaaggcttttttctttttaacactaacatttttatttttatatttttacgaaatttcacatagaaaccaattatcagagcaacttaaattgctacaaaaaattatatagcaatccacgtaaaaattaacagagaaaccactttaaaacttaacctgtaaaatttaaaaaaaaaattaaaaaaattagtatgtaaattataaattgagtgttgcaatttgggttgctgtgtgaaatgcgatcaataaaataccatatatttataatttataccaattttattgtataaataaaaaaaacaaaacaactttaaaatatataaatgaaccaaccctttttagtgtaaatttacacacaatattactagtgattatttgacaaattataattcacacaatttcaataaattaacataataataattgggttttttttttattcgttttcaaaaacaaaacattagaaaaggaaaaagaaaatagatcgttgtggatagaaggctggataatttttgtcaaatttgttatacattgcagagtatagcttttctatatagttatgccattgcgtgtattaatgttttaggaaagaatataatgtcaaattttgttatacatggtatagtttctctacatagaaaatcaaatttgacaatcaaatttgtcaaatttga

SEQ ID NO: 310321 - DNA, 2079 bp, Cannabis indica
aaaagttataacaacaacaataagtcaataatctttttaaagtttcaacaacacacctaaatcaaaataacaaacttgaaactaattaaattccaacaacaatataaatgtacaactaacatactttcagcaatagattaaaaataaaacaaacacaaacttccaactccaaatttcaatacacatgtatgggcttgggtttgttgctaagaagagagggtttgtgaagattatggattttgccctaagatttatgggcttgggttgggctcatatgtatgggcttaattaaataaatataaaaattgaaattttaaaacatgcggtgcggtttgaatcgcggtttaataatttaaaaccgcaaaccgcaccgcaccgcgcggtttgggaaaaattcaaaccgcaaccgcaccgcgaagaatttcaaactgcattttctttgcggtgcgggcagtttgagcagtttgatgtacacccctactacttaggcgtagaaggccaccaatgcctccaggcttggacgcccttcatctttgaaaagtcccactatgcaaaaagggactagtacgaaagtacctaggcttaggggaaggaaaaaccaccccagtgattctgtaaaccatgatggtgggactggggaacaatattcctgatgatagttggtccacaataaatctctaaaggcatcttgatgccgagtattaaaaggctaagaggaaaaaggagaggccacggggtatgacctcaaaaataatttaaatgacaaggtccatggatgagatctcccagacagtgacaccaagaggctagaggagcaaatcgctgctttgacaaagttggtccagaagcaaagtggggccctcactgaatctaaagatgaggacccagaaccttgcatcaggacgatcacgaaatctccgctcctgaagaaattcaagaagcctaagattgaattgtatgatgggcgaatagatcaaaagacccacttggccaagtacaacaatatgatgcaagtggcaagagtaagtgaatatgataagtgcttgtgcttctccctgaccctcaccaagtttgccaaaacttggtggaaaaggttatctcctcgattaattcattcctggaagaaattgatggcaagaggaattgcttgagggtaaatgttatctgtatttctaaacagttgacacatggcgtaaaaggaagagataatctcatgatctcgctaattaaaaccccttcgctaaaccaagtcacggagaagcttcactgacatgagaaaaggtcaagactgaaaagatatgcagagatccaccttgccttacctcagcttcttggaggaagaaaacttgttaccactccaggacccagagttgtccaagataaaaggttgcccaagtgatacccaaatgggtactcaaacggcctatcacggacgctaaccacccaaaaggatcgcaaacgtctaccttggagacaaacccagatccctagcgatggttatgcttttttagacacatgatcagatcttatattctgtgtccaaatattgtagtgcgcactcctcatacacctttttgccagacagttattccaaacatttacttttcaaggttaaatcttttggtgacatgcgtccattacgtacagtggtccccttttttccagttgctgcaatgcacgagcactaatccttctaaggggcccaatagttagctctttttgcatgtattttaccccattagttggctttttacagaaaccctaggtggatcatgggcatgtccatatccgccttagagcctataaatatcctattatttccatacgaatcacaacctagatagtcgaagctctgctaatattattctaagctttccttttcttcaagagaaacatagaatacagagttaggatttcctacaaaacactataaaaatatcatatatgccttctaaggctaatagaatgactcctggactaaagttaattaacaccttaatcacgtaaatattttcatttcatttattactacatttttttattatttcttaagctcttaaatatttagtttttgaaaat

SEQ ID NO: 310322 - DNA, 1787 bp, Cannabis indica
aacccgaccaaatcaagcaatttcattaggcgggttaatattttcttttttcttaattgggcgggttgcacttatatttttataacccgatctttatattgggttgaataaaatgtaccataaaccgaccaaaccgaccaacgtatactcctaccaataacaatgctcaattcaatagatccattttagtcatagtcatactttaatggttccacacttctgctcacaaaaagaagatgtcaagttcgaatccacaatcccctctcccaaagtcaaaaagaatagatccatttttttccataaaaaataataataattcaacatatttaatattttcataatattcactatattcctaattgtttagtgatcataagccgtgtaaaatagctcttcgacttgttacttaataaaataataaaacttaattagacttaagataaagaatattttaaataattaaatgtgatagaccgtataattaaatcataagaattaacagaaaattaataatttaattattaatttatgattatgtgttcttagtagtttatagggcttattatcagaaataggccatataaaaataattttttaattacaaagatatatttgaattctaggtgtattaaatatgttatatatggatagaaggcacaagggtttataataggagaaaaattaaggcttttcattcctaaatctatatttattagaggttatcttttttctctagccaggcccgctgaccttccttgggcttaggtgtggcttggttaggattgtattttgctactataattcgactttcgatactataattagtcttatctctatgatatgattttgagtattttagtcttgtctctattacatagttttgagcatttttgtcttgcctctctgtgacatggttttgagtattttagtcttgtctgtgtgacatggttttgtttgtttcgttgttggttcttatttgttaaacaaaggcccaatcaaatcattgttagtagttgagaataacaagttcttcgtgactgaaggggttgttagtagtgcagttacgtaccttacacaatagttgagtgctcaagctacgaggtttaatgaacctactacaacaatttctattgtttaagcggtagatgaaatagaatataggtgttcttaaggttaattgtgatgctacaatctttttcatctgattttattttaattttttctcaaactatctgggaattaggcggctgattatttagctcattttttttttaattctaatcctggtcgtgtctccaatagaaagatgtcctgattggattgcaagtaattatttagttgattgccattaataaaattccattatttatccaaaaaaaaaatatatgttatatgtgaaattttataatttttaagttttatgcttggtaacaatggaatgcgatgatagtgccaacaaagtcacttagatacggttgactatcttgaattagcgaggcaagataattagacatttggaatgtagggttttatcgaggttatggttttggaccattttacccctaagtggttaggttacttcttagtgaagtaaatggcaaaatggtcttttgctcttatattctattcttggagttattactgttgaccttaaaaagtgatcaatcgacagcggggtcatatgaatctaatattttctacgtgttacaacaagaacagtaaagtaaataagacaaggattttatagaggttcgacccccttagttagcaggtaatgactaaaattc

SEQ ID NO: 310323 - DNA, 603 bp, Cannabis indica
gcaatagcttggccttgtcctttgcctgcttagccttctcctccgcatgctccttagccttcctgaggtcctcgacgtctttctctttcgaagtaacatccaacttcagtttcctcatcacattatcctaaagaagagtgctttgttttctcaagaaatcgacctccttggtacctgcgacaaaagccctcgagaacatagccatgaactacgagggcagttcttcaaagcgtggcaacaattcctcaacaggaaccccctcgaccttggacacgaactcatcgttcacgaacttatcatggagagttatgatattgcgagccctaatagtatggtcgatcatgactttcttccctttgtcttgggtaattttgacctgcttttttgaggagtcggccacgggagtcgcaacgacctctcttttcctcttctgtgggatgacaggagaagtggtcgcagttccaactttaagctttcgattgaaaatagggacatgcttcaggaacgtcatttctgcgagaaagttgtaagataagtataattttattctacaaatgaacatgtatatattcgatgtattacctgatgttggtcttgatgttt

SEQ ID NO: 310324 - DNA, 751 bp, Cannabis indica
taatcactttgtacaaaaaaaaaaaaaaaaaaaaacaaaaaaaaatacaaaacaaaatgtatttacattaataattttattttgataaatatataacagattatgaaaattgatttgaagatgaagaccttatatatttctgcctggaattgctgaaaccaaaagcactatatatagtccaaataattcttgacaagttgatcaagtactttaattaattaatattaattatataaataaataatatatattcgagaaacgtgtgcatgtaaataaaatgccaataaacgcctacaaacacaggactgtcattaataatacccacagagcaatgaaaaaagaaattaaagaagaaaaaagtacatctttataagtttgagtgacaaaacaaaatatcatatcaacatcaattacaatactatagtttaaagaaaaatgtggggtgttcaaatttttgtgaaatttaatattattatcgatataatttatgtgacagacagtagtctcgtgatccgtaacgaaaaataccaggtaagctgtgcaatcccacaccgcctagagaaggtcaagtgggatgattctgagattgtgtaggtatgagactacacagttgaatagaacttaaatggattgattggtatactacctatattaacaatatgcatcttatttttcggtagcctatgaaagaactccaccggttaagcgtgcttgacttggggtaatttcaggatgggtgatctcttggaaa

SEQ ID NO: 310325 - DNA, 1647 bp, Cannabis indica
agtagatattttcatagcatcttagtgagctttgaaggcccaacttgtagtttggcttgctgtcaacggatgaagactgcacatcaatatcctacaagggaaaagttggccaaccatgctcccgccaaaatctggcaggtcttgttcctgccagggtctggcaagtcatacaagatctgcaggttgaggtctggtcagccatactcctaccaagatatggtaggtcctattcctgccaaggtctagcaggtcgtgttcctgccagggtctgacaggtcatgttcctaccagctttgtcaagagttggctaggtctttgcatgtgctagccaaccttggtgatggccagccttggcgatggctagcctcgatagatggaggccagtccttgaagatggaggccaacctttggaggtggaggccagcctttgtacacatttttcttgcaaaggttaggctttcttggtcgaacgaaccctttgttggtttgaaagtcaccttttggttggccagcttatgctcaaaccctggccggccatacaagctcatcttggtcggcctatagactctccttggccagccaaacatggtggtagagctccttgacgactggcttaactcttttcgcttgttgcttgacggttttaccataccttataaggagactttattctgctattggcaagattgtattccacatgtactctgtcttggcttacgtggacataccacgtcaggtggacaaattttgagataacaattttcatatataaaataataaaaaataaaaataatttttcttcactactaaattactcatctaaaacagaaaaaaaaaatattcttaagaataaattatcaactatttatatatgaactcgatatgtatacaataattagtatatgtaaataaatttcaatatataaataatattttagttgaaccacaaaatttttattactatttgggtaattaatcaattacttatagaagtaaaaataaattaaatctaatattgagtcacatcaaagtaaaaaaaaaaaattgagttttatttattgatttcatgtgcaacacctaaagtattgttaaacaatgtgaagttatgccacctcacgtcctcacctatcttaaactatcttttatataaatatatatcttttaatattattttcatacataaaattataaaaataattttttttcactattaaattattcatctaaaataatcttaaaaaattatcaactatctatttataaactcgatatataataattagtatatgtaaataaactcaaataaaaaaataggaatattgacagtaaaaccactcaaattttatattttttaacacttaactacataagtcgattttttgacggtaaaacctaccaaacttatcttattttattttgctctttacacttctgtccaaaaatctcagttaagtgccacggtagactgtctacgtgtacacgagtgtacacgtggcacgtttttaatggtcaacataatattaattatttaaatattataaaattttgcaaaaaaatatttaaaatttaaaaaataattttaaaaaataaagtaaattacaaaataaattatttttttctttcttttttattttcttcttcttcttc

SEQ ID NO: 310326 - DNA, 638 bp, Cannabis indica
tatggatgcaatgacattagtaccaaaatttagaaagccagatatattcttaacaatgacatgcaaccctaattgggataaaataacaaaagagtcacaaatgtatgagcttgttcaaaatagacctgatttgactacacgaatattaatttaaagctaagttagaagaactaaaagtagaaatcttcaaaaaaacatatatttggtgatatagcagcttatgtttatgttatagaattccaaaaaaagagtcttccacatgctcattttttgattattttaaaaaggtgtttgaagcttaccaatccaataaattttgataaaaaattttctgctgaattaccgaatatgaatgaaagtaaacattcatattcaatggttgtaaaacatatgatccatggaccttgtggaaatttaaatccaacaaatatttgtatgagagatggtttatgtaagaatcattgccaaaactatattcatgtaacgccccgatttcccgagacgtcacactagctagtccgtttaaaaccatttaagataaagacaataaaagacttctttaatgaaaaataactaagcatgagatctcattatttttaaaacaaaacatttatttattcataaccttaaaatataaa

SEQ ID NO: 310327 - DNA, 608 bp, Cannabis indica
aaacataagggggtttcgccgcaaattgctctaaatgatatagtatatagattaaatatattaatgtaacaaaataattaagtgtaattattttgtaacatatattttgtggagttacaagctactatttgtaaattttacaatatcattaagagcattgctattaggtaacatatattgcccaacaccatattaatatagcgtattgcaattagttagcgatttcctattagttattaaatcaaattgtgtgggatccgatagtaaaatgcaccaataaacaacgtcaccttgtggtgcttgggtggataaagaaagatcacacaacttaattttttaaagtgaagttttggaccgtttgagttaagttgctcatttaaaaagaaaaggaaaagctcatttataaaaataaaataaaaaaggaatacaatctttcttgcaatactatactagtttagtaagtaattaatcccaaaaagaaaagaaaatccaaaagagttagccattactagttttggaatttaagaagggaaatttgaatttatatgcttaaaataccatattatttttcccctaaatccaaacttaataaaattggtaatatatga

SEQ ID NO: 310328 - DNA, 2036 bp, Cannabis indica
gaagttgctttattcttccttctttggagttctaaatatattatatatgtaccaattgattggagtaaaatctttaaaaaaaaattacaaaagtttgaaaattatttgttatacccaaaatttgactacacttcaatagttgacacatgtccaaaagaagaaatatgaatcaattatgaattgtatattatatcaataaatgcatattaaataactcgttattattaaatagaggtttgatagataatattcaaaactcattgactttatagtcaaaagcgagacatggataataactattaagctaagactaacgagacatatgcatgcctctaaatatacaaacaaaaaggggatattcatccactcgagcagaatgaatgtatcaacataagttgcctcacattacatatagcgagaaaatcagctcgcattgctaaagccactaaaagaatatgacgagatgaactacttctcaatacttaatatttttttcttatgatggacaaggagggaaactcatattgagcgagatgtaacattccgcattagtaataaccgtctaaatgataagacaaaagagtagttgggtagttataagatttatcccaaatgtgattaagtgaaatgtggggactatccacatatcatgagcagttgtttttgaataagtcccaaaaaaagtgtaaatgtcaaacaatatttctataaatagggatagattccatggaataggagacgaaaaatttgagagataattattattatttaaattcttagattgtattttgtattcaataaatatccctaataagaaggactcatggagtatgtagattttaactacaaaactatgtaaaaatatctggagttatcttatcatttattacttatatatatttttctaagaaatttattacataaaggctattttaatttggttaacaaaaatctgcgttaacagtttggtgctttcattgagagccttggtaataaaactaaaaaaaaatccctctttacaaacttgatctaatcatattcaatggctaatgactatcaaaacgatggaaatcgccctagagaaacaactcgtcaccctagaaaagagccaatgggatcttaaagacgccagaccactgaaacatcacgttcaaggaggaacgatggtggtggtgatgaaattcctgaaagaaggaatgaagaagccaataattctgccagattcgtgcctcggagtaaggatgcttatgacccaactagatatgtaccattggtagagttagagaatagacaactttgacaatgcttagccaaatctaaccgatgaaatgctgagtttgaaagagaggctgcagcggctagggcggcacaaggaaaaaaccctcataattaacccgaccctgcaataagaagaccataagggcgacctcgagggtctagaaccaagagataagaaacaaaccaggggaatccctaaaacacctaggaagaacaacctagggatacaagggatactccaatggataattaaacaaataattaagaacaacgacgagatattcctcaaggttccacaggatttaagaaccatgggaatgaacgaaatgatgtactggaagcgtcttgtaggaatgaggatgcgagacagcctcgactaaggaacttgggaatccctcgtggtgatgagagaaaccatagaaattcacttaggtcaagtaggctacctccaagacaccctcagtatacttctcgagtagggagaggatgtatacacatacttgaatagaggacgtgtatctaacctctttcgaaggagaaggttgatacatgatgaagcaagttcaagtttgggaccctcaaggtctcgaggacatagtcgatcgagtaggcaaacgtgagaaggaagtagagctcgacattatgctgaccaagaaagtattagtaattcgtgaagttatcaatttgaaagctactcagagatgagattatgagtattatgagcaaaagatagcctgaccttcgagacactaaactag

SEQ ID NO: 310329 - DNA, 1388 bp, Cannabis indica
aagagaagcagaatcaggtaattaactcgaacctgctgccgtgttatattagttatcttcaacaacaaagcaaaattactttggtgaattgcaatgatgaaaactcgagctattttcatgctagtatgagaaagaagagattagagaatagattcacttcttttaccgtggatgactatgttgaagatgattgtgtgaaagtagtggatcattttcttactcattttaagagctttatgtgaagtaaaagcacggcaaaaacagagatcgactttgggtgtatccaatatggcaatattctaaatcttgaccatcaagttaatcttttcagacctttccataaaaagatgtgaaaaaggctttgtttagtatccgtacaaccaagagcactgggttagatggatttggatttggcttcttcaagggattatgggatcatattggagatgatgtttctaatgccattttggattttttacaaaatgggaagttgcctaactctcttaatgaaacaatgatttccttaattcctgaagttgagaatctgaaagtggctattgacttcagacctacagcgtgctacaacacattgtacaagtgcatctcgaagatgctttgttcaagactttcagaagttatgtcgttcccggttcacagcaatcaaggagcttttgtgaaaagcagacttttagctcaaaacattctcatattccaagatatttagcagggctataacaggaagaacatctcggctagatgagactaaactaatgcactttgttaggcaagggaagtttcgggtagaactgttttacgcctctcttattgacaatcaggtggttgtgtatgccaaagcagtttgtcataggcttcttgttcctaagcatagattcttctactggcaggtatgtaattgtcaactacttaatagggacaaattggagaaaattttgcctattctttctaacctctgcccggtttgtgagcaagaaattgaaactcattctcacctctttatggactgctgttacactaagaggctgcttgtagatattagcagctggtttggggttcatagctggtcgagagacatccatgaattacaaagatggtatatgaacaccttttttgatttgaagcatcaagttacaaatgttgttattgctgcagtgctgtattggatttggaaaaatagaattagttgcgcgtttaaccttgtttgtttttctactgttgtgattagtagaaagataaaaaagttggttaagtatagggtattgggtgttacttgaaaaagctttaaagcaggtgatagatatgtgttcactacaaaaaactgctacttttagtgacaactttttagttacaacataatttttttgtgacta

SEQ ID NO: 310330 - DNA, 556 bp, Cannabis indica
tttgccaaacgactcctaatagtttttaaactgtaaagccaaacaaactcttaacatcccaacaattatttcaataattacatatccaatttgaacaaatcataaaaattattgatttgtcttaggcaaaatttttataaaacatgcacgctggaaagagtgataattcaaatcatgaaacaaggtttgaaatgcttttctcatatagttgagctttttaaggaaaatgcaaaatcaagagaataaataataaacaagtttaaaagaacacaatccacagtactgtttgagaatgtttttcacaaacaagttacattctcttgtaatagtatagtcaattatcaactagtgctagtatactttctactcttttagtgagccaccttcgtcacattggaaaagaaaacttttatatattttcatgaactatccttaaatcaattgtaatacaagtcataactcaaattcaaagacaccatttatagggtgtgttttgtaatgttttattattttttaattaaaaaagtaaaaatattttaaaaaaatatgttcaata

SEQ ID NO: 310331 - DNA, 963 bp, Cannabis indica
ttatcaaaacattctcattaattctatcaattaagcctgttatgacatttctagcccccgatcgagtctccaaggttgtcaaacctgaaaatatttttattccacatatagttcatattacattcacacatactatataaatctccgtaatttaaaaatcacgcttatttatccacttatagcaaatttaaaattttatgttgaactaaattagttggattatcatcccactcattacctggttaactcataatataaatataaaccctaattattaattattaagcttattgggatattacaatataattccatataaatacacatttaactaattaggattcgctaatccacttcataatcttaggatattacaagacgaaaggtccatataagttaatctagatacctccatggggtagtccagaacaggcaaatgaagagacatttgaaagcattcagaaaccatcctacgtggcatcctccagacatagggtcccaccatgtcaaaggtttgtcccctacgtcagacccaaggagtgtgcgcaccttcaaaaggagcatacctttttgtccaacgccatattctctgacatttattgtacaagcttggctgcgcacgacacctgtcaccatcaaaagtgttcccactcgtacggacgatcgttatctcctaatcgacccaaagtcaacatatattgtattttacccagggccggccctgaaatatatgggtccaagacggattaaatttgggaccttaaaatataataaaaaaaataaaaaagagtgttatgggatttgaacccatgaccttaaacattatgacatccacctcaaccaactaagctatgtaatttttattgcttatattacacttaatttacttaaataaagcctatttaattttttattttttttattttgggccccggaaagtgtgggccctaggcacgggcctag

SEQ ID NO: 310332 - DNA, 2411 bp, Cannabis indica
atttggacagcttgccatatctttgatatacgatcgctgatttatagggattgcttttatgcttcatgatgcaagtgctgaacttgctaagtgttgatatgttgttcggattgtccattgctcgtctaggaagacttcgtccgtgcagatatatgtggtgttctgttcggaacatctcttttgggaagatatggggagtcaattccacgtgtcatcagcgtgtgatgccacgtcagagtgcaaaaattgggataacactctcaatgaaagcaccaaaatgttgatctcacttttagccaacaacagtgagtcttgataataaacaataaaggatataattcagatatgatatgaaaagataaataaagaacacaaggttttaaagaggttcggccccgagctgttcggtaattgcctactccccttgatttgtattgacttaagaatgaagaatacagtgtttcctctcttaaagctcttacaatgaaatctctgagtatgctctcgtagatttctctcgagtaattcttttggccccttttccaatgtgaatggatcactatttatagggctacatgtttgaaggaaggtttcccttttgcttacaatatctataattgataaggatacacattacatatttagaatacacagattgtgggattttgatagcttgccatatctctgtgatacgatcccatatttatagggattgctcttgtgctttacgatgccacttatggaattgccatgttttgatatgctgctcggattgtccactgttcggggaggaactcgtccgtgcaggtatatgcggtgttctgctcggaacatctctttcgagaaggtatggagaattaaatccacgtgtcagcaacatgtgatgctacctcagaattcaaaaatttggataacagttgttaataaatatcaaaaatttaaaaataatggaaaacatactcaaaatttaaaaatattagtaaaagtactcaaatttctattattttaagttagtgtaagtcgtaaaaaataactctcgggtaaaagagtaattcccattataattaatatagaagacttaatgaaatgatgtgctaataaaaaatgaaactcatcacttcattggaaggaaggagaggtaagacaaagctcaatctacatgcaaagcagaacatatgtaacactctattagattaggcgtgttacgtgatttctatatgttgtgcactcttttgctaatcaaaaggtgtatgtaaaacgtggataatttaaaatgttcttgattaacatttaaactttaataaataaaaactttacataatttgagatctcgtttttaaaatttataactgtattacagaatattcaactacaaaagttttcgcctaacgactatcaaaacaaagtttgttgtcctgaagatggaacgctccaattctaactacatcaatatgtacaatcttcaatagctcgagctcacagctccttacctacacatgtaataatatatgtgagggtcgactcagtaagaaaaatataatcataacataacataaagcagattataactagacgcccatacacccaattataatcttatcttgtgtcccacacgtactgagtctagaatgttcgtacgaaagtactattaactataatatcagcctatactcggtactctagtcgtactgatgtaatagcatcaatcagtactatgccaaacatatatccatcagtattcattgcaaatctatgtacacatgcgattactgatattcataaacatgcacactaaacatgtaatattatatgcaattattatactaatcttaccttgattccaaattcaggtgtgccaatcaacctgagtggacactgctactcaacgatttacaagaccttaagtcacattatttgtaaaactgatttgtaaaactgataagtgatacgcttaatcacttctcggggacttaaattgaaaactataagttttcctatcgatagatagcgtggtaataccctaaacatcgatgaaacacaaaaaactagggttctaaaactgctacaaatggtaagctggttcctaggatcttccctggggaaacgatttgttggaatatgttttaccaggatctagatttactaccatgtatgttatttaacatcctaaatatgaatatctaaaacaatgtaaataaacacatataaagtttaggaaaccttacattggtgcagcggaatattaatggctccttccactcagatctctaagccttgtatcctatttgtagcagagtatcacctgagcccgaatatcgttctcttgattctggattcttcacagccttatgaaattatgaagaaggaaagagaagtgactggttcgaaattaatagaatagaaggctcagg

SEQ ID NO: 310333 - DNA, 447 bp, Cannabis indica
tttcgtgttattttttgaaaaaccgtaaaaatgtaaaaaaaaaaaacattctttaaacgtaaaaatataaatattttacaaaaaatggtgccttatgtaatgaaaaattacaacttaacaaaagagtaaagagatgtttacaataatacacatagtcaattctacaattagaacaagtttcttgacaactgtctcagagtcactctcaatcattacaaaagagtattgtattaaactatacgtactttttatacaccttataagttattttgattcccaatttgactttttatgcattttataagggataattggttaggagaaccaataattagagtaaatttcactatttgcccttaataatatacctcatatcaaaatttatacccttccttaatttgtacaaatttagtccattaattacatgaacttcccattttacccttt

SEQ ID NO: 310334 - DNA, 991 bp, Cannabis indica
aaattattattaattttgatacaacttcgagctaatactaaacttctacttacaaggaatcattcttgaacggttgaacattttattgattgttgatcaatctaccattgaaagttccaataattgatactattctccaatttttttgtttttttcgtcaatgaaaaaaaaattgaaaattggtatgatagcacaaattaatttaatttctttcctctcataaataagtttgagttttgatgaaaaaaaaattaagcttgaataaaaatatattttatatataagtgaaataaattagctcataggatttgaaaaaaaaaaaaacaatgaaaattagaaaaggtttggcgttttgatgaaaaacttaaacttgaatgtataaatataggacatgtttatgagattattgttttgttcttatggtatagaagttttttatagtcataaataataaatttaatgtttataaataaataagtgtaagataataattaatatttagcttgcattatattattttaataatttctaataaatacaaatttatttataaaaaaataattttcctctattgtctctcttcttccttgatgaactatgtttacacttttttttttcaggagtcattgacaagctatatgcaaatattaatgccaacaatgttcaacaaacttaaagctttgtaaaaaaaaaatagcttcttcttccaattgtattttataatattttagcaaacttaataacattaatacaatttgaaatcaacagttttataaggtaggtgtaagagagcaagagtttcaatcatctatttgttctatgaaatacaattgaaaaaaaaaaagctttttttttacaaaagttttaatggttttttttaaaattgcagataaaaaaaattttaaaatgcatttaattaactaaaattatctattccatttctctgtcccacaaataaaattggagaaaatagaaaatgagggagatggag

SEQ ID NO: 310335 - DNA, 1801 bp, Cannabis indica
cccttaaaaagttcttttttataaaaagtgctttttaaatgatcacagaggatatattcgtcataattcctttttaaaattatgcatgcctttgattttggtggcttcatggtttcgagggtcattattagcaataatgacccgcccttcgactcccggtgtttgaaaaaactcattttgccgaccgtcacgtcttcattcgctggattttctagtgtccggcctttcaacttcacacaataagtacctcattctttctttgattttactcgagtgatgatttgccttacacttcattacttcattcggtttaatatctaaggttcatatatattttgctttttaaattagacatagtttatgttggctatattccctaagcccctggtttggtaaatttcatccagaaattgggattgtccttctttcgtggagatgtctcattctggttcagaaatttatcctccaaaatgtgtagcaccagaatataccaaacatctaacctccaatatacacccaaaaatttcaaaccttagttcaaattggaagtgaatgattcaagtattgaagaccatttgatcaaaccaagaagagattgcgagtcattatagacgattctttcaagagatttccgagggcaagcatcgttctttgcaaaatggggcctagtctgaacctaatattttaacttctactccatttgccaaaacaatgtttttacccaacgtcactgttgctcactgatctgttgcctttttgtagtgggtcctcggagacttggaaccctctcctcatggatcgtatctcccatagattcgacagctagcaccccaagtttcatgttcaaaccagctgtgatagcttattctatgggattgctgaatagtacggaaccatgttggatagagcagcccatatagatttgagctgggatttaactccacttaacccttacgacatttttgagatcacaagatctaaggagcttagtgaatattatggtccttcttccccttcttctagtgacacccggtctccttatggttatggtaaattccttaggcagggaatcaagtctcgttctccctttttacctttgtctttgaatgaatgctattaattccttttgtcttcgcaagaatggacgtagatttggagagcatgttaaaaagttcttcccaagccgacaagagatctaggttgaaggtagcctaagttgatgacgcctttgattctatcaaagagtccaaaaggaccaagactaaggccaacatgaggaaatcctcgaaccagcttataattgatgctgataaatctcttgaggtagggaatgaggtctgtactgcggggattgaggtctctactgcagggattgtcgagaagcgacctaccgggtcggcacaccaggtcaagttctctagttctcgtccagagatggttctcctcgagccctcctgtcccctacccctttaaattgggactgaagggtcacgactgagttcgcaacacgccaccaacagttgacgcaacctcttgacacttgggtctgttggaattattttaccacgatcttagatctactcacaagtatgttaattaacgtcctaaatatgaacttctaaaatgattacaagtaaacacaaataaagtatgagaaaccttacattgggtgcagcagaataatatgtctctttccactcagatctctaacccttgtatcctttctgtcgcagagtattatcaagatgagctcgaatgtccttctttgttgaatctggattcttcacaatcttccacacta

SEQ ID NO: 310336 - DNA, 1733 bp, Cannabis indica
cgtgcacagatgcattaattctacgaatgtaatcctcattcctaaggtggctaaccctaagaaggtctctcaattctggcctatctatctctgtaacgtggtttacaaggtcatttctaaaataattgctaatagaattagaccagtgctgcctagactgattttccctactcaagcggcttttgtgccaggacgaagcatcaatgacaataatgtgttggtccaggagattatccacacatttaagcgcaagaaaggaaaagaaggctttttcgccatcaagattgatttggtgaaagcttatgataaactcagctggtgctttattgatcatgttctctgcagcttcaaggctccagacttatttcaaaagtgggtttcccaatgcatttctactacttctttcaacatccacctcaatgggggaaaggttagtagccttattcctgaatgtgggctttggcaaggtgaccctttgtctccgtacctctttatttgggctgtggacattctttcacgtatcttggagagggttatggacatgggtactattaagggtatcaggttgagtagagacggtcctaaattgtctcatctgttcttcgcggatgaccttatccttgtgggaagggctaccattgaagaggccaaaggctattgggaatgcctcaagaaattttgcagttggtcggggcaatgtgtgaataagctcaaaacctctattttcttcagcggcaatactagtgaggggatgaaaaggggtatcatgcatgagttggggcttaacttggctaccacgaacattaattacttgggactcccactttttagatctagtcataaggatgcggatttcaatttcatccttgacaacctggtctcgaagctgcatggttggaagatgaaattacttttgaaggctggtcgtgctacccttatcaaatccgtgggactagccttgcaagtttacactatgcaaactaccaagctctccaaaaaacttgctacaaaaattgatggtatgatcaggaattttcggtggggttgtgagcagggtaatcggggtttgtgcttgaaggcatgggaccatttatgccttcccaaatctataggtggactcggatttcataagtccatggaattgaaccaggctttattagaaaaatgggatgggcccttcttactgatgaacagtcactgtgctgcagggtgttaagagctaaatatctaaagagaaagacgttcatggaggctacctatacaaattcagactcttggttctggaaaaacgtggtcaaagcgaaagtgattctcaggaaaagagcttataaacttgtttcgaatggggaagatacaaatgtttggtcggatccttgggttgttcatggcaatgagttctattctagacccatctcttcttgtcctgagagggtggttaaggtggctgagctgcttaatagtaatggggactgggacattgccatgctcaggtccctgtttgactctgatattgttaccagcatcttgaaagggggaaagccttgtggccaagggaatgatagatggatttggactaaggaagcgagcggcaaattcacaacaaaatctacttatttgatacaggctttcgagagaacccctgcctgtgtggttgcgccgaccttgtggaacaaactttggaactccaaaatttttgaaagacataaatttctttggtggggtatcctttcgaa

SEQ ID NO: 310337 - DNA, 908 bp, Cannabis indica
aagcggggatggggattaaaattattaacggggatggggatgggggggagcactccctgccaattccctaccccgtgtgcatccctacttccaatggtgtctactcctagttgtcctctgctcaaaattggtctccaagttcgaatgaattcagaatttaattccttaccccctttaaatacgaaattaagaaagtttctcaaaaactttcaatactgcggctttgtgagcgaagtttctactttccattttttgccattttcttagtttcccattttttctctttccagcgaccaagtgaaggtcgcgacattcaagagcagtttctcaattttttgattcttcattttatttttagaaagtgacaactcttgattatagaccacgacttttgaaattaaaaatatgaactttgaccaattttaggcaatgagaatcccaaataagataatttaaatcttaaaatttctttttcctcataattaattatttttttctcaaaaaggtttgaagaacactaaaataaataaaaatagaaatctccaaatattttcctgaaaaacacacaaaaataaatatcaaacataatccaaacaataaaatgataaattattttaaaatatatatatatatatattaaaataaactctaaaattgcataaaaatagtcttaatatatcatttagttagctttgactaagatcaaagaactaaataatatttacctctccctcaaaaaaaaaaattaatatttacctcaatctttaatcttctacaccaaagcacacctaattaggattaatattagggaaacccttgaaaaaatactactaattaggaacatactaagtaaagtgttattattttttctccaacacttagttttcatatcactaaaacttaatcct

SEQ ID NO: 310338 - DNA, 2549 bp, Cannabis indica
aaagaaagagaaaagggaacttatctgaccacatcagtatggcggtggtggtggatggtatgggtactggggcggtggctgcgagaagtgatctagagcatcggggtccatcctctacatagagaaagcagaattcaactcctagacttgcctttgagcaaattcatgctgctgctgcagataggacttatagtaagcagcttgggcctggttggactgaatgcgatactaatttttcctaataaggtaatccaatctaacataggtgtcctaagtccgggagtccagtggcgattcaatctggagaagacgcaaaatcgtctcacttgtacctgcttctgcatgcccctcttcctcatcatcatcatcaccacccttctggcattttctggaggagtcaatgatgctggatgaaaatcatagtaatgccgtcttaggatgggttacatgggtgccttaacaatgtctccttctatcattggcacaccccgtctcgagcataatgttgtaattagggcactatgagttgtaccgacagtggtcttcatttcagagacatagtttatatttctcaaaattacccatccaatgtcgaatgtcatcttgatcatgatagcataaactatgacataatgctcatagtctagtgataaggcatgtgatgtcagcataattctggagttgacaaaataggctcaagctttggcctccggatagagttgccaccagtataaaaacttttggttgtggtttccctcaacatgcaatctggtcccctcttgccctagaactattgcaatggcttcatcagtgagggtttctcttctcagtgctaatcttcttttgtcttgctcttctcccagtgtgccaaggttaaagaagttattaatagcctccatagtgactgtcacatttactcctctaacatgcacttcattattgtctcctttgtaggggtaattggcaaaaaattcacaaaaaatattatgttagcttctcccacgtgctctgcagcacacaacctctactatcctcttctcgcaatttctcctttaatggtttcataaccacggtcccttctaaaaggttcttcttaaaattcaaagcccttctcccgaagtacactcctcttcttaaatttttcatatctttttgctgcattttaattcacaaatctattcatatgtcgaggttggtcttcttggggattaggatcctgtgatgacgatccttgcatattatgatgggcttgagacccagttttcctagatgccataccacttaactagccaaaataataattcttcagtgtaaaaaaatttggggagcacctcccctatatttttcacttcccccaaactaatttgaagcagtaattcacccctaataatttctaccagtagcaataaccaatatccaactctccacaaacaatattatgccaatatcacacgattcacaagtaattactcttcaatcaccaaactttagtggaaagaaaacacttacttgtagaatagaagctttgtagtgcttgaagtagtcctcttccaccaagaaatcccaaaaaaaaagtgatgaacacaatgatttttaggttttaggtttttgaattttttttctgaaattttgggttggactgaagtaatgtgggtggtttttgatgaaattggtgaatgggttgtgtttgtaggggatgataatgtagattgagtgaagaaaaatgagttaaaatggttgaaagtggtggattttaggttgagaaaggtggttgttcgtggggagaaaaacttgaaggctaaatgatttttgaaaaaaataatggaatggcacgagaaaagcttgctgctaggatatttaaagggggcgcgctgcgacccctgatttccatgccacgacccgcctcgttccttatcttgtttagtatgtctatgaagctcaggggtcgcgacccttgcatcttcatgccgcggcccgccctataattcttcaccttgttggttgttgcttaaattttttttcacctgtatgactaggcactaaattttcatgcctagacataactaaaaaaaatttaaattgactagtttcatgatttctacggttctacatatctttttttttttctaaattttaaaattaaaattaaagtttactaaaacttaatgactaaaaatagaaaattgtaattgtttttaaaattagcggtaaaatattaaaattttgggatgcctccaaagggcgctgtcgtttacgtcatttagccggactcagtttctctaatcaaagaggcgccaattggatgacgttcttggcttcatcaacgtggcctcccaagtaaagcttcagcctttgaccattgaccttgaaagtctctggtttctctcatttgagttccaccggtccatatgggaatacttgaaccactgtaaacggtccagaccactgtgatttcaatttccaaggaaaaagcttcaaccttgaagtgaagagtagaacttgttgccgagttaaaactcttttctgaccaagtttctgtcatgccactt

SEQ ID NO: 310339 - DNA, 2130 bp, Cannabis indica
gattttaattacaaaaaaaaatttaattacccacacttttggtataattatatagtatctatatatgaattttatgaaatcatacacgtggcgtccctggttgatagggcgttacatagggtctcacaaaccacccccaccggaagaaatcgatgtcctcgtcgatatatttctaatatagctctgtaccttgtcttcaaactgccacaaagtcacagccttttcccatgtagcatctgccacatcttcaccttcacattgaaccaattacttgattctctagttcttttggctgactccaagagtgcgatgatcgtggatctttcacaacttcttctcaaattgtttcctcacactaggtaaagcccacgccatctgttgccttcctttgtctttgtgctcatgaaatttcttctggaaactaacatggaaagtcggatgtagcttgaagcattccggtagctttagtttgtatgttacaacccccaatttatggacaatcttgaagggaccatcatatttctagaccaagcccttgtgataccgttaatcagttatcttcttccaaatctcaggagtgagtttcagcaacactcgatctccaacagaaaattccaagtctctcctatgcttgtctgcgtatttcttcatcctccatgaagcttttcccaggctgtccctggccaattccagcaactcagtcctttccctcgcgaactagtatgtcgctggccagacaccttgagacttctatttcgccacctcgtgtggcgtcagcggttgtcttcttaagacaagctctgctggactcattcccgttgtagaagattgttgaatgttataacaaaattgggccacatcaagcagttcaaccgaattcctctgactagcagtaacataatgccgcaagtactcttcaagcaactgattcattctctccgtctatcctccagtattgggatggtttctgttgaaaactttgtgtctgaaccaagcatgttgtacaatgtcatccaaaacctctccgtgaatttggaatcctaatcacttatgatgtctttgggcaacccaaagtacttgacaatatttttcatgataaattatgctgccacatctgctggacacgcatgaggcgcaggaatgaatatgtcgtattttgagaatcgatccaccaccacctagatagaccgaaacccctttacttccagaaatctcacaatgaaatccatgcttattgactaccatggtttctcaagtattggtagaggttgaagcaacccaacttcttgccttctttctctcttatcttgttgatatacaagacaggtcttcacatggacctctatgtcttgctccatcttctgccaatagtaagacttcaacagtaaagctagcatcctagccagacctgggtgaccagcccacttagtatcgtgggtttctttaagcaatttccttcttaaagttcgactgttcgatataaacaatctgccacccttggcatagagaaagtccaccttcttcccaataccgcacaagttctccagttcatgcttcctcaaaaagtccaccagtgactgctcagtgactgctccctcacccggtcgaagaaagttgtgtactcaactgagtcaacgcaccaacaaaagcatgtacatcttttcggctaagtgcatcaggcacttaattctgcttccccgatctatgcacccataaaaaatcaaatttagccaaatacttctgccaacgagctttggggttagcttcttcttagattgaaatagtaggtattggccacattatttgtcaccactataaattttgttcctagaagatagtgcctccacacatctaaacaatgcactaccacagccatttccttctcatgggtagaaaacctttgttcaacatccattaactttcgactctcaaaagctattggatgaccatcctgcaccagtactccacccaaggcacaatctgatgcatctatttgtacttcaaatggtagatcaaaatcaagcaactttattatctgttccgaagacactgctactttcagcttctcaaatgcctcgttgcattcttcggaccaacaccatttctgatcctttttaaggagatcagtaa

SEQ ID NO: 310340 - DNA, 3673 bp, Cannabis indica
agatcctggtaaaataaattccaacatcatcttgttgtattttgataggtggatcctaggattcgtgtgaaaatcatacaacactatttatggcatttcgaaacttttaggtagtggggcttccgtgatccgccatacacacaactctaggtcctcatcttctgaatttaagagagcccaactttgcttcttggcgagcttagataaagtagcaatttgtttctcaaacctttttctatcactttttggaaggttgcatccgtccctttatcatttaaatgattccttaggttgtttccatgtggcatcgctttctctcctttagccttttcatacttggcatcaaggtgccttcagaggtctacagttcaccaattttctttggataactttccttttttcccaatgtcctgataaacggaatcactagggtggtttatccttcccataggcttgggtactttcgcaccaagtccttttggtgaccctttaccttttggagcaaatggacatccaactccggaggcattgctggccttttgcattttttagggctagttggctggattcacgcctttttaaggaggtgacggagctattttgttttgagtatcacccactttttccttccccttgtcctttgtaggagttgaggttttagcgttgggagagtttgctctattttcactgcgaactagttccactaaagtgtcctctttggaatcttcttctaggtttttgaattttgcatagaggtgggccattatcttttccatcttgtaaagagaactattcttaatgggataaattttgttgagtctcaagaagttcattggatactcgaaccaaatctgggtcttagtcataatgatacccttctttctagtagccatctttgacatatccttcatctttgtcctcgtcatccttagttttagtgtctttgtttgcaactttcttgcaatgatgatctaggtcgtcccctctattgttagcttcagatgtatttcctcccattgcatggcttggctaggcgtgctctagaaagggagggtttacatcatcctggagaacgtcggtgttttctagaggagttttctctctcactattttttgtgtagccaccatggtgacgggaacgtaacactcagatctttctcagctcttaatgaaagtaccaaaatattactgagatttttggaaactaattaactgaaagctttaggaattaaataactgtttaataaataagaaaaaggtttaacgtggttcgtatgttaattatccctagttcacgagttagtatattggccttataggcatttatacgtattacaagtggtgtttactgtgagaccctaactctggttctctaggtttctcgtaaagaagataaaaacttagagagcattttagcagagcttcgattattttaattttttatccctttttatgaagaaataagggacttatataggctaaagtgcgtgtatgggcatacccatgacctgcctaggattttttgctaaaagcccaccctctatttgggtaaaatacataaatatattgactattggccccctaagaaggctctttctcgtggggcaaagggtctggacaattgggaccattgcttgtgtagggcacgtgtcgggcgaaagttgaacctggtagacaaacgctcagaggagccgtaagacagaacggtgtattcagaggaggtatgctcaccactatgttatgacatgtggggaaaaatctaatcccgtgtcagaaaagtataaccatcacaagattcgttcaattttagctttgtgacaagctttcgatttttcttgtgcaattggcatcatccttagactcttcgcatgactcccacgtgtcttcttgtaaactaagtggtttggtcttctccgagtctcagagggatgacaaggcttctgggtcttggacaataattctctttgtggtacatttctgggccttacccagatttggacctctcctaagtttgtttagtcttttcgtgactttctataattaaggggacttaattggtaatttcttagttcgtcgccttccattttttgtcacgtatccttcatccagaaacacggataacacttattataaaagaaaagtttgtttttactaaaatagaataattagatataattttccatcaattcaagttttactccaaaatatattttaaaataaataataatttttgtaactaatgttaggatcgtcagacaccatctatctctacattggtgtgatattattcgctttggcctaagccctcacggttttgttcttgggcgcccttttaaaaggcctcattcaagtgaagatagtgtccatgcttatacccaagatccttccccattctagccaatataggactttagttgtacacccaacaatcatcccctgaaataaaggaccacattgcctcccctcagacgattacagatctaaacctgaatccttcagtttcaacactcaagatcctcttaagtaagtatccgaatccctcgatttcaacactcttgtttggaaatctaatgatttattcacatggctaattttggaatcttgtttggaccgtcaaacaccatttatctctatattggtatgatatagtttgctttgggcctaagccctcatggttttgttcttggccactttttcagaggtctcatttcaatagagatagtgtacatctttatataccgaatattctttctaattctaatcaatatgggactttagttgtacccccaacaactaatatttcttttgaaaaataatatactcgcttaatgacatttttgtagctataatatttttatttaagtcacaaattttattcgctaacaataaagcttttttatagttagtgggaaaactcatatcacattttagcaataataacaattataataaaatatatggatataagtgtatacttaagattctctaggtctctccatgtgccatgtgtgtagggctaaaatatttcttagaagtttcttatgaactttcttacaaatgcgcatatgtcttcctttgtggggtatagtgttggtagcatcaatggccagtagctaagatatgtatctctttttgattgtttttttctccttttatatcttcagagttcggtttcatacatattccatcaatagcccctagttggaagatcttgtgacgattcaaaaagttctcatgtagtgtatgaaccacaactattgaaaaagagaccaaaataaagctagctagtataaatgtatgaagagcatcttcttatgtgtgtttctttaactatatatgtcataaattaagaagtttttgtttgagaatatatcatgttatctcaagtataccactatatattatttatgggtgcctattgttaatgtcgacgtgtagttaaagaagtaggaataggtaagtgtatgcagtggtcgtgaggatttaaaataaggagaggcataatttatttttataggtagggacaaaagtaaaaattaaaaagaaaaaaaataactctttatgagaattgaaccattgacttcaaccttatatataatctaatttaaccattacactaaaactaatattatgttcataaataatttttttattacaaatatatattgtaact

SEQ ID NO: 310341 - DNA, 2678 bp, Cannabis indica
acctacacatgcaaacaatatctctgagtcgataaactctgtaagaaaagcataatcaataacatagcaataacccgtattatagtcggcgcccatacaccaaaccataaccctattgctgtgtccaacacgatattgagtctaaaacatttgtatgacaatactatcgaccataatatcagcctatactcggtaggctagtcatactctagctgtactaatgtgataacgccgattagtatttgagccaaacatacatttatcagtatccaatataactctacgtatactgataccgctatcggtgtaatctaataggcttaataaatatgtacactaaacatgtaaacacatatggatatcattatactaatcttacctcgtttccgggtttaggtgtgccggccaacctgagtagaacaactactcaacgatttacaagcccctaattcaaattattcgtaaaactgatgagtgacacgctaaatcacttttcagggacttaaacttgaaactaaaagtttccttatcgatggataacatggcaatactctaaatatcgtcaaaatgagaaaaactagggttccctaaaatacgccaaccggtatactggttccccaactagaattctacatctgtggggtttcctagggaccaaccggttgactagtgtctacaggtccccctaaaccagccgaccggttcaatgcagtacacaccaaaaacttcccaaaccattcaattcaaccccaaacttcatacaaacttccagacctgctatttacaccttaaagaatataaacatagcaataaaacacctccacatatccaaaatcataaattaccattacagagcaaagcttgagttcataaactcaaaccttgctcaaccagcacaaacaaatgtaaaaccagctcaatccaacataaataaccttaatttaacctcaaaatgcaaattcaaacaaccctaagagctgcagaaccctaactcacaaaatcaagcaaaaacctgaacttaaaacttaagaaaaccaagggaaaaggtgctagagtggttaccttcaatggattcaccatgaaccaactaaaatccctagaaacaagctaaagaaacaccaattgctgctggttctccaaggaattcgagagagatagagggagtgaagagagagaaggctattttctttttaattttctaattttaggctaaaaggtaaacctaatgtatatctaaataaattaaagaatatcttcagattataacacttaaataaagttcactaaaagacaagggattaaatggccaaaaagactattttacccctcacataaccaaaaaacttctaactcacttaggggtattttagtcattctactgcatcgaataattcccaacattcctaatgtctaactaacttaccccactactactaaatactaaaatgtgattctaatggccaaaccccgcgttttgatgttgccgggcacaaaccatgcaaaaaataaaattccatatataggataaacaatacaccctgaattcaaataaatctctataaaatgaaaaatcataattaataatctaatttcataattaaatcctaattatctgttaatttctaaaataaatctaagcggtcattacaggtgatcctgaataaccaacatagaaaaatactcataggagaagcaaacaaaacactataacaaaaatgtttagcgatggcaaaaagttggaggttgagtacaacaactatggacaaaactgagaaagggagcgacagcaaaagttacccgaattggagaatgggtgcgaattaatgttccacttcaagacatttcgtggtctagagtgactcaggacattaaaaaccaactatggaaatacatgaaggtgaaattaattttattatttgagttctttactactaattataatttgtacttataattacgattgtcaatttgataggccgcgttcgatgtaccgaacacagataggaaattaaccatttctaaaagtggagagaggtgaaaagattggaaaataccctaacagaaattttttttacatttaaagatgtggctccccatcttctcgataagccacccaaactttataaaaaattattgatttgcaataatagagagagtttgtcgcttcgagattaagtccataatttgaggtgaagaggaaaaaggcccaaaaaagtagggcttataatatttacaaccattgcaccagacgaggtggtgtaaggatggttcaagaacaaatggagaaagaggcaggccaccaaattactgaatttgatagatttaaaatttggaaaagacttcacatgaacacgaaaggcaaggtggagggcccagctgcagaaatcattaaacggattgtaagttagtttaatttgatttgtattaattgttatgcttcataatttatttctaactctatttgttatgtttataggacgtatatagtaagcaagtgaaagagggtgttgtacaagtagaaggtaaaatggacgtgttgacatggctctggggccagatgagcattgtggccgggttcgagcaataggtttcagcatcacccaaaccaaatatttcaacacaccacgccctaaaaggaaaaacaccgatgggtcaaaccagacatcatctgatttgga

SEQ ID NO: 310342 - DNA, 1001 bp, Cannabis indica
tttttttaaaaaaaatgttcgggctggtcgggttcaacctggtaccgttcgagcgggttcatgtgttgagttgttaggggcaccgggtttcgggttgaacccgccaacccgtaatttaaataaattatatatatttttattttttattacggtttatatatattgatttgttaattaaaaaataaaaaaaacctaaaatatttttacatttcagcactcgttgagcaccacaaaaacaaatagctatactctgttgaagtgggcaaattactggctattaaaatggggatggagcttcctcttcattttgaatttcaaaagcttccacaggtgatattaataattcaagaagttgttagcaatcgaaggcttgaagagttgaaggagtctgatatgtttaatccttgttctaagttcttccactatgtggcagctgtgactcatattgcccatcatacgtagtatctcaattcattgcatgccttaaacaattgtcttattatgtgtgttctcgcttctgtaattattgatgcaaattttcaaatccttgtatgatgatctttgcttcgatcaatgaagttatggacattacatttaccaataaaccaacgatgactcttttaacaaagtggaagaacctgccaacccggtcaacccggccaaccaaaacccgccagcccgccaactcgtgccctatttgggtccaagttcactttcatttttttgaactccaagcccgtgaacctgaaatttgcgaacccgaaactcgataaacccgcccgatgttcagccctacgcacgtcttgtgggatattgttggacagactcgtgatgtcagtgtgatgcttgggaagagttcaagagtctatttgaggaaaaattctataacatcgctgtgaggacttcacatatggaggattttgtgaaactaactcaggggaaaatgtctgtggccgagtacactctggagtttgatctgctgtccaagtttgctggtgatc

SEQ ID NO: 310343 - DNA, 1681 bp, Cannabis indica
atatctgaataagatagactcgtggactatgcagagttaactgcaaaactatgtaaaaaaaacatggtatcattattgctattattattctctcaaatttcatatagtttctatgttaaatttattacgataaaggcttattaattggttaacgaaaatttgcgttaacaatttggtgctttcattgagagcgcgcgtgataaaacctcagaaaattccctcctaaccaaaggaaaaaattttctccatggctgatcatgatgaaaacgatatcagtcgtcctgaagagactaactgtcgtcctggaaaagaactgatgggttcacagagactacccacttcaagagaaacacgttcaacccgtttaacacgtttgagaagaagccaacgtggtcatgatcaaaacccaaaaatagggaatgaggaaaccaatactaatgttggtggttctgtaccaatgagtgaaggtgcctatgatcccactaggtacgtatcgttggttgaattggaaaatcgctaactctagcaacgtttggccgaggccaaccaacgaaacgctgagttggaaagagaggcagccgtagccagggaaacttaggaaaatgctgcacaaaacaaacctaatcctagagtgagaaggccacgaggtagacctcgaggttcaagaaccagaaggcaggagacaactctagaaaacccacgaaaaactcaggatgagcaacctggggaaactagggatgttccagaagatgaacaaccaaataatcaggcacctcgacgagaggtaccttagagaccccagggattcacaacccaagagaattaaaacaacgagattccagaatcttctcgtaggaatgagaacttaacgtagcccagaactagggaacaggaatccctcgtaataatgagagaaatcttgggacacaacctagggcaagtgggttaccaccgaggcatccttagcgtccttctcgcactgatagggaggaggtatacacgcaccccagtagggtgcatgcatctaacctcccccgaacggagaagaaccgtgcaagatgaggcaagttctaggtcaggacgttcaagatcatgagatcacagtcgatctacgcaaggaggggatatacctcggcagcgtagtaatgatcaagaaagtatgagtaatacgaggagcaatcaatctgagagttactcatatacgaggtttatgtgcaaccatgaacgaagacagctagatctttgtgaacatttaaatgggagacatcttgatttgcgcgagcgattaaatcagaatgcacctgatttgcgccaacgactcaatgccaatcgaaagcaagaggatccaattcaattgcgaatcagtgagttgaaaagtaaattcaagagatgtaaagatggggaatatggaaaactgcctggttacgactcaaaggaagagctcgagcctttctatcctatcattatgaactttgaatttgccaagggatttaagaaccctcatgtatctccatacgatgggactacggatttggtggctcaccttaacaattttaataccattatgcgagccaacaatgtcacgaataacttacgttgtattttattccccatcttgctgaccggggcagcgagcaactggttcaataaattcacccatcactcaattacctcttgggaa

SEQ ID NO: 310344 - DNA, 1351 bp, Cannabis indica
cgcacgtaatttttgctagtaatataataaagaccaatgtataataataattaataatatttacctaatgataagggcaaaggaaaaacaccttgtaagctacgtcgactaacttggtgtactaattagctattttgagttcaaatttgactttgtaataatatcattatcctaaatataattaatttatttatgttttgccccattatttgattggtgcgtcaaaattaaaattaattatgatttttttccttaaattttaacatgtagtaaattgtatcttatgaattttttaagttgttgaattttcttgaattattaagattgctgaatttaaagacttctatacaattctattaaattttactaacgcaaacttaacatgatatttatatattaaattttgttattaaattttaacacgtactaaatttattttgacatataagatattgtgctccctaatttattttgcatttgctaaaaaattgaaatctaccaaattctcataaaattatatatatataaacaaaaaaaaaaaaaaaaaactaaggggattattttaggatttgaccgtgtctatgaacacaatatgttgtgccaaacattaattatttgattttgttaattacaattaattcacacgattaaagaagaaccacaattttttctttcttttttttttttttttttttttttccgtaatgaaaccccaattaatattgggtgcctttgacaattttttaatcaattttctgttttttaattagcaaagtaaaaatattttcaaaagatattttctatgaaactgtattgatttttttttaattttttaattgagaatcaaaatttttattttttcaaattttttgaatttttttcttaatcaatattgtagactccgaatgcaatctggaccttgagatacagactccgacctcaactccaatcttgaactcggactacggtcccaaccctagacacgaacctagattcgacttaaataaaatcaaaaaataaaaataaaaataaaagttatagaacatacttttatttttttattttaaaattagaaaacaaacatagttatagaacataccttttataaaaaaaatacaattttaaaaatataatttttgctttcaagtaaaaatattatcaaacacctttattaaattgctattaatagatgttaaacaaagaaaagcctaatagagcaaaggaaaacacgtcgtgaagaaattccaagtcaaccacttgaggttagctcaagtggccatagatgggtgcgtgagtgttggaggtcttgggttcgagtcccatgtaaaacatgttgtaatatataaacgct

SEQ ID NO: 310345 - DNA, 970 bp, Cannabis indica
tatttttgaaaatagcccttttataaatctaatatccaaactcatatttgatgtttttgtttctagcttaattagttttattttttttttctttagtttattttacatttacattttaagatttatttctatttgggaaatttacaccaaatactaacttttttttttctaaacattacatttataatttgacaagaaaatatttacatttatacttttcttaattttttttactgttttttacttattaaatcttcaaaaaaatctttttttttgtcttttttatatattttttagtcaatttggactctctttttcctttttatttttttaagttagttgttgacttttttttctttctttctcttctctttctctatttttcttttttattttttaatttctctttgtgtgtgtctctctctttttttttttaattttttttattctttgtatctttatctttatgtattaaaagtgtctatctaacggtaattcttgatttaacgtttttgttttttttttcaaacttttctttggaaagtaacgagttttttttttctgaacttaacgtcgttaaagttttaaaatatgaaatgataaacaccaaaaaattagtttgttgagagagaataaaaatcttgcaatcaggagatcgaaatacaaagttttttcatgcgaaagcttctgcaagattttccaacaacaagattaaattttaactgatgaagatggcactatctacacgtcaaagcatgaaatatctgctttggttgctacatatttgaaagtctttttcaagctcaaactgaggaccattgggcattgcaacatgtcctaaatgtcattccacctactgttactgctcaacataatgaattcctctgtcgagagtttactgctgcagatgttttggaggctctaaaaaccatgaatcgcgatggtagtccaggcattgatggaatgtctt

SEQ ID NO: 310346 - DNA, 1581 bp, Cannabis indica
gtgattttttttaaaaaaaaaaattaaaatatttcttttaaatatgtaggaaaaaaatatgtcaattagagagtttcgaaaagataataataagaaattttttttgtagatatatctagcaaatttaaatttaaattacagtgttttaaaaaataatatttttaaaataatagtccatgaggatcatgaagaaaaggaagaattaattataataaaaagttaatggagaaagagatttccaaacatggaggagaatatattatgtatctcgtaaagcttggctaaatagctctgtggggggtcattgaaaaagatgtaaatccatatctcccacttatgagaaaaataacaataaaactttaaaaattaagtattatatatgtgtacaatgttcaattcaagcagccaataattgatcactaatataatattttgactgccctctttaattttcaaactcaaaattgagataaattctttgaatttaaacattattcccactatatacacacacatcaaaaatatttttatatatatgtacccaatattatttatagctttatatataatattactgtaccctttacaatattattttcttcctccccaccttcttctatttcaattaaggtaatgttattttatgattattatttcaataataacatatgttttgatccttaatttttgagctatagtgttggagtcttttagctttgtaatgtaagggttgttgaaaaatttggagttttatcttaaaattaattgataataagtagagtagtatacgttcttatatatggcttaaaatagtagttgtttttactcactaattttgaattattagatctcgtgcggctgactaactatttgaataagtgtagatcgaaaactcggtaaaaatatgactatgatactatgttgggaaacatattttatcttaaaattaattaataatgaatggagtagtacatattcttaaaacgtatttaacctcaaaaagtagtagtcttagtctctagaatcataattgtattataatatcacttttatatatggtgaagatgtttcacactgatcctctccataaatattatatgctatattaagaattgggaattataattagatttagagatttatttatcatgtaatgtgctatagtgtattaatcatcaataatattatgttgagactacctgtttgtctttggtcttaaagccttctattgtttgtgcaccactatatttttgaccttgagccttataaattttttcatttttctcatcaaatatattatatatataacatgtaataaaatttaacaaaatacaaaaataaagaaacaaatacttttatatattatacaaaatatttctttttaggaatacatgtatctattgatattgatgaatgaattacctatctagatttaattacaagaactatttatttattaaaatcttattatagctaggcttaaagcttggtagttgttaggttataattagtctatgtttcgggtttttaaagttagcattatctcgtctattgatgtcttttggagcagttttacgcttg

SEQ ID NO: 310347 - DNA, 3178 bp, Cannabis indica
caaaataaaagttgtaagaattatcttctctgagaaactttaacaagtgaatcaaaaaaactaataacataaatagcagttcatgataactcaagatttaagtcgatctactattgaccatcgttatgatatgaattagatatttatgataaatagcatgttaataaagacaacttaattcatatcggtccttgtcatatataatctctattatatattgttgacctcacttctagtcaacgacaatgagttaagataaaaagattagataaagtaaataataaaaagtaaaaataataattaaagagaacaccataatttctagaggttcagccccgtgagaatgataatagtatactccccttttggttgtattaacttgagagacaaagaatgaagtattctctctctaaagctcttacaatggatctttgagtaactctctcttagattgctcttttcttttcaggtgttctttctgaatcaaatttttgtcccctgaatagtgagattgaaccactatttataggagcttattacatgaagaatggtctcctttaatctataatatataatatataaaataggaaactaaattaattccataattacaatgtaaagaatggaaaactgaggctcattacctttattctctgatctaatcctacaaatatagggattatcttcgtgtcttggaagcaatgatgcctatctctaaaattatcaactcacacatcatgttcagtgcatgtaagttgatcacacgatcgactttgtcggatgtctcttggtgactctattcggacatcctgctatgcaccgacaacatagacatttctaccaatatttggggactgttaggataacattttcccccaagtctgcgcaggaccttcttggtcccacgtggacttcattcgatcaggaaccttgcccgaatgggtgatgcgtgtcttcgacggttgaggttgatctgacgtgacttcgactaagggtctttttagtgtctgagcattaaatacctcttgaaatttgtacctcaaagcacacattgacagttgagtgacagtgcatgcgtgatggttgtactccttataatgagtactaacattcgcttttggggaaaacccaaatatttgaattttaaaatgatatattctcctttgattttcttgtacatgattttaagcgtgcagactttaattttatctcattgtacagctcaatctgaagatggcatatacatacccccatgccaagtctacagccttaaaaaccacgaccaccaccaacaacttgaaaaggagatggaggaggctaaaaaggaggtcgagttgaagtgcactcaactaggtgaggttaacaaacaagtcttggctgctaacaagctcgttgaagacttcaggaaggagatcaatgatatgtcgttcactactcagctcgaagtggacaatgaggccttgctaaggatgtcaactcccttaaggatgagagggaaaaccttcccactcttctttccagtttggagaccaaggtcaaggatctaattgaagagaaaaggagtttgtaggagaccttgactttaagcggtcagattttggtgttgaacaggaggtgcttcaaaaggaggtggaaagcttggagacggctgctctggatgtcttcgataaattttggagggccaacacaggggccaactttgattacctcaatcaaaacaaagaggattatcttagtttctgtgaatcccaaaaagtcaaggaagatgccaaggtagccaacaccaattctctgaccgaccaagacaatgaaaccgtagccgctgatgacgcatatgatccatacaaagaaccagggactccagctgcatgaattgacttctttttctgtatcagtttagcctacaagcctacttttaagtataatatagccgaccaagcatcttttaaacttggagaatatttcattttattttaagacaactggctagccgcgcagcttttaatccaagatatatcaagctttgttatcttttaaaatgaatattttctcttaaatataaatgattgcacatgtaaatatttttatttttcgagattgttacttacctatgctttatatgggtatagttgccccccaaatgactgagcagacttatgaatcttggtcacttgtattgcacaagttcaattttgtctgtatggctactaggtttaggcaaactatttgtacgcattttcaatggtaattacataacttgctatgaaaaagagataaaagggacacaattagaatgataattaatatatttattcatttattggtctagatgtgttgttactgtagtaacgtacatgtattaaattataaaagcaattatatgttttaactaatctttagctaattgaaacataaaacaattgaacggtatagttcgtccaagagacattactcaagagtaacgatttctgaacatattgtactttaagggttgtcatccgacctaagtaccagttatttttccaagcctttgagcgaggttcactcaaaaggatacctacttaagagtgagtgttcgagcattgtatactttaggggggtcatcagaccttgtacacttagtggtagtattttctcaaatgttcaccattctaatatcttggtactagaaccagttccatgttttcatcataccaaccaagtttgtatgatccataatctgtaaatttagttacttgatatggcccttctcaatttgggtctgagcatgccagttgcattgtcttttgtgtttaagaacactcttttaagtaccatatctcccacaaagaattttcttgccctcacttgcttgttgaagtaccgagttaccttttgctgatgaaccactagctttaggtttgttgaagctcttttttctttaatttcatcaagtgattctgccaggagggcatgattagtttcatcaagtgattctgtgggatgagagttctaattccactagtagcatttccttataaccataagccatggtaaaaggtgtctgccctgttgctgttcttttagttattctgtatgaccacaatacttctagtaattcctccatccatttccttttagcttcttcgagctattttttcatggtgtctttgagtgtcttgttgactgctttgacttg

SEQ ID NO: 310348 - DNA, 3379 bp, Cannabis indica
ttaattttttaaaaaaataaatactaccctcttcatttttttacattttattcatctctcttactaattttgatccctatactgccatccctacccatcaggaagcattatttatgttgagaaacatctacaatcatctgaatacatacacgcacatacacacagcaaataatctccaaagaacacacacgaaagtacccaatagaaccaaagatacaaccacacaaacttgagctctaaaaaaaaatacttttttttttattgatttaggaatatgtttttacaagctgagaattttacacttgattttccatgacagaacttctaatagtatttttagctaactaaacactaagaagtaccaattgtcataaatgtcgagatgtcaattatgacagttggacttacaacatataaaaataaaatattacacataacaagctgaatacacattttataggacatataatctaacaattctccactttgaactgataatgtgtaccaggttaagactaagaatctgagacttttaagatgctaaggcaatgttcaaattttgctgcaggcagtgacttagtaagtatgtctgcagtgttcttttcagttctatctttaataatttgaaccttgccactggatagattattttggatgaagtgtaacctaacatcaatgtactttgttctctcatgaaagacttgattcttattgagatgtaaagcactttgactatcacaatgaatgcaaacagtctgctgatcaatccctagttcccttgttatctctttgagccacaaggcttctttgacaacttttgtacaagctatgtatttggcttctgtagtagaaagagccacaacaacttggagattcaatttccaatttattgtacactagtttagcagaaacacatagccagattaggatcttcttgtggcaaggtcaccagcatagtctgaatccacatatcctactacatttgaggtagtatgacatgttccatatatgagaccaacctcaggtgtcttctttagatacctgagtatccatttggtttctttccaatgctctacaccaggttgtcccataaattttctcaccctactcactacatgacttagatctggtcttgtacagatcataaggtacattatactgcctacaatgctagtatagggtacctttttcatgtagctaatatcttcttcattagatggagcttgtgaagtagatagcttgaagagttgagtaaagggtgtgctaacaagtttcacattagtgaaaccaaattttgatagaattttagagatgtaaccactttcagagaactttaagcttctccattttttgttccttgtaatcccaatccctaaaattcttttagctgcgccaaggtctttcatttcaaattccttactcagaagcttcttgactttgtctattttgcccatatgttttccagcaattagcatatcatctacatataggagaagatagatgatgcaacttgagtacctaacgtaaacacagctaggcacttctcctgaaattaattttcagtacatattcattaaatcttttgtactatttcctagaggactgttttaggccatataggaatcttttcaataggcaaccatagtcttcctttccattttcttcaaagccttttggttgcctcgtgtaaatttcctcttccatggagaaaagctcttttaacatctagtttttccaattcaagatcctcagtagtaacaatgcttacaagtaatctgatggacgtgtgtttcacaataggagagaaagcttcattataataaattccctctctctgtgtgaagcctctagctactaatctagccttgaatcttacttcctcaatcccaggaataccttctttgtacttgtacacccatttatagcttatcaccttacaccctactggtttcttcactattatccatgtgctattcttcctcaaggataccatttcttgttgcattgctgagttccattctagcttgtaaatggacaccatagcttcttcataggagcaaggttcttcaccatcaaattctgatatatttagagcatagaagattaagttagcatatccaaacctgtttggtggtctgatatctatcctttccctatctctggttaactgataaccttgatgctcatcatcatgctcaaattctttacccgtttgttcttcaacttcttgttcaacagtgtcatctaccatctgaaccttctcaatttgctccacctcaatctgaactttcactctgatcttattaccagctatgtgtgaacccttttcttttgaaagatccttgtacatggtgttttcatcaaatacaacatctctactgatgaagttcttttaatgatttccttcttctatgctccacatcttatacccttttactccttcagggtatcctaagaaaatgcatttccttgctctagtagaaagttttccctgtctaatgtgagaataagccacacatcgaaagatcttcaaatgatcatagcttataacatggccacaccacattttagatggagttttgaaatttattgtagatgaaggacatccattgattagatagcatgttgtgacagcagcctctgcccaaaagctcttaggcaaaccaaagtatattaacatgaatcttacccttccaagaatggttctattcattctctcagcaagaccaattttctaagggtttcttggaactgttaggtgccttccaatacgatcctttctgcaataatcattaaacaaatttgcacagaactccaggccattatcagttctcaatttcttaattttctttccagtttgagtttcaagcatggctcttagctccttgaacttgtttaaggcatcattttttattttttagaatatgaatccacacatatttggtataatcatctataacagttagaaagtaccttgctccacctcttaagagagtccttgaaggtccccataaatctgagtgcaggtagtctaatttgttgcttgaggtgtgctttccaatcccaaatttgatcttagttgatttcccaagcacacattgctcacatagatccatgtcagtgatttgttccttcccaaacactcttttcttactcagatattttagaccaccaaggctaatatggccaagccttctttgccaaatcattgttgatctgttgttatttgaggtggtggcattaacatggttcttggctgaagttccattcagtatataaataccattcctactaactttaatcatgactgtcatatatccctttataaccttcaacataccattttcaactttaacaaagcaaccatcttgatccatca

SEQ ID NO: 310349 - DNA, 665 bp, Cannabis indica
attcattacataaataaaatacacaaaatgggggattgagatagcgtgtcgtatccctctaattcaatcccatgattatagggattgccttggtgcttggacttcaagatatcattcttaagtaagtcttggtaagcagttcgaaaagccaaacttgcccctattctggtagttttccctttaccttgttcgggtaattagagatcatatgcgttgatgttacgtgaagtctattcaggatactcatctcttcccagatgcaagaaatgttggacacatgtcacccgtatgtgctgccacgtcatagtgcaaaaaatgggataacatttgtcccccaagtctgtgcggggcctttgaggtcgcacgtggacttcactcggtttggatccctatctgaacaagtgcacgtgttgaaagtgccagttgacgatctgatgtgactctaacaaagggtctcttcagttttttggctcattaaagcttgacatgtacctcgagccacaccttaaattagcacgtttgacggttaccattcaagtacttgagtgcataacgttcacatttggggggaaatcaaggttttcaaattttgaaatgttcattttgcctcactaattggcttataaatatggctgaaatccctaatcaaccacttttagccattt

SEQ ID NO: 310350 - DNA, 2543 bp, Cannabis indica
atcaattatttatttatttccttaaatagaaaattatttccataaatagaaaattcatttccataattaaaatattcttatagcttgaacataaacttcatcttaagaatgataacaccttcaactatagtcttttcaacaataatgtgtgtgggtgacaaccattgtataaaaccaagacaaacctttcttaaccttcaaggaaaaatcctccatgcttttataagttataaccttgttcctagaaaaggccatcaatataaagtgagtgcacttgatcaaataatcttatacaacgtcattttgaaagacagccaaataaatttaggttactttatccttaaaatcatcaataaaatgtataagcctaacctaaaaaaaagtcttaacctatgattatcgtcttagctacttgttcccactcttaaaaatcccaattgaagatgaaaccgacatttatgaacccaatgattccgacactcttggtgagatcacattaaaatcaatgtgctacaagtttaatgaagaggaaaataagtgaatttccaccaaacaaggtccacactcccatgcggaagccactttggtctcaagtgaaagtgcagaagaagagcaagaagcccaagtgaaatgaatactcatttttccactcttcaagatgagatgactaccataaaaggtgacatggccactatgaggagtgacgtggagcacgggttagctgatgctcaagaggagatggcacaatagaaggcatacatggatcgttttgaacctccaccaaattagctctcttgcatttgttttagcatcttttctcatgtattttttagtatgtttgctaaggcttagtgccttttgacttttatgtgttagttttttatatttttttttattttattttggatgatacgtgtttgatttttttatgctgaatggtatgctttgttttatctttttatttatcttttattttttgaattcctttggcacactttttgatgaatcaaaagggggagaaattctatggtgattatttttttagcaacaaactcaattttttggatatctaatgctttttaaatattagtataaaattgagggggagtttacaaaatcaagtaaaattaaaaggtaaattttttttatccttgcaaacattaagggggagttaatctaatatgttgctttaatttttcctttctttttttttaaaaaaaaaaataaataatcaaaatatttgatatcatcaaaaaggaggagattgataacacaaacatttagatttccttattttgatgattaacaaatatttgattattatttgttactaataatttgttaattttgtagcacaattaaaggtaaataaatttttctaaggcaaaattaactccaaaggatggtaattttaccgaaattctcaaaagtgactcgaagtggattccaagactcaaggaactcaagacaagactccattaaggtttatttacattttctagtcttgtatagtgattttcaagtccatacataaaaaaaaaaaaaattaagtaaaaattctagcccactaacttgggcaacaagttttctcaccaaataatataaagaaaaatttcaattgactttttaaatcacatatcatttaactaagtgaacaaaattagaatttttaaaatcggataatcgaataaagagttatggccattttagtgcaaaatatattgaactttttgccactgccaggaatttggttaaccaattcctaaacggttaaccggttctccctgaaatcggtttatcgtttgggaaatagtgaactggattgcccagtggcagtcttgtttttcgtttctaacagctatattttaccccaacactatataaagtcgatttttacttaaaaatttaagttggtcgagcatttatttcatacacataacatattcaagtgattttaatgggctctcaagtctaaaatctaacaaactcttttcacacatttcagccaaaaattgtatttaattctttaaagtgtgcttgttaatcacttgaggttttccattgtttcatcatacttctagagtgaatttgcttgtgatttcaagcacatttccatattgtgattgaggtgaagttggcaccattattgtaaataacctgggtagagtgagattgttactacaataatccgagaaagtggttgatagtccttggcggtgcaaaactattgtaagatgtttggaaataacttggtgaaaaattttcagttgtaagggttagtcaagcccgttaacttgccttgatattggaactcaaagctaggtcaatagctttgaagaccaaagatgtaggtgacttaattctaccgaaccttgtaaaaattgagagtttggaagttcttacccttaaactttttactttacaagtttgattatttgctatacatcattgcttgccatattacttgcatttatttgattaagagattaattgcatagttttgtgttaaaagttttaatttgccgaaattagtttaaatttcc

SEQ ID NO: 310351 - DNA, 1884 bp, Cannabis indica
ccatgaaaaggccaaggtgtaacgtcttaacccatagggatgccatatgtgtgttattataagttagtttataataataaactaattaaaaaaatgtgatttaattaaaatttaatttaattattcgaaatataaaatcagttcttgccactatacaataattagggtcagagatcccctttaaaatgtttacaaagattccattaaaatttatacaaccaaatactcattcctttcagagttaccataaccagaaccctgactactcaatcctgtccattggataagctgatatgtacatttgtcgaaaaagacctctaactcatgacttacctagctcaatccttttcttacctgcaccacaaagtacccgtgagtcacaaagactcaacaaaaaaagcaaaagcatacacaatacataacaactgttgacctcgtttttagttagcgacagtgagtcaattaataagcaattagaaatgtaattaagatagagcaaaaatcagtaagcaattaagaacacaatattttaaagaggttcgacctctttagttcggtaatagcctactccccttagaatgtattgacttgagaacaatgaacacaatgtttcctctcttaaagctctcacaataaaatctctgagtactttctcttagatctctctctaaagcaattcttttgttccttatcacagtgaagctagatcactatttatagggctaaatgcatgagggaaggtttcccttttgcttacaatatctataattggtaaatgcatacattacatatttagaatacatgaaatgggggattgagacagcttgcgtatctctctggcatgatctcatgattgtagggattgcttttatgcttgagcttcacaatatcagtcttggaataattaagtcttgatacatggctcggatcactctttcctcgggtcatctactcttgctccgctcgatcaagcaaactttgtgcttgcagatgtgttgcttggagtcttttcggatcattcttttcgtcaagcgtaaagaatagctgacacgtgtcactagtacatatttccacgttatagtgcaaaaaataggataacatttgcccccaagtatgcacaggacttccaaagtcgcgcgtagacttcactcagtttgaatttgtgtttgaatgggtggcacgtgttcgatgcgcctgttggtgatccgatgtgattctgaccaaaggtctttctgatatttggctcataaatgctgattgattcgtacctcgaactccttcagaagtttgcatgcttttgacgattgctcttcctcaggtaattgattacttgatggggggaaatcgaggcatttaaatttcgaaatggttataattcttcactaattttcttataaataggacaaaaagtcctaataaaccacttttagcattttcttacttgacgattttagaacaagaacactttttcctctcaaattcttcgacgaatttcagaaagtgtcaatcagcgtcatctgagcaaccccaaagcttcaaaaatgagtaagttcttcatatttttctcctttaacatttgaatctttaattttctgggttttctttgtagaaaattcgatagtcttgaacttgttctaggaaaatgatagagaattgttacgaaaattataatcactacgcaagtatacgcaataaagtagtacactcacacaggtgaggtcgaaccacagggaattggactaattactactaaattatactattgattctatctggtaaaagaatactttttatgaattagataaaataattcagaaaattaaaactaacaaaaggaagattaatcaagataagaaaatagggagacgaatcctgttgttaagt

SEQ ID NO: 310352 - DNA, 3546 bp, Cannabis indica
aaagcattggtaaccatcacagcatccgtttcgacatgaccaagttgaagtcccaactgagtagcccataccaagctgtggaaaattgcctttgcctccatttcatgtgatgcaaaattcccgatgagaggtttggagaagccagcaattacaacaccctcacaatttcgaataacagctccaacgccaataatgttgttagttgagtccacaacagcatccacattcattttgaggcttccgaagtcaggtggtcgccaaggtgactcagaaattggtactagtggggagttctggtatgctggaacttgttgaggccggaacttagcttgagcatgttgatagttggactagtaattgttagcaaaagatgctaaaagagcagcagatttggctttctgaccatggacaaccctatttctttctgtccaaatgaaccatatacagaatatttgctccatttcaatcgttgaatgtagagtcaccaggtgagctagataatcgcctttgttcattagtgcagcagtattccaatgaaactgaaagttcgtagaccgccaaactgcccgagcatacttgcatccaaagagtacatggccaacggactcccatgcttgttgacatattgtgcaagttgaatcagtaatgatatgtcttcgcaccagcgatgtagcaactggtatagcatcatggaacacaggccaaacaaagatttttattttctgggacaactgtagtttccaaaagaatttccaccagtgcgtaggtgaatttgatgtggaggagaggtctgaatcctcaagagaagcatcatgatgataacctgaatgaacattgttaatccctgaattatggtggtgccaaatcaacttatcatttgccgaaaagtaactcaatggaatggtgagtatacgttccacatcaatgctagagaagtattcatcaagcagctgctgattccattgccggtcctctgtgattaaattggcaactacagcgtttggttgtcccttatagtgagttggtatgaagtttgtatggctagggatccaaggatcggatgcacaattgatgtgtcttccttcccctattttccaccgtaaactaggtcttaagagctcttgaccataaaggatacctttccatgtgagtgaaggggaatgaccattaggagcctcaaggaatgagttgtttgggaagtatcagcttttcagcaatctactcaaaagagagaaaggattgtcgagaagttgccatgactgcttggcaaggagggcttgattgtagtgtataaaagaccgaaaacccattccaccatcaaatttagtcttgcataaaagtttccagctttgctaatgaattttcgtgccattttcattagaaccccaccaaaaattggacatcattatttcaagttgattgcagattgtaaccgctaatttgaaacaactcattaagtaagttgggatagattgcaccacaactttgagaaatatttctttacctccaacagagaagagtttgtcattccaagtcctcattgccagattttttctttgacttcactgaacaattgttgcttatcatgatctgtgtatgctggtaacccaaggtatttttcatgacaatcacggatgggcattgatagcactttaatgaaaatgaatttgagcagccatagttgtatttggtgagaaagagaggacaaatttgtcaggattcaaaacttggccagaagctcggtggtatatatcctggcaacgtttgatagcatgacaagaactttcagtagcattacaaaatagtaagctatcatttgcaaaaaaaagagatgtgagattggaggggatcttcgtgtgagtgagtaaccataaaggttccctaagcgctcttcattttgcaggagacataagagaccctcagaacaaattagaaataggtatggagacaaaggacaaccttgccttagccctttggttggtgtgactgaacccatggtttccccatttaagagaaaagtaaacttgttcgttgtcaagcaggtcataatgagcaacgtccatctatctgcaaaccccattcgttccatcacagccttgataaagttccattcaacccgatcaaacgctttactcatgtccaatttcatagcagccacccctttcctacccgatgttttgagtttaataccatggattagttcaaaagcaaccaagatgttgtctgtgatgagtcgatttggaagaaaagtactttgagtctcggagatgacgtgtggtagtacatccttgaagcgaacaactaggattttggtgatgagcttggacacaacactgcataagctaataggtctgaagtctttcatgtactgagcctttctgatctttgggatgagagtaatgatagtggaattcaaaggtgtagggtcagctccatcatttagcacacttaacacagcagatgtgaccttgtttccaactatatcccagttgttttggtagaacattgcagacattccatctattcctgaacttttatctggccccattgagtgtagagctaattaagcatcttccttggtgaatggtttgagaagtgtagcattcatatccatggtaaccgagacatgtattgtggctaaagttgcatcaagagtattactatcaatgaaggaagccttaaataagttggagaagtagtcttggataacattactcatatcagcttttgaagtaaaagtgctgccatcttcagttttgagagatgtaattttattgttagaccttctagccgaggctttggaatgaaagtactttgtatttctatcccccaattgcatccaatcaatgcgagaacgttgttgccagtacatctcctcttgttctaacagctcatcaagaaccgattcattatgtttgagtgcagcaactgtttcatggctgagaataggagagttgtttagagtccactttcgattgagtttctaaaatattctttttcattcggccatacttcttgatatgccactgctgaagtgatgtcgcacatgattccaggttatgtataacattgctgatggggtctgttgtgcaattagatagccaacaattggagataatggacttgttgtctgggtcagataaccacagcttttcaagcgaaagcgactgtgtcttttatgctgttgagttgttgtttcattgaagatttctgctgaaatgacacgatgatcagaatgaatgtagtccaaatgagagatttttggttgctgaaaagtagagggccacacatcatagtcaataagctctttaaaagtgttgatggtcgttctatcttttgcccaggtgtagccatctccatgaaaaggaggatcaaaaagatggcaatgatctagtgcatctcgaaaagcagtcatttgggactcactacggagagatcccctggatttattctcacttgatattatttcattgaaatcccctattgattatccatggttgtgttagaatataattttaccaggatcttagatctactcacagtatg

SEQ ID NO: 310353 - DNA, 1869 bp, Cannabis indica
acacaactaaaaccctcatttagagagaaatgatggaaatttcaatccaactggtgaacaaatcccagagaagcaaagtgaagacgcctatcatcccaccagatatatcccactggtggaattagaaaataaaaaactttgacagtgcctggttgaatcaaattgaagaaaatgttgagttggaacaagaggctatggcagccaggattgcacagagaaccactcctcaaactcaacctgatccatctagaaggcggccacagggaagacctcaaggctctaggaccaggaggcaagaaaataaccaagggaatcccacaaatactcaggaagaacaacctggaaatacaagggatatccaatggatagagaaaattcacccaatattggaaatacaagaaatcaggagcatcgacgtgatgttccaaaaacatcccatggatttacaaaccaggggaatgaacaacctgatatactggaatcctctcgcatgaatgcaaatgcaagaaagtcacaaccaagaaaccaagaaatccctcatcatgatgggaaaaatcctggaaatcaacctgggacaagtcaacctcctaggcattcacaaaggccttctcgtaatgacagagaaaatacacacacatatctaagtagaggttgtgtatcgactctctttcaaaaaagaaggccaatgcaagatgaatcgcgaggagccagctctagtataagggagtcaagatcccacaggcacagtaggtcaactgggactcatagacaaatgtgagatggggataggacacgacattattttactgatcaagaaagtatgagtaactcgagtagttactaatctaaaagttactcgaagactagattcgtgactaattacgaccagagatgtcgtgaacctgacctccgtgaataattaaatcgaagacaaccagacctatgagaacatttaaaccgtaatgcacaaaattttcttaaccaacttaatcaaaacgcgaatcagtagcctgtggatcccatacagtttcaagtaatacagttggaagacaagttcaaaaaataccaggatggagagtatggaaaactaccagggtatgattcagatgaagagacagagacattctaccctgatattctaaactctcaatttccccaaggatttaaaaatccacatatctcgcaatatgatggtaccaccgatcctatcacacacctgaataattttaatgcaataatatgagcaagtaatgtttcaaacaacttacgatgcatattgtttctaacttcattaataggggtagcaagtagttggtttgacaagttcaccaaccattccataacttcctgggagcaattgtcaaagatttaaaaaagcaatttcaagctgcgagagatcgtcgaccagaagcatcttcattaactaatgtcaagcaacgaccaagagaatcccttaaggcgtacttaagtcattttagtacggttgtagccaaagtcagaaatttgaatgacaacattcaattaatagcccttcaagctagaatcacaactgacttgtcaactacaggggagaattatgggatgatttgcaaggacgtcctgtaagaaatatcaacgagttcagtgaaagaacacatatttttgtgcggaaagaagaggcacggaatgagattaagttgttaaagtctggctcgggagataaacccaaaactagcacagaaatagcgagcactgtgactgcaaaagtggaaaattcgaatggttcaaatactaagaggaaggatgattcaagagactcatccaaggataagaaaaagcaaaaagaaacatgagaagtgttgggattttatgccctaaataaagcccatt

SEQ ID NO: 310354 - DNA, 895 bp, Cannabis indica
tcgaaccccaaacccagacccggtcctagaccccaaaccccaaactcagactcagacccagacctcgatcctgacgctgacgctgaccccaacccctcaaactcggaccccaaacatggacttggactccgaacagtcagggtcggggtcggggtccgggtccaaggtctagggtccatgtgtagggtccgggttaggtccaagtctgtgtttaaggtttgggtccgaggggtgagggttcgaggttcgtgtttggggtccgggttagagaggtccaagttcgaggttcgggattcggtctgggattcgaattcgggtccaagtttgattggggtccggatccaagggatcaggatcggggtctggggtctatgtctggggtccggggtctggggtttatgttatgcatatttaatattagtttatttttatttattgatagttaataacttttttttaaaaagaaaaaattaaaattaacattcgtcagttagatgggatatagaatacccagctgatttaattaagcaaactgaagaccaagtttgaataatagccaataattcagtaacattattcgaaaacatgatccttccaacccaagtgcccatgcagcccatacaacgtacacaaatataatacgtaccttgacaatctctaatactaatagcaacgcccatctataggtagttaactattttattaaaaatgcttaagaaaaaaaaaactactactttattaaaaatgtaaatatcgtgggtcatcgaccttaactcgcaaaagacctcccagtaggggtgtacgtcgtcggtcgatttagttgggttatagcatatttttatcaacccaatataaatattgggttgcaaatattaatcgtaacccgcccaatcaa

SEQ ID NO: 310355 - DNA, 771 bp, Cannabis indica
tataattttacataaaaatattgaataaaatataatttaatataatattatacaatacaatacggtgtaatatggcgtaccaaacgaaccctaatagaaatatgagtagtgagtggagagatacttgacaaaattacattacacacctcttttacatttatgcttttaatttttatctactctttcaaaatttattatatttatctttctttttttttttaattatttttctaattttattcctattatttcacgatagtctctatttttctttaaccaaagttttgtttcaactttctcataaacctacacattcatctccaaagaacacaatctattatgtttgaaattatatcttggttatgtgagtgtgtgagtgtaatttggatacaatatttataaaaaatgtatatttgaagtcaaatttatttagatgtaaatttaattaatgtaaaaaaaaaaatgtattttcaacttctcattttcctcaccttttacgaactttttacattttttttttgagataattatataagacactattttttgtaaaaaaaaaatacaattttacgtttaaagaattgttttttatatttttactgttttctatataaataacaagaaaactacataacagttacatgaaaatatcatctaaataacatcaaaacaacaacaaaaaataatatacatataacaaaaaatcaacaataaattaacaagagtacaatataaaaagactgtattttcggtaaataaaatcaaaaaaat

SEQ ID NO: 310356 - DNA, 1100 bp, Cannabis indica
tacagtaaaaacgaggaaaaaaataactttaagtttgtatttatattttagttctaatttaatccgtataataattcaaatttaattcaattattttagataagttattttttaggtaaatacaattttgaattatatattttataaaaattatgagttaaattttctgttttgttaaataagaaaatggatcatgtattttttaaaatagtaaaaatagtatttttagtttaatttttgacaattttttttttaatataacaaacttaaagaaaatttctaacacgaatagatacaaaaaaatataaatagttttgtcataacacatttaaattaaattattattaaattttattttgacaaaaaatcagttcaaagtcttatttgtaccattttgaaaaataaagagttcattctatcattgaacaaaacagatagtctaattgataatttttgcaaaacacacaatccaaaatagtatttaccctacttttaatatatttattaaaaaaaatattttttcacataattatcaacaaaataaaataaattatgattgttttatttctctaacaataaaataaaaaaaataaataaaataaaaaataacaaattcaaaaaaaaaattgtgtataaagaaatatggaaactcaaaatgcagaaaacgggccatgagttgagaactccaatgattggtggagatttcgagggtttcgaagtggttgagctcgtggattttgaggatgcgggttagagaaagggagacgtagcgagagagagagaccgtgagagaagacgacgacgggggcttgtgactggggttctgggtttgagttcgacggtgaggttctgggttggaattcaacgttacgggtgcacatcaagtgggttttattgggttttgaatttttcgagttcgggcgtatagaattagtaacccgaacccacccgtttgtgtgactgggttttcggattttgggtgtgggtgggtcgggttcaaagttgaaccaagtccgagtgagttttgacttggttcgggttgggttgacctttttggatttttctttttctttttgaaaaatatcatttttatacatttt

SEQ ID NO: 310357 - DNA, 1791 bp, Cannabis indica
gttggggtcgccgaccacgatcatggatcctcgaggggcccctttccctctgttcgggcagtggctcaactcgacgtctcatttccagtcatgtttctcggggaggttggcagtgggtggctctttgaacactgttaatggctcgcttggtgccacttcggagatgccggcggtggacggaattgctctggcggcaagtgacctgaaattttgtacgggttctggccatcgtgctcctgccttagtattgcaatcgcagacgacagggacaggtcaaagaaagaacgttagagacaaagcttgggttcccaagcctatgttgatggatcagtgtactttgggagtaggtaatcacgttttgggaaacccttcatcgttcccagctgtgagtattgcccaaagcactgtggcaatacctgttatagataatatttcaaatatgagggctacggaggagaacgccagctgtatgggtgtactgtccaaggaggtggttggaaagtcaaaggtggaccctattgtgttggttttgggccgaaatgagaagttgggcccttgggttttttcggacaacaaggttaattttcaatgtgatgaaattggtgggccgggccttatttatttttctaataatggggttaattgtcttaacaagtcgcctcctctccatttggagaatggacattatgttgatgggccacctagtgggatccacgtgggtagagatgtgggatcattggataggcccaataggagtgggccttctgtggtgggtgctactcgttttaactcatctcacctagttcgttcggcccatcaaaatgaaagggaggctttggctagtttccttaagacccaagacatttttatccgtgagattcaagagctcgatggtacgggaaaaaataaaagaaaatcttttggtgtggatattgggatttctcccaactcagaatgcaatgagcgtaccactcctgttaagaaaaggcgcttggatgttgaaccctcccctatgggagtcaccccgttggtgtctatgcgtagagttaaaagggtggtcagggattatcctcggggtacgggaccactggggcgggtggagaataatttgtgcgaacatgcttctaatgagtctactgaggaaccactggagagtgacgaaattgtttcaaggggaggcgctaagattggcggttctccctcttttaaaggagtcgaaccagtctcggtgggtcaatctgtgagactcacggcttggaagatgaaggctcgtctgatggatctctctattccccgtttggtgggtactcaaattgaagatgctagttcagcagttggcgtggcggtgaagtctttgacccctgtggaggaggccggtgtacctcctccacaggagccatgagaggtgtcgcttggaactgtagagggttagggcagacctctacagttctggaactgaaagccctgattcggtcgtgcaatcctgatttcattttcatatccgaattaaaagtggatgccacttctctggtacgttctcttaaaagattacacttttatcataatattgttgttcctgctgtggggagtgcgggggggcttatcttggcctggaaagaaggttttagttttgagaatatttacatttctaagaatcagattacggggatagtgtattctgaccctgatcataacccctggttgttatcttgtgtctatgggcctccttattttcatgagaaaaagaaattctggttgaacttgatggattatggtaagaggtttggtggg

SEQ ID NO: 310358 - DNA, 2367 bp, Cannabis indica
tttatttactttttacaacaaaaaataagtcatacaactttgcatagccagcactgcttcaattttatgtaaaaacttatcttccacattcagcaaaaataaagtaaaaggtttgagtttggcctgatcatctcttcctctctttaacagtgagtcaaagacaagaatatgtcattttaggaggaaaaatagtcttacttcctatctaaaacttccaatcttactcctatgcttcttaaaaggttgaacgccttgttatttgatcatcaaataatatttgttcaaaactctgctacctcgtttcagctcttctcaaaagaacacacgcagatttaacaagcaacacaatcttttttttgtttgaccaaattgtacgaaacagctggagaacaaattagggaaaaaaatagaagcgtttgtttgtaagtgtattacttatattaattggagactaactggggaagctcagcgttaaagacaaattataatttgtattacacaacattgcacactctaatcatcaccctatcacattgcaggtttaaattaaatggaagaaataatataaaaccttaccgctcccattatctcatgtggtgatccaaaacattcaattgctaaatgtaaatgcccaagttgggcaggtaatctttccttcatcctacagattggttatgcagcttatgctctatgtggtttgccttctctagtgatggttggactagtgttttggtgatggaaatatatatccataaagatgttttgaaatgtcacgcgttaccattatttcttccacagtgaaagcggaatgcgttttgacatcgtaccttctcattgaagaaaaagattcaccagagtcgagtattttcaacccagagaaataatgcagatcttgtattatcaaatcatgattttatatgtcattatttcataaattaggatgttctataattattctatttgtcatattgtttctgagtcataaatcactgagatctatgtcattgttaaatgtactcccaaattcttcattttcagttatttttatctaccatttctatttcgacctatttgctttcatctctagaagttcttttttttcctcttcattccacatcacaaagtcaatgtctaatataaatacctataaaaagccattattaatattacctccaattcttgcttccttatttcctccttcctggcttctgatctagcacttctttgcacttcaaagatgagagcaattcctgctacctaccaatgtaaataacaaaataaataaacagactttagatatatgtacatgttaatctttatacacaagtaatttctgatggaaaaacatgtttgtaaaattttagagccctgaaagtggaacctatcgaaatttcagctagtggactatagccatctatgacaattctgcaaataaagtagctaggggttgaatactaaccgtgaaaacaaagagttcccctataaggtctacagcagcctgtacagccttttcctcattcagtggacgaatttcaacatcagttgcatgaccatagatacgcctttgcatttgtgtggtgatttgatggtttttctgattgaaagttagcaatataaaatgacactaagtatttgatgacaagaatggatactcaaaaataatatattaagaagcaaataaatagaacaagaaagaaaaatgaacataaaaagcataacataataataattattatgcactattagagatatactatgttcattatattgattgaaaaacaatcaataaccacacgtttagcaataaggtaatgcagtcctgatataatgtactagctccaatatcatagtaaaaaaagaaaagcaataatcttatatgctcaaaaaattaaatcacatttaattaaaaaaaaaaaaaaaagagtgtctgtacttaaaaaatgtgatattatactgatgggatatacagaattaactaaattagattccaatgtatgaatgggattggggtatcgaacaaaccaatgaaccaagcaaaccccagatgagaaaatgagatcaaaggtgtaaatatcaaattacctgagccatattgatgattgactgacgaaaccttggatgcagaccagcttgctgcttgattttgctagcgatgggtttactcacagtcttcaagatcaaagttccgagcttcacaagcgggagtaccatgcctcttgtaataaaaaaaaaatggatctgggaatgggaatttgtgattttggaggaaagagaaccaaaaagtttcttcaaaatcgaaaggtcaaaatggacttgtcgtgtaattttgactagatatcaatatatatgagagggagaatgagtttg
